United States Patent Application Publication US 2011/0183924 A1 - sequence listing, part 192

SEQ ID NO: 458205 - DNA, 6912 bp, Homo sapiens
cgcgcacagctgggacgtgggccgcggccgggcgggcgcagtcgggagccggccgtggtggctccgtgcgtccgagcgtccgtccgcgccgtcggccatggccaagcgctccaggggccccgggcgccgctgcctgttggcgctcgtgctgttctgcgcctgggggacgctggccgtggtggcccagaagccgggcgcagggtgtccgagccgctgcctgtgcttccgcaccaccgtgcgctgcatgcatctgctgctggaggccgtgcccgccgtggcgccgcagacctccatcctaaattgccgcagctaccccagccttcagcagccaccaccctgatccgtcagcagccagcaacataaaagcaaggttctctaccagccaaaagaagaaaactctctgaaggctcagagatcttcgctttaacagaatcagagagatccaacctggggcattcaggcggctgaggaacttgaacacattgcttctcaataataatcagatcaagaggatacctagtggagcatttgaagacttggaaaatttaaaatatctatacctgcactttaatcagatagaaactttggacccagattcgttccagcatctcccgaagctcgagaggctatttttgcataacaaccggattacacatttagttccagggacatttaatcacttggaatctatgaagagattgcgactggactcaaacacacttcactgcgactgtgaaatcctgtggttggcggatttgctgaaaacctacgcggagtcggggaacgcgcaggcagcggccatctgtgaatatcccagacgcatccagggacgctcagtggcaaccatcaccccggaagagctgaactgtgaaaggccccggatcacctccgagccccaggacgcagatgtgacctcggggaacaccgtgtacttcacctgcagagccgaaggcaaccccaagcctgagatcatctggctgcgaaacaataatgagctgagcatgaagacagattcccgcctaaacttgctggacgatgggaccctgatgatccagaacacacaggagacagaccagggtatctaccagtgcatggcaaagaacgtggccggagaggtgaagacgcaagaggtgaccctcaggtacttcgggtctccagctcgacccacttttgtaatccagccacagaatacagaggtgctggttggggagagcgtcacgctggagtgcagcgccacaggccaccccccgccgcggatctcctggacgagaggtgaccgcacacccttgccagttgacccgcgggtgaacatcacgccttctggcgggctttacatacagaacgtcgtacagggggacagcggagagtatgcgtgctctgcgaccaacaacattgacagcgtccatgccaccgctttcatcatcgtccaggctcttcctcagttcactgtgacgcctcaggacagagtcgttattgagggccagaccgtggatttccagtgtgaagccaagggcaacccgccgcccgtcatcgcctggaccaagggagggagccagctctccgtggaccggcggcacctggtcctgtcatcgggaacacttagaatctctggtgttgccctccacgaccagggccagtacgaatgccaggctgtcaacatcatcggctcccagaaggtcgtggcccacctgactgtgcagcccagagtcaccccagtgtttgccagcattcccagcgacacaacagtggaggtgggcgccaatgtgcagctcccgtgcagctcccagggcgagcccgagccagccatcacctggaacaaggatggggttcaggtgacagaaagtggaaaatttcacatcagccctgaaggattcttgaccatcaatgacgttggccctgcagacgcaggtcgctatgagtgtgtggcccggaacaccattgggtcggcctcggtgagcatggtgctcagtgtgaacgttcctgacgtcagtcgaaatggagatccgtttgtagctacctccatcgtggaagcgattgcgactgttgacagagctataaactcaacccgaacacatttgtttgacagccgtcctcgttctccaaatgatttgctggccttgttccggtatccgagggatccttacacagttgaacaggcacgggcgggagaaatctttgaacggacattgcagctcattcaggagcatgtacagcatggcttgatggtcgacctcaacggaacaagttaccactacaacgacctggtgtctccacagtacctgaacctcatcgcaaacctgtcgggctgtaccgcccaccggcgcgtgaacaactgctcggacatgtgcttccaccagaagtaccggacgcacgacggcacctgtaacaacctgcagcaccccatgtggggcgcctcgctgaccgccttcgagcgcctgctgaaatccgtgtacgagaatggcttcaacacccctcggggcatcaacccccaccgactgtacaacgggcacgcccttcccatgccgcgcctggtgtccaccaccctgatcgggacggagaccgtcacacccgacgagcagttcacccacatgctgatgcagtggggccagttcctggaccacgacctcgactccacggtggtggccctgagccaggcacgcttctccgacggacagcactgcagcaacgtgtgcagcaacgaccccccctgcttctctgtcatgatcccccccaatgactcccgggccaggagcggggcccgctgcatgttcttcgtgcgctccagccctgtgtgcggcagcggcatgacttcgctgctcatgaactccgtgtacccgcgggagcagatcaaccagctcacctcctacatcgacgcatccaacgtgtacgggagcacggagcatgaggcccgcagcatccgcgacctggccagccaccgcggcctgctgcggcagggcatcgtgcagcggtccgggaagccgctgctccccttcgccaccgggccgcccacggagtgcatgcgggacgagaacgagagccccatcccctgcttcctggccggggaccaccgcgccaacgagcagctgggcctgaccagcatgcacacgctgtggttccgcgagcacaaccgcattgccacggagctgctcaagctgaacccgcactgggacggcgacaccatctactatgagaccaggaagatcgtgggtgcggagatccagcacatcacctaccagcactggctcccgaagatcctgggggaggtgggcatgaggacgctgggagagtaccacggctacgaccccggcatcaatgctggcatcttcaacgccttcgccaccgcggccttcaggtttggccacacgcttgtcaacccactgctttaccggctggacgagaacttccagcccattgcacaagatcacctcccccttcacaaagctttcttctctcccttccggattgtgaatgagggcggcatcgatccgcttctcagggggctgttcggggtggcggggaaaatgcgtgtgccctcgcagctgctgaacacggagctcacggagcggctgttctccatggcacacacggtggctctggacctggcggccatcaacatccagcggggccgggaccacgggatcccaccctaccacgactacagggtctactgcaatctatcggcggcacacacgttcgaggacctgaaaaatgagattaaaaaccctgagatccgggagaaactgaaaaggttgtatggctcgacactcaacatcgacctgtttccggcgctcgtggtggaggacctggtgcctggcagccggctgggccccaccctgatgtgtcttctcagcacacagttcaagcgcctgcgagatggggacaggttgtggtatgagaaccctggggtgttctccccggcccagctgactcagatcaagcagacgtcgctggccaggatcctatgcgacaacgcggacaacatcacccgggtgcagagcgacgtgttcagggtggcggagttccctcacggctacggcagctgtgacgagatccccagggtggacctccgggtgtggcaggactgctgtgaagactgtaggaccagggggcagttcaatgccttttcctatcatttccgaggcagacggtctcttgagttcagctaccaggaggacaagccgaccaagaaaacaagaccacggaaaatacccagtgttgggagacagggggaacatctcagcaacagcacctcagccttcagcacacgctcagatgcatctgggacaaatgacttcagagagtttgttctggaaatgcagaagaccatcacagacctcagaacacagataaagaaacttgaatcacggctcagtaccacagagtgcgtggatgccgggggcgaatctcacgccaacaacaccaagtggaaaaaagatgcatgcaccatttgtgaatgcaaagacgggcaggtcacctgcttcgtggaagcttgcccccctgccacctgtgctgtccccgtgaacatcccaggggcctgctgtccagtctgcttacagaagagggcggaggaaaagccctaggctcctgggaggctcctcagagtttgtctgctgtgccatcgtgagatcgggtggccgatggcagggagctgcggactgcagaccaggaaacacccagaactcgtgacatttcatgacaacgtccagctggtgctgttacagaaggcagtgcaggaggcttccaaccagagcatctgcggagaaggaggcacagcaggtgcctgaagggaagcaggcaggagtcctagcttcacgttagacttctcaggtttttatttaattcttttaaaatgaaaaattggtgctactattaaattgcacagttgaatcatttaggcgcctaaattgattttgcctcccaacaccatttctttttaaataaagcaggatacctctatatgtcagccttgccttgttcagatgccaggagccggcagacctgtcacccgcaggtggggtgagtctcggagctgccagaggggctcaccgaaatcggggttccatcacaagctatgtttaaaaagaaaattggtgtttggcaaacggaacagaacctttgatgagagcgttcacagggacactgtctgggggtgcagtgcaagcccccggcctcttccctgggaacctctgaactcctccttcctctgggctctctgtaacatttcaccacacgtcagcatctaatcccaagacaaacattcccgctgctcgaagcagctgtatagcctgtgactctccgtgtgtcagctccttccacacctgattagaacattcataagccacatttagaaacagatttgctttcagctgtcacttgcacacatactgcctagttgtgaaccaaatgtgaaaaaacctccttcatcccattgtgtatctgatacctgccgagggccaagggtgtgtgttgacaacgccgctcccagccggccctggttgcgtccacgtcctgaacaagagccgcttccggatggctcttcccaagggaggaggagctcaagtgtcgggaactgtctaacttcaggttgtgtgagtgcgttaaaaaaaaaaaaaaaaaaaagaatccctatacctcatttgtatttttaaaatgcgtgatgttttatgaaattgtgtccattttttaggtattagatatggcagaaaaaccatttccactatgcaaagttcttttagacgtcagtgaaaatcaactctcatacctcatggtctctctttaattgaccaaaaccttccatttttctctaaatacaaagcgatctgtgttctgagcaacctttccccgaacacacagcttcagtgcagcacgctgacctgagtatccaccatgtgccaggcacagtgctgggcacacgaggcaccaaggtccgggccacctgcccgcagcaaggcccagctgaggtggtggagggagcccctgaggtcaggggccgtttcggttcagggtggcaggtgtccagcactggggtatggcgtcgaggcttccatggggtgggggaggccagcttccttctgacaggatgggcgcatacagtgcctggtgtgatttgtgcacaacccgtgttccaggtgcacatcctcccaaggagacacccagacccttccagcacgggccggccaagttgctgcggcggaggcagcatttcagctgtgaggaaggtcattggattcatgtgttttatctgtaaaaatggttgtcttaacttcttaacctcatattggtaagtgattgataaaaattggttggtgtttcatgacatgtggacttcttttgaaatagcaagtcaaatgtagtgaccaaattgtggaagagatttctgtcaaataggaaatgtgtaagttcgtctaaaagctgatggttatgtaagttgctcaggcactcagatgacagcagattctgggttctgggagtgttctgtgcctcttacatgccctggaggcctcatggtctcagtgctgaggcggcacacctgtagcacacctgcgtaatgtgcggtctgggccagtcacaaggaattgtgttgtctaagccaaagggggaagctgactgtgatttaccaaaaaaaattctgtaattcaaaccaaaatgtctgcggaatcaccagtttgatactctctgtaatcagaacagtgggcagtgcctgggtgaacgtgtctagcagccactgtgcgggatcgctgtaacaggagtggaatgtacatatttatttacttttctaactgctccaacagccaaatgccttttttatgaccattgtattcagttcattaccaaagaaatgtttgcactttgtaatgatgcctttcagttcaaataaatgggtcacattttcaaatggaaaaagtctttatt

SEQ ID NO: 458206 - DNA, 3777 bp, Homo sapiens
cgcgcacagctgggacgtgggccgcggccgggcgggcgcagtcgggagccggccgtggtggctccgtgcgtccgagcgtccgtccgcgccgtcggccatggccaagcgtcccgaagatcctgggggaggtgggcatgaggacgctgggagagtaccacggctacgaccccggcatcaatgctggcatcttcaacgccttcgccaccgcggccttcaggtttggccacacgcttgtcaacccactgctttaccggctggacgagaacttccagcccattgcacaagatcacctcccccttcacaaagctttcttctctcccttccggattgtgaatgagggcggcatcgatccgcttctcagggggctgttcggggtggcggggaaaatgcgtgtgccctcgcagctgctgaacacggagctcacggagcggctgttctccatggcacacacggtggctctggacctggcggccatcaacatccagcggggccgggaccacgggatcccaccctaccacgactacagggtctactgcaatctatcggcggcacacacgttcgaggacctgaaaaatgagattaaaaaccctgagatccgggagaaactgaaaaggttgtatggctcgacactcaacatcgacctgtttccggcgctcgtggtggaggacctggtgcctggcagccggctgggccccaccctgatgtgtcttctcagcacacagttcaagcgcctgcgagatggggacaggttgtggtatgagaaccctggggtgttctccccggcccagctgactcagatcaagcagacgtcgctggccaggatcctatgcgacaacgcggacaacatcacccgggtgcagagcgacgtgttcagggtggcggagttccctcacggctacggcagctgtgacgagatccccagggtggacctccgggtgtggcaggactgctgtgaagactgtaggaccagggggcagttcaatgccttttcctatcatttccgaggcagacggtctcttgagttcagctaccaggaggacaagccgaccaagaaaacaagaccacggaaaatacccagtgttgggagacagggggaacatctcagcaacagcacctcagccttcagcacacgctcagatgcatctgggacaaatgacttcagagagtttgttctggaaatgcagaagaccatcacagacctcagaacacagataaagaaacttgaatcacggctcagtaccacagagtgcgtggatgccgggggcgaatctcacgccaacaacaccaagtggaaaaaagatgcatgcaccatttgtgaatgcaaagacgggcaggtcacctgcttcgtggaagcttgcccccctgccacctgtgctgtccccgtgaacatcccaggggcctgctgtccagtctgcttacagaagagggcggaggaaaagccctaggctcctgggaggctcctcagagtttgtctgctgtgccatcgtgagatcgggtggccgatggcagggagctgcggactgcagaccaggaaacacccagaactcgtgacatttcatgacaacgtccagctggtgctgttacagaaggcagtgcaggaggcttccaaccagagcatctgcggagaaggaggcacagcaggtgcctgaagggaagcaggcaggagtcctagcttcacgttagacttctcaggtttttatttaattcttttaaaatgaaaaattggtgctactattaaattgcacagttgaatcatttaggcgcctaaattgattttgcctcccaacaccatttctttttaaataaagcaggatacctctatatgtcagccttgccttgttcagatgccaggagccggcagacctgtcacccgcaggtggggtgagtctcggagctgccagaggggctcaccgaaatcggggttccatcacaagctatgtttaaaaagaaaattggtgtttggcaaacggaacagaacctttgatgagagcgttcacagggacactgtctgggggtgcagtgcaagcccccggcctcttccctgggaacctctgaactcctccttcctctgggctctctgtaacatttcaccacacgtcagcatctaatcccaagacaaacattcccgctgctcgaagcagctgtatagcctgtgactctccgtgtgtcagctccttccacacctgattagaacattcataagccacatttagaaacagatttgctttcagctgtcacttgcacacatactgcctagttgtgaaccaaatgtgaaaaaacctccttcatcccattgtgtatctgatacctgccgagggccaagggtgtgtgttgacaacgccgctcccagccggccctggttgcgtccacgtcctgaacaagagccgcttccggatggctcttcccaagggaggaggagctcaagtgtcgggaactgtctaacttcaggttgtgtgagtgcgttaaaaaaaaaaaaaaaaaaaagaatccctatacctcatttgtatttttaaaatgcgtgatgttttatgaaattgtgtccattttttaggtattagatatggcagaaaaaccatttccactatgcaaagttcttttagacgtcagtgaaaatcaactctcatacctcatggtctctctttaattgaccaaaaccttccatttttctctaaatacaaagcgatctgtgttctgagcaacctttccccgaacacacagcttcagtgcagcacgctgacctgagtatccaccatgtgccaggcacagtgctgggcacacgaggcaccaaggtccgggccacctgcccgcagcaaggcccagctgaggtggtggagggagcccctgaggtcaggggccgtttcggttcagggtggcaggtgtccagcactggggtatggcgtcgaggcttccatggggtgggggaggccagcttccttctgacaggatgggcgcatacagtgcctggtgtgatttgtgcacaacccgtgttccaggtgcacatcctcccaaggagacacccagacccttccagcacgggccggccaagttgctgcggcggaggcagcatttcagctgtgaggaaggtcattggattcatgtgttttatctgtaaaaatggttgtcttaacttcttaacctcatattggtaagtgattgataaaaattggttggtgtttcatgacatgtggacttcttttgaaatagcaagtcaaatgtagtgaccaaattgtggaagagatttctgtcaaataggaaatgtgtaagttcgtctaaaagctgatggttatgtaagttgctcaggcactcagatgacagcagattctgggttctgggagtgttctgtgcctcttacatgccctggaggcctcatggtctcagtgctgaggcggcacacctgtagcacacctgcgtaatgtgcggtctgggccagtcacaaggaattgtgttgtctaagccaaagggggaagctgactgtgatttaccaaaaaaaattctgtaattcaaaccaaaatgtctgcggaatcaccagtttgatactctctgtaatcagaacagtgggcagtgcctgggtgaacgtgtctagcagccactgtgcgggatcgctgtaacaggagtggaatgtacatatttatttacttttctaactgctccaacagccaaatgccttttttatgaccattgtattcagttcattaccaaagaaatgtttgcactttgtaatgatgcctttcagttcaaataaatgggtcacattttcaaatggaaaaagtctttatt

SEQ ID NO: 458207 - DNA, 6458 bp, Homo sapiens
cgcgcacagctgggacgtgggccgcggccgggcgggcgcagtcgggagccggccgtggtggctccgtgcgtccgagcgtccgtccgcgccgtcggccatggccaagcgctccaggggccccgggcgccgctgcctgttggcgctcgtgctgttctgcgcctgggggacgctggccgtggtggcccagaagccgggcgcagggtgtccgagccgctgcctgtgcttccgcaccaccgtgcgctgcatgcatctgctgctggaggccgtgcccgccgtggcgccgcagacctccatcctagatcttcgctttaacagaatcagagagatccaacctggggcattcaggcggctgaggaacttgaacacattgcttctcaataataatcagatcaagaggatacctagtggagcatttgaagacttggaaaatttaaaatatctctatctgtacaagaatgagatccagtcaattgacaggcaagcatttaagggacttgcctctctagagcaactatacctgcactttaatcagatagaaactttggacccagattcgttccagcatctcccgaagctcgagaggctatttttgcataacaaccggattacacatttagttccagggacatttaatcacttggaatctatgaagagattgcgactggactcaaacacacttcactgcgactgtgaaatcctgtggttggcggatttgctgaaaacctacgcggagtcggggaacgcgcaggcagcggccatctgtgaatatcccagacgcatccagggacgctcagtggcaaccatcaccccggaagagctgaactgtgaaaggccccggatcacctccgagccccaggacgcagatgtgacctcggggaacaccgtgtacttcacctgcagagccgaaggcaaccccaagcctgagatcatctggctgcgaaacaataatgagctgagcatgaagacagattcccgcctaaacttgctggacgatgggaccctgatgatccagaacacacaggagacagaccagggtatctaccagtgcatggcaaagaacgtggccggagaggtgaagacgcaagaggtgaccctcaggtacttcgggtctccagctcgacccacttttgtaatccagccacagaatacagaggtgctggttggggagagcgtcacgctggagtgcagcgccacaggccaccccccgccgcggatctcctggacgagaggtgaccgcacacccttgccagttgacccgcgggtgaacatcacgccttctggcgggctttacatacagaacgtcgtacagggggacagcggagagtatgcgtgctctgcgaccaacaacattgacagcgtccatgccaccgctttcatcatcgtccaggctcttcctcagttcactgtgacgcctcaggacagagtcgttattgagggccagaccgtggatttccagtgtgaagccaagggcaacccgccgcccgtcatcgcctggaccaagggagggagccagctctccgtggaccggcggcacctggtcctgtcatcgggaacacttagaatctctggtgttgccctccacgaccagggccagtacgaatgccaggctgtcaacatcatcggctcccagaaggtcgtggcccacctgactgtgcagcccagagtcaccccagtgtttgccagcattcccagcgacacaacagtggaggtgggcgccaatgtgcagctcccgtgcagctcccagggcgagcccgagccagccatcacctggaacaaggatggggttcaggtgacagaaagtggaaaatttcacatcagccctgaaggattcttgaccatcaatgacgttggccctgcagacgcaggtcgctatgagtgtgtggcccggaacaccattgggtcggcctcggtgagcatggtgctcagtgtgaacgttcctgacgtcagtcgaaatggagatccgtttgtagctacctccatcgtggaagcgattgcgactgttgacagagctataaactcaacccgaacacatttgtttgacagccgtcctcgttctccaaatgatttgctggccttgttccggtatccgagggatccttacacagttgaacaggcacgggcgggagaaatctttgaacggacattgcagctcattcaggagcatgtacagcatggcttgatggtcgacctcaacggaacaagttaccactacaacgacctggtgtctccacagtacctgaacctcatcgcaaacctgtcgggctgtaccgcccaccggcgcgtgaacaactgctcggacatgtgcttccaccagaagtaccggacgcacgacggcacctgtaacaacctgcagcaccccatgtggggcgcctcgctgaccgccttcgagcgcctgctgaaatccgtgtacgagaatggcttcaacacccctcggggcatcaacccccaccgactgtacaacgggcacgcccttcccatgccgcgcctggtgtccaccaccctgatcgggacggagaccgtcacacccgacgagcagttcacccacatgctgatgcagtggggccagttcctggaccacgacctcgactccacggtggtggccctgagccaggcacgcttctccgacggacagcactgcagcaacgtgtgcagcaacgaccccccctgcttctctgtcatgatcccccccaatgactcccgggccaggagcggggcccgctgcatgttcttcgtgcgctccagccctgtgtgcggcagcggcatgacttcgctgctcatgaactccgtgtacccgcgggagcagatcaaccagctcacctcctacatcgacgcatccaacgtgtacgggagcacggagcatgaggcccgcagcatccgcgacctggccagccaccgcggcctgctgcggcagggcatcgtgcagcggtccgggaagccgctgctccccttcgccaccgggccgcccacggagtgcatgcgggacgagaacgagagccccatcccctgcttcctggccggggaccaccgcgccaacgagcagctgggcctgaccagcatgcacacgctgtggttccgcgagcacaaccgcattgccacggagctgctcaagctgaacccgcactgggacggcgacaccatctactatgagaccaggaagatcgtgggtgcggagatccagcacatcacctaccagcactggctcccgaagatcctgggggaggtgggcatgaggacgctgggagagtaccacggctacgaccccggcatcaatgctggcatcttcaacgccttcgccaccgcggccttcaggtttggccacacgcttgtcaacccactgctttaccggctggacgagaacttccagcccattgcacaagatcacctcccccttcacaaagctttcttctctcccttccggattgtgaatgagggcggcatcgatccgcttctcagggggctgttcggggtggcggggaaaatgcgtgtgccctcgcagctgctgaacacggagctcacggagcggctgttctccatggcacacacggtggctctggacctggcggccatcaacatccagcggggccgggaccacgggatcccaccctaccacgactacagggtctactgcaatctatcggcggcacacacgttcgaggacctgaaaaatgagattaaaaaccctgagatccgggagaaactgaaaaggttgtatggctcgacactcaacatcgacctgtttccggcgctcgtggtggaggacctggtgcctggcagccggctgggccccaccctgatgtgtcttctcagcacacagttcaagcgcctgcgagatggggacaggttgtggtatgagaaccctggggtgttctccccggcccagctgactcagatcaagcagacgtcgctggccaggatcctatgcgacaacgcggacaacatcacccgggtgcagagcgacgtgttcagggtggcggagttccctcacggctacggcagctgtgacgagatccccagggtggacctccgggtgtggcaggactgctgtgaagactgtaggaccagggggcagttcaatgccttttcctatcatttccgaggcagacggtctcttgagttcagctaccaggaggacaagccgaccaagaaaacaagaccacggaaaatacccagtgttgggagacagggggaacatctcagcaacagcacctcagccttcagcacacgctcagatgcatctgggacaaatgacttcagagagtttgttctggaaatgcagaagaccatcacagacctcagaacacagataaagaaacttgaatcacggctcagtaccacagagtgcgtggatgccgggggcgaatctcacgccaacaacaccaagtggaaaaaagatgcatgcaccatttgtgaatgcaaagacgggcaggtcacctgcttcgtggaagcttgcccccctgccacctgtgctgtccccgtgaacatcccaggggcctgctgtccagtctgcttacagaagagggcggaggaaaagccctaggctcctgggaggctcctcagagtttgtctgctgtgccatcgtgagatcgggtggccgatggcagggagctgcggactgcagaccaggaaacacccagaactcgtgacatttcatgacaacgtccagctggtgctgttacagaaggcagtgcaggaggcttccaaccagagcatctgcggagaaggaggcacagcaggtgcctgaagggaagcaggcaggagtcctagcttcacgttagacttctcaggtttttatttaattcttttaaaatgaaaaattggtgctactattaaattgcacagttgaatcatttaggcgcctaaattgattttgcctcccaacaccatttctttttaaataaagcaggatacctctatatgtcagccttgccttgttcagatgccaggagccggcagacctgtcacccgcaggtggggtgagtctcggagctgccagaggggctcaccgaaatcggggttccatcacaagctatgtttaaaaagaaaattggtgtttggcaaacggaacagaacctttgatgagagcgttcacagggacactgtctgggggtgcagtgcaagcccccggcctcttccctgggaacctctgaactcctccttcctctgggctctctgtaacatttcaccacacgtcagcatctaatcccaagacaaacattcccgctgctcgaagcagctgtatagcctgtgactctccgtgtgtcagctccttccacacctgattagaacattcataagccacatttagaaacagatttgctttcagctgtcacttgcacacatactgcctagttgtgaaccaaatgtgaaaaaacctccttcatcccattgtgtatctgatacctgccgagggccaagggtgtgtgttgacaacgccgctcccagccggccctggttgcgtccacgtcctgaacaagagccgcttccggatggctcttcccaagggaggaggagctcaagtgtcgggaactgtctaacttcaggttgtgtgagtgcgttaaaaaaaaaaaaaaaaaaaagaatccctatacctcatttgtatttttaaaatgcgtgatgttttatgaaattgtgtccattttttaggtattagatatggcagaaaaaccatttccactatgcaaagttcttttagacgtcagtgaaaatcaactctcatacctcatggtctctctttaattgaccaaaaccttccatttttctctaaatacaaagcgatctgtgttctgagcaacctttccccgaacacacagcttcagtgcagcacgctgacctgagtatccaccatgtgccaggcacagtgctgggcacacgaggcaccaaggtccgggccacctgcccgcagcaaggcccagctgaggtggtggagggagcccctgaggtcaggggccgtttcggttcagggtggcaggtgtccagcactggggtatggcgtcgaggcttccatggggtgggggaggccagcttccttctgacaggatgggcgcatacagtgcctggtgtgatttgtgcacacacctgtagcacacctgcgtaatgtgcggtctgggccagtcacaaggaattgtgttgtctaagccaaagggggaagctgactgtgatttaccaaaaaaaattctgtaattcaaaccaaaatgtctgcggaatcaccagtttgatactctctgtaatcagaacagtgggcagtgcctgggtgaacgtgtctagcagccactgtgcgggatcgctgtaacaggagtggaatgtacatatttatttacttttctaactgctccaacagccaaatgccttttttatgaccattgtattcagttcattaccaaagaaatgtttgcactttgtaatgatgcctttcagttcaaataaatgggtcacattttcaaatggaaaaagtctttatt

SEQ ID NO: 458208 - DNA, 6630 bp, Homo sapiens
cgcgcacagctgggacgtgggccgcggccgggcgggcgcagtcgggagccggccgtggtggctccgtgcgtccgagcgtccgtccgcgccgtcggccatggccaagcgctccaggggccccgggcgccgctgcctgttggcgctcgtgctgttctgcgcctgggggacgctggccgtggtggcccagaagccgggcgcagggtgtccgagccgctgcctgtgcttccgcaccaccgtgcgctgcatgcatctgctgctggaggccgtgcccgccgtggcgccgcagacctccatcctagatcttcgctttaacagaatcagagagatccaacctggggcattcaggcggctgaggaacttgaacacattgcttctcaataataatcagatcaagaggatacctagtggagcatttgaagacttggaaaatttaaaatatctctatctgtacaagaatgagatccagtcaattgacaggcaagcatttaagggacttgcctctctagagcaactatacctgcactttaatcagatagaaactttggacccagattcgttccagcatctcccgaagctcgagaggctatttttgcataacaaccggattacacatttagttccagggacatttaatcacttggaatctatgaagagattgcgactggactcaaacacacttcactgcgactgtgaaatcctgtggttggcggatttgctgaaaacctacgcggagtcggggaacgcgcaggcagcggccatctgtgaatatcccagacgcatccagggacgctcagtggcaaccatcaccccggaagagctgaactgtgaaaggccccggatcacctccgagccccaggacgcagatgtgacctcggggaacaccgtgtacttcacctgcagagccgaaggcaaccccaagcctgagatcatctggctgcgaaacaataatgagctgagcatgaagacagattcccgcctaaacttgctggacgatgggaccctgatgatccagaacacacaggagacagaccagggtatctaccagtgcatggcaaagaacgtggccggagaggtgaagacgcaagaggtgaccctcaggtacttcgggtctccagctcgacccacttttgtaatccagccacagaatacagaggtgctggttggggagagcgtcacgctggagtgcagcgccacaggccaccccccgccgcggatctcctggacgagaggtgaccgcacacccttgccagttgacccgcgggtgaacatcacgccttctggcgggctttacatacagaacgtcgtacagggggacagcggagagtatgcgtgctctgcgaccaacaacattgacagcgtccatgccaccgctttcatcatcgtccaggctcttcctcagttcactgtgacgcctcaggacagagtcgttattgagggccagaccgtggatttccagtgtgaagccaagggcaacccgccgcccgtcatcgcctggaccaagggagggagccagctctccgtggaccggcggcacctggtcctgtcatcgggaacacttagaatctctggtgttgccctccacgaccagggccagtacgaatgccaggctgtcaacatcatcggctcccagaaggtcgtggcccacctgactgtgcagcccagagtcaccccagtgtttgccagcattcccagcgacacaacagtggaggtgggcgccaatgtgcagctcccgtgcagctcccagggcgagcccgagccagccatcacctggaacaaggatggggttcaggtgacagaaagtggaaaatttcacatcagccctgaaggattcttgaccatcaatgacgttggccctgcagacgcaggtcgctatgagtgtgtggcccggaacaccattgggtcggcctcggtgagcatggtgctcagtgtgaacgttcctgacgtcagtcgaaatggagatccgtttgtagctacctccatcgtggaagcgattgcgactgttgacagagctataaactcaacccgaacacatttgtttgacagccgtcctcgttctccaaatgatttgctggccttgttccggtatccgagggatccttacacagttgaacaggcacgggcgggagaaatctttgaacggacattgcagctcattcaggagcatgtacagcatggcttgatggtcgacctcaacggaacaagttaccactacaacgacctggtgtctccacagtacctgaacctcatcgcaaacctgtcgggctgtaccgcccaccggcgcgtgaacaactgctcggacatgtgcttccaccagaagtaccggacgcacgacggcacctgtaacaacctgcagcaccccatgtggggcgcctcgctgaccgccttcgagcgcctgctgaaatccgtgtacgagaatggcttcaacacccctcggggcatcaacccccaccgactgtacaacgggcacgcccttcccatgccgcgcctggtgtccaccaccctgatcgggacggagaccgtcacacccgacgagcagttcacccacatgctgatgcagtggggccagttcctggaccacgacctcgactccacggtggtggccctgagccaggcacgcttctccgacggacagcactgcagcaacgtgtgcagcaacgaccccccctgcttctctgtcatgatcccccccaatgactcccgggccaggagcggggcccgctgcatgttcttcgtgcgctccagccctgtgtgcggcagcggcatgacttcgctgctcatgaactccgtgtacccgcgggagcagatcaaccagctcacctcctacatcgacgcatccaacgtgtacgggagcacggagcatgaggcccgcagcatccgcgacctggccagccaccgcggcctgctgcggcagggcatcgtgcagcggtccgggaagccgctgctccccttcgccaccgggccgcccacggagtgcatgcgggacgagaacgagagccccatcccctgcttcctggccggggaccaccgcgccaacgagcagctgggcctgaccagcatgcacacgctgtggttccgcgagcacaaccgcattgccacggagctgctcaagctgaacccgcactgggacggcgacaccatctactatgagaccaggaagatcgtgggtgcggagatccagcacatcacctaccagcactggctcccgaagatcctgggggaggtgggcatgaggacgctgggagagtaccacggctacgaccccggcatcaatgctggcatcttcaacgccttcgccaccgcggccttcaggtttggccacacgcttgtcaacccactgctttaccggctggacgagaacttccagcccattgcacaagatcacctcccccttcacaaagctttcttctctcccttccggattgtgaatgagggcggcatcgatccgcttctcagggggctgttcggggtggcggggaaaatgcgtgtgccctcgcagctgctgaacacggagctcacggagcggctgttctccatggcacacacggtggctctggacctggcggccatcaacatccagcggggccgggaccacgggatcccaccctaccacgactacagggtctactgcaatctatcggcggcacacacgttcgaggacctgaaaaatgagattaaaaaccctgagatccgggagaaactgaaaaggttgtatggctcgacactcaacatcgacctgtttccggcgctcgtggtggaggacctggtgcctggcagccggctgggccccaccctgatgtgtcttctcagcacacagttcaagcgcctgcgagatggggacaggttgtggtatgagaaccctggggtgttctccccggcccagctgactcagatcaagcagacgtcgctggccaggatcctatgcgacaacgcggacaacatcacccgggtgcagagcgacgtgttcagggtggcggagttccctcacggctacggcagctgtgacgagatccccagggtggacctccgggtgtggcaggactgctgtgaagactgtaggaccagggggcagttcaatgccttttcctatcatttccgaggcagacggtctcttgagttcagctaccaggaggacaagccgaccaagaaaacaagaccacggaaaatacccagtgttgggagacagggggaacatctcagcaacagcacctcagccttcagcacacgctcagatgcatctgggacaaatgacttcagagagtttgttctggaaatgcagaagaccatcacagacctcagaacacagataaagaaacttgaatcacggctcagtaccacagagtgcgtggatgccgggggcgaatctcacgccaacaacaccaagtggaaaaaagatgcatgcaccatttgtgaatgcaaagacgggcaggtcacctgcttcgtggaagcttgcccccctgccacctgtgctgtccccgtgaacatcccaggggcctgctgtccagtctgcttacagaagagggcggaggaaaagccctaggctcctgggaggctcctcagagtttgtctgctgtgccatcgtgagatcgggtggccgatggcagggagctgcggactgcagaccaggaaacacccagaactcgtgacatttcatgacaacgtccagctggtgctgttacagaaggcagtgcaggaggcttccaaccagagcatctgcggagaaggaggcacagcaggtgcctgaagggaagcaggcaggagtcctagcttcacgttagacttctcaggtttttatttaattcttttaaaatgaaaaattggtgctactattaaattgcacagttgaatcatttaggcgcctaaattgattttgcctcccaacaccatttctttttaaataaagcaggatacctctatatgtcagccttgccttgttcagatgccaggagccggcagacctgtcacccgcaggtggggtgagtctcggagctgccagaggggctcaccgaaatcggggttccatcacaagctatgtttaaaaagaaaattggtgtttggcaaacggaacagaacctttgatgagagcgttcacagggacactgtctgggggtgcagtgcaagcccccggcctcttccctgggaacctctgaactcctccttcctctgggctctctgtaacatttcaccacacgtcagcatctaatcccaagacaaacattcccgctgctcgaagcagctgtatagcctgtgactctccgtgtgtcagctccttccacacctgattagaacattcataagccacatttagaaacagatttgctttcagctgtcacttgcacacatactgcctagttgtgaaccaaatgtgaaaaaacctccttcatcccattgtgtatctgatacctgccgagggccaagggtgtgtgttgacaacgccgctcccagccggccctggttgcgtccacgtcctgaacaagagccgcttccggatggctcttcccaagggaggaggagctcaagtgtcgggaactgtctaacttcaggttgtgtgagtgcgttaaaaaaaaaaaaaaaaaaaagaatccctatacctcatttgtatttttaaaatgcgtgatgttttatgaaattgtgtccattttttaggtattagatatggcagaaaaaccatttccactatgcaaagttcttttagacgtcagtgaaaatcaactctcatacctcatggtctctctttaattgaccaaaaccttccatttttctctaaatacaaagcgatctgtgttctgagcaacctttccccgaacacacagcttcagtgcagcacgctgacctgagtatccaccatgtgccaggcacagtgctgggcacacgaggcaccaaggtccgggccacctgcccgcagcaaggcccagctgaggtggtggagggagcccctgaggtcaggggccgtttcggttcagggtggcaggtgtccagcactggggtatggcgtcgaggcttccatggggtgggggaggccagcttccttctgacaggatgggcgcatacagtgcctggtgtgatttgtgcacaacccgtgttccaggtgcacatcctcccaaggagacacccagacccttccagcacgggccggccaagttgctgcggcggaggcagcatttcagctgtgaggaaggtcattggattcatgtgttttatctgtaaaaatggttgtcttaacttcttaacctcatattggtaagtgattgataaaaattggttggtgtttcatgacatgtggacttcttttgaaatagcaagtcaaatgtagtgaccaaattgtggaagagatttaccaaaaaaaattctgtaattcaaaccaaaatgtctgcggaatcaccagtttgatactctctgtaatcagaacagtgggcagtgcctgggtgaacgtgtctagcagccactgtgcgggatcgctgtaacaggagtggaatgtacatatttatttacttttctaactgctccaacagccaaatgccttttttatgaccattgtattcagttcattaccaaagaaatgtttgcactttgtaatgatgcctttcagttcaaataaatgggtcacattttcaaatggaaaaagtctttatt

SEQ ID NO: 458209 - DNA, 1923 bp, Homo sapiens
  misc_feature (22)..(23): n is a, c, g, or t
gcggccgcccctggggggtggnnattaacgcactcacacaacctgaagttagacagttcccgacacttgagctcctcctcccttgggaagagccatccggaagcggctcttgttcaggacgtggacgcaaccagggccggctgggagcggcgttgtcaacacacacccttggcccccggcctcttccctgggaacctctgaactcctccttcctctgggctctctgtaacatttcaccacacgtcagcatctaatcccaagacaaacattcccgctgctcgaagcagctgtatagcctgtgactctccgtgtgtcagctccttccacacctgattagaacattcataagccacatttagaaacagatttgctttcagctgtcacttgcacacatactgcctagttgtgaaccaaatgtgaaaaaacctccttcatcccattgtgtatctgatacctgccgagggccaagggtgtgtgttgacaacgccgctcccagccggccctggttgcgtccacgtcctgaacaagagccgcttccggatggctcttcccaagggaggaggagctcaagtgtcgggaactgtctaacttcaggttgtgtgagtgcgttaaaaaaaaaaaaaaaaaaaagaatccctatacctcatttgtatttttaaaatgcgtgatgttttatgaaattgtgtccattttttaggtattagatatggcagaaaaaccatttccactatgcaaagttcttttagacgtcagtgaaaatcaactctcatacctcatggtctctctttaattgaccaaaaccttccatttttctctaaatacaaagcgatctgtgttctgagcaacctttccccgaacacacagcttcagtgcagcacgctgacctgagtatccaccatgtgccaggcacagtgctgggcacacgaggcaccaaggtccgggccacctgcccgcagcaaggcccagctgaggtggtggagggagcccctgaggtcaggggccgtttcggttcagggtggcaggtgtccagcactggggtatggcgtcgaggcttccatggggtgggggaggccagcttccttctgacaggatgggcgcatacagtgcctggtgtgatttgtgcacaacccgtgttccaggtgcacatcctcccaaggagacacccagacccttccagcacgggccggccaagttgctgcggcggaggcagcatttcagctgtgaggaaggtcattggattcatgtgttttatctgtaaaaatggttgtcttaacttcttaacctcatattggtaagtgattgataaaaattggttggtgtttcatgacatgtggacttcttttgaaatagcaagtcaaatgtagtgaccaaattgtggaagagatttctgtcaaataggaaatgtgtaagttcgtctaaaagctgatggttatgtaagttgctcaggcactcagatgacagcagattctgggttctgggagtgttctgtgcctcttacatgccctggaggcctcatggtctcagtgctgaggcggcacacctgtagcacacctgcgtaatgtgcggtctgggccagtcacaaggaattgtgttgtctaagccaaagggggaagctgactgtgatttaccaaaaaaaattctgtaattcaaaccaaaatgtctgcggaatcaccagtttgatactctctgtaatcagaacagtgggcagtgcctgggtgaacgtgtctagcagccactgtgcgggatcgctgtaacaggagtggaatgtacatatttatttacttttctaactgctccaacagccaaatgccttttttatgaccattgtattcagttcattaccaaagaaatgtttgcactttgtaatgatgcctttcagttcaaataaatgggtcacattttcaaatggaaaaagtctttatt

SEQ ID NO: 458210 - DNA, 5385 bp, Homo sapiens
cgcgcacagctgggacgtgggccgcggccgggcgggcgcagtcgggagccggccgtggtggctccgtgcgtccgagcgtccgtccgcgccgtcggccatggccaagcgctccaggggccccgggcgccgctgcctgttggcgctcgtgctgttctgcgcctgggggacgctggccgtggtggcccagaagccgggcgcagggtgtccgagccgctgcctgtgcttccgcaccaccgtgcgctgcatgcatctgctgctggaggccgtgcccgccgtggcgccgcagacctccatcctagatcttcgctttaacagaatcagagagatccaacctggggcattcaggcggctgaggaacttgaacacattgcttctcaataataatcagatcaagaggatacctagtggagcatttgaagacttggaaaatttaaaatatctctatctgtacaagaatgagatccagtcaattgacaggcaagcatttaagggacttgcctctctagagcaactatacctgcactttaatcagatagaaactttggacccagattcgttccagcatctcccgaagctcgagaggctatttttgcataacaaccggattacacatttagttccagggacatttaatcacttggaatctatgaagagattgcgactggactcaaacacacttcactgcgactgtgaaatcctgtggttggcggatttgctgaaaacctacgcggagtcggggaacgcgcaggcagcggccatctgtgaatatcccagacgcatccagggacgctcagtggcaaccatcaccccggaagagctgaactgtgaaaggccccggatcacctccgagccccaggacgcagatgtgacctcggggaacaccgtgtacttcacctgcagagccgaaggcaaccccaagcctgagatcatctggctgcgaaacaataatgagctgagcatgaagacagattcccgcctaaacttgctggacgatgggaccctgatgatccagaacacacaggagacagaccagggtatctaccagtgcatggcaaagaacgtggccggagaggtgaagacgcaagaggtgaccctcaggtacttcgggtctccagctcgacccacttttgtaatccagccacagaatacagaggtgctggttggggagagcgtcacgctggagtgcagcgccacaggccaccccccgccgcggatctcctggacgagaggtgaccgcacacccttgccagttgacccgcgggtgaacatcacgccttctggcgggctttacatacagaacgtcgtacagggggacagcggagagtatgcgtgctctgcgaccaacaacattgacagcgtccatgccaccgctttcatcatcgtccaggctcttcctcagttcactgtgacgcctcaggacagagtcgttattgagggccagaccgtggatttccagtgtgaagccaagggcaacccgccgcccgtcatcgcctggaccaagggagggagccagctctccgtggaccggcggcacctggtcctgtcatcgggaacacttagaatctctggtgttgccctccacgaccagggccagtacgaatgccaggctgtcaacatcatcggctcccagaaggtcgtggcccacctgactgtgcagcccagagtcaccccagtgtttgccagcattcccagcgacacaacagtggaggtgggcgccaatgtgcagctcccgtgcagctcccagggcgagcccgagccagccatcacctggaacaaggatggggttcaggtgacagaaagtggaaaatttcacatcagccctgaaggattcttgaccatcaatgacgttggccctgcagacgcaggtcgctatgagtgtgtggcccggaacaccattgggtcggcctcggtgagcatggtgctcagtgtgaacgttcctgacgtcagtcgaaatggagatccgtttgtagctacctccatcgtggaagcgattgcgactgttgacagagctataaactcaacccgaacacatttgtttgacagccgtcctcgttctccaaatgatttgctggccttgttccggtatccgagggatccttacacagttgaacaggcacgggcgggagaaatctttgaacggacattgcagctcattcaggagcatgtacagcatggcttgatggtcgacctcaacggaacaagttaccactacaacgacctggtgtctccacagtacctgaacctcatcgcaaacctgtcgggctgtaccgcccaccggcgcgtgaacaactgctcggacatgtgcttccaccagaagtaccggacgcacgacggcacctgtaacaacctgcagcaccccatgtggggcgcctcgctgaccgccttcgagcgcctgctgaaatccgtgtacgagaatggcttcaacacccctcggggcatcaacccccaccgactgtacaacgggcacgcccttcccatgccgcgcctggtgtccaccaccctgatcgggacggagaccgtcacacccgacgagcagttcacccacatgctgatgcagtggggccagttcctggaccacgacctcgactccacggtggtggccctgagccaggcacgcttctccgacggacagcactgcagcaacgtgtgcagcaacgaccccccctgcttctctgtcatgatcccccccaatgactcccgggccaggagcggggcccgctgcatgttcttcgtgcgctccagccctgtgtgcggcagcggcatgacttcgctgctcatgaactccgtgtacccgcgggagcagatcaaccagctcacctcctacatcgacgcatccaacgtgtacgggagcacggagcatgaggcccgcagcatccgcgacctggccagccaccgcggcctgctgcggcagggcatcgtgcagcggtccgggaagccgctgctccccttcgccaccgggccgcccacggagtgcatgcgggacgagaacgagagccccatcccctgcttcctggccggggaccaccgcgccaacgagcagctgggcctgaccagcatgcacacgctgtggttccgcgagcacaaccgcattgccacggagctgctcaagctgaacccgcactgggacggcgacaccatctactatgagaccaggaagatcgtgggtgcggagatccagcacatcacctaccagcactggctcccgaagatcctgggggaggtgggcatgaggacgctgggagagtaccacggctacgaccccggcatcaatgctggcatcttcaacgccttcgccaccgcggccttcaggtttggccacacgcttgtcaacccactgctttaccggctggacgagaacttccagcccattgcacaagatcacctcccccttcacaaagctttcttctctcccttccggattgtgaatgagggcggcatcgatccgcttctcagggggctgttcggggtggcggggaaaatgcgtgtgccctcgcagctgctgaacacggagctcacggagcggctgttctccatggcacacacggtggctctggacctggcggccatcaacatccagcggggccgggaccacgggatcccaccctaccacgactacagggtctactgcaatctatcggcggcacacacgttcgaggacctgaaaaatgagattaaaaaccctgagatccgggagaaactgaaaaggttgtatggctcgacactcaacatcgacctgtttccggcgctcgtggtggaggacctggtgcctggcagccggctgggccccaccctgatgtgtcttctcagcacacagttcaagcgcctgcgagatggggacaggttgtggtatgagaaccctggggtgttctccccggcccagctgactcagatcaagcagacgtcgctggccaggatcctatgcgacaacgcggacaacatcacccgggtgcagagcgacgtgttcagggtggcggagttccctcacggctacggcagctgtgacgagatccccagggtggacctccgggtgtggcaggactgctgtgaagactgtaggaccagggggcagttcaatgccttttcctatcatttccgaggcagacggtctcttgagttcagctaccaggaggacaagccgaccaagaaaacaagaccacggaaaatacccagtgttgggagacagggggaacatctcagcaacagcacctcagccttcagcacacgctcagatgcatctgggacaaatgacttcagagagtttgttctggaaatgcagaagaccatcacagacctcagaacacagataaagaaacttgaatcacggctcagtaccacagagtgcgtggatgccgggggcgaatctcacgccaacaacaccaagtggaaaaaagatgcatgcaccatttgtgaatgcaaagacgggcaggtcacctgcttcgtggaagcttgcccccctgccacctgtgctgtccccgtgaacatcccaggggcctgctgtccagtctgcttacagaagagggcggaggaaaagccctaggctcctgggaggctcctcagagtttgtctgctgtgccatcgtgagatcgggtggccgatggcagggagctgcggactgcagaccaggaaacacccagaactcgtgacatttcatgacaacgtccagctggtgctgttacagaaggcagtgcaggaggcttccaaccagagcatctgcggagaaggaggcacagcaggtgcctgaagggaagcaggcaggagtcctagcttcacgttagacttctcaggtttttatttaattcttttaaaatgaaaaattggtgctactattaaattgcacagttgaatcatttaggcgcctaaattgattttgcctcccaacaccatttctttttaaataaagcaggatacctctatatgtcagccttgccttgttcagatgccaggagccggcagacctgtcacccgcaggtggggtgagtctcggagctgccagaggggctcaccgaaatcggggttccatcacaagctatgtttaaaaagaaaattggtgtttggcaaacggaacagaacctttgatgagagcgttcacagggacactgtctgggggtgcagtgcaagcccccggcctcttccctgggaacctctgaactcctccttcctctgggctctctgtaacatttcaccacacgtcagcatctaatcccaagacaaacattcccgctgctcgaagcagctgtatagcctgtgactctccgtgtgtcagctccttccacacctgattagaacattcataagccacatttagaaacagatttgctttcagctgtcacttgcacacatactgcctagttgtgaaccatcaaacatgcgggatcctctaggagt

SEQ ID NO: 458211 - DNA, 4951 bp, Homo sapiens
cgcgcacagctgggacgtgggccgcggccgggcgggcgcagtcgggagccggccgtggtggctccgtgcgtccgagcgtccgtccgcgccgtcggccatggccaagcgctccaggggccccgggcgccgctgcctgttggcgctcgtgctgttctgcgcctgggggacgctggccgtggtggcccagaagccgggcgcagggtgtccgagccgctgcctgtgcttccgcaccaccgtgcgctgcatgcatctgctgctggaggccgtgcccgccgtggcgccgcagacctccatcctagatcttcgctttaacagaatcagagagatccaacctggggcattcaggcggctgaggaacttgaacacattgcttctcaataataatcagatcaagaggatacctagtggagcatttgaagacttggaaaatttaaaatatctctatctgtacaagaatgagatccagtcaattgacaggcaagcatttaagggacttgcctctctagagcaactatacctgcactttaatcagatagaaactttggacccagattcgttccagcatctcccgaagctcgagaggctatttttgcataacaaccggattacacatttagttccagggacatttaatcacttggaatctatgaagagattgcgactggactcaaacacacttcactgcgactgtgaaatcctgtggttggcggatttgctgaaaacctacgcggagtcggggaacgcgcaggcagcggccatctgtgaatatcccagacgcatccagggacgctcagtggcaaccatcaccccggaagagctgaactgtgaaaggccccggatcacctccgagccccaggacgcagatgtgacctcggggaacaccgtgtacttcacctgcagagccgaaggcaaccccaagcctgagatcatctggctgcgaaacaataatgagctgagcatgaagacagattcccgcctaaacttgctggacgatgggaccctgatgatccagaacacacaggagacagaccagggtatctaccagtgcatggcaaagaacgtggccggagaggtgaagacgcaagaggtgaccctcaggtacttcgggtctccagctcgacccacttttgtaatccagccacagaatacagaggtgctggttggggagagcgtcacgctggagtgcagcgccacaggccaccccccgccgcggatctcctggacgagaggtgaccgcacacccttgccagttgacccgcgggtgaacatcacgccttctggcgggctttacatacagaacgtcgtacagggggacagcggagagtatgcgtgctctgcgaccaacaacattgacagcgtccatgccaccgctttcatcatcgtccaggctcttcctcagttcactgtgacgcctcaggacagagtcgttattgagggccagaccgtggatttccagtgtgaagccaagggcaacccgccgcccgtcatcgcctggaccaagggagggagccagctctccgtggaccggcggcacctggtcctgtcatcgggaacacttagaatctctggtgttgccctccacgaccagggccagtacgaatgccaggctgtcaacatcatcggctcccagaaggtcgtggcccacctgactgtgcagcccagagtcaccccagtgtttgccagcattcccagcgacacaacagtggaggtgggcgccaatgtgcagctcccgtgcagctcccagggcgagcccgagccagccatcacctggaacaaggatggggttcaggtgacagaaagtggaaaatttcacatcagccctgaaggattcttgaccatcaatgacgttggccctgcagacgcaggtcgctatgagtgtgtggcccggaacaccattgggtcggcctcggtgagcatggtgctcagtgtgaacgttcctgacgtcagtcgaaatggagatccgtttgtagctacctccatcgtggaagcgattgcgactgttgacagagctataaactcaacccgaacacatttgtttgacagccgtcctcgttctccaaatgatttgctggccttgttccggtatccgagggatccttacacagttgaacaggcacgggcgggagaaatctttgaacggacattgcagctcattcaggagcatgtacagcatggcttgatggtcgacctcaacggaacaagttaccactacaacgacctggtgtctccacagtacctgaacctcatcgcaaacctgtcgggctgtaccgcccaccggcgcgtgaacaactgctcggacatgtgcttccaccagaagtaccggacgcacgacggcacctgtaacaacctgcagcaccccatgtggggcgcctcgctgaccgccttcgagcgcctgctgaaatccgtgtacgagaatggcttcaacacccctcggggcatcaacccccaccgactgtacaacgggcacgcccttcccatgccgcgcctggtgtccaccaccctgatcgggacggagaccgtcacacccgacgagcagttcacccacatgctgatgcagtggggccagttcctggaccacgacctcgactccacggtggtggccctgagccaggcacgcttctccgacggacagcactgcagcaacgtgtgcagcaacgaccccccctgcttctctgtcatgatcccccccaatgactcccgggccaggagcggggcccgctgcatgttcttcgtgcgctccagccctgtgtgcggcagcggcatgacttcgctgctcatgaactccgtgtacccgcgggagcagatcaaccagctcacctcctacatcgacgcatccaacgtgtacgggagcacggagcatgaggcccgcagcatccgcgacctggccagccaccgcggcctgctgcggcagggcatcgtgcagcggtccgggaagccgctgctccccttcgccaccgggccgcccacggagtgcatgcgggacgagaacgagagccccatcccctgcttcctggccggggaccaccgcgccaacgagcagctgggcctgaccagcatgcacacgctgtggttccgcgagcacaaccgcattgccacggagctgctcaagctgaacccgcactgggacggcgacaccatctactatgagaccaggaagatcgtgggtgcggagatccagcacatcacctaccagcactggctcccgaagatcctgggggaggtgggcatgaggacgctgggagagtaccacggctacgaccccggcatcaatgctggcatcttcaacgccttcgccaccgcggccttcaggtttggccacacgcttgtcaacccactgctttaccggctggacgagaacttccagcccattgcacaagatcacctcccccttcacaaagctttcttctctcccttccggattgtgaatgagggcggcatcgatccgcttctcagggggctgttcggggtggcggggaaaatgcgtgtgccctcgcagctgctgaacacggagctcacggagcggctgttctccatggcacacacggtggctctggacctggcggccatcaacatccagcggggccgggaccacgggatcccaccctaccacgactacagggtctactgcaatctatcggcggcacacacgttcgaggacctgaaaaatgagattaaaaaccctgagatccgggagaaactgaaaaggttgtatggctcgacactcaacatcgacctgtttccggcgctcgtggtggaggacctggtgcctggcagccggctgggccccaccctgatgtgtcttctcagcacacagttcaagcgcctgcgagatggggacaggttgtggtatgagaaccctggggtgttctccccggcccagctgactcagatcaagcagacgtcgctggccaggatcctatgcgacaacgcggacaacatcacccgggtgcagagcgacgtgttcagggtggcggagttccctcacggctacggcagctgtgacgagatccccagggtggacctccgggtgtggcaggactgctgtgaagactgtaggaccagggggcagttcaatgccttttcctatcatttccgaggcagacggtctcttgagttcagctaccaggaggacaagccgaccaagaaaacaagaccacggaaaatacccagtgttgggagacagggggaacatctcagcaacagcacctcagccttcagcacacgctcagatgcatctgggacaaatgacttcagagagtttgttctggaaatgcagaagaccatcacagacctcagaacacagataaagaaacttgaatcacggctcagtaccacagagtgcgtggatgccgggggcgaatctcacgccaacaacaccaagtggaaaaaagatgcatgcaccatttgtgaatgcaaagacgggcaggtcacctgcttcgtggaagcttgcccccctgccacctgtgctgtccccgtgaacatcccaggggcctgctgtccagtctgcttacagaagagggcggaggaaaagccctaggctcctgggaggctcctcagagtttgtacacctgtagcacacctgcgtaatgtgcggtctgggccagtcacaaggaattgtgttgtctaagccaaagggggaagctgactgtgatttaccaaaaaaaattctgtaattcaaaccaaaatgtctgcggaatcaccagtttgatactctctgtaatcagaacagtgggcagtgcctgggtgaacgtgtctagcagccactgtgcgggatcgctgtaacaggagtggaatgtacatatttatttacttttctaactgctccaacagccaaatgccttttttatgaccattgtattcagttcattaccaaagaaatgtttgcactttgtaatgatgcctttcagttcaaataaatgggtcacattttcaaatggaaaaagtctttatt

SEQ ID NO: 458212 - DNA, 745 bp, Homo sapiens
tcacatccaggttacgctgatgcaagaggtgggttcccttggtcttcagcagctccacccctgtcactttgcagggtacagcttccctcctgactacttccatgggctggcattgaatgtctgtggcttttccagtccttactgagcatccgtggctcccttttctctccaagacgcaacagtagggcgagccttttcagcttcagaggtcgagcaaaggacattggctctgagaatgactttgctgatgatgagcacagcacctttgaggacaatgacagccgaagagactctctgttcgtgccgcacagacatggagaacggcgccacagcaatgtcagccaggccagccgtgcctccagggtgctccccatcctgcccatgaatgggaagatgcatagcgctgtggactgcaatggtgtggtctccctggtcgggggcccttctaccctcacatctgctgggcagctcctaccagaggtgaggccaattaaaattgcagctgatgtgaagagagttgtgactggtgcaggcaggagtgtttttccatttccacatctaagaatttgttgagtttgttgcccaaaggctgggagtttgttcaatcaagctgttaactgtcttgtgaaactgttctattcagacttttctacaaagtaattaaaaacctaggttggctgtcagagaatataattagaagtaatctttcatcattattactatggtatgaaactcgccaaaaagc

SEQ ID NO: 458213 - DNA, 6583 bp, Homo sapiens
agcggagaacagaaagctaaggcaaaggagggaggatgctgtggtcatcctttcttgtttttttcttctttaatgaggatagagcacatgtgagattttactttctactccagtaaaaattctgaagaattgcattggagactgttatattcaacacatacgtggattctgtgttatgatttacatttttctttatttcagcactttcttatgcaaggagctaaacagtgattaaaggagcaggatgaaaagatggcacagtcagtgctggtaccgccaggacctgacagcttccgcttctttaccagggaatcccttgctgctattgaacaacgcattgcagaagagaaagctaagagacccaaacaggaacgcaaggatgaggatgatgaaaatggcccaaagccaaacagtgacttggaagcaggaaaatctcttccatttatttatggagacattcctccagagatggtgtcagtgcccctggaggatctggacccctactatatcaataagaaaacgtttatagtattgaataaagggaaagcaatctctcgattcagtgccacccctgccctttacattttaactcccttcaaccctattagaaaattagctattaagattttggtacattctttattcaatatgctcattatgtgcacgattcttaccaactgtgtatttatgaccatgagtaaccctccagactggacaaagaatgtggagtatacctttacaggaatttatacttttgaatcacttattaaaatacttgcaaggggcttttgtttagaagatttcacatttttacgggatccatggaattggttggatttcacagtcattacttttgcatatgtgacagagtttgtggacctgggcaatgtctcagcgttgagaacattcagagttctccgagcattgaaaacaatttcagtcattccaggcctgaagaccattgtgggggccctgatccagtcagtgaagaagctttctgatgtcatgatcttgactgtgttctgtctaagcgtgtttgcgctaataggattgcagttgttcatgggcaacctacgaaataaatgtttgcaatggcctccagataattcttcctttgaaataaatatcacttccttctttaacaattcattggatgggaatggtactactttcaataggacagtgagcatatttaactgggatgaatatattgaggataaaagtcacttttattttttagaggggcaaaatgatgctctgctttgtggcaacagctcagatgcaggccagtgtcctgaaggatacatctgtgtgaaggctggtagaaaccccaactatggctacacgagctttgacacctttagttgggcctttttgtccttatttcgtctcatgactcaagacttctgggaaaacctttatcaactgacactacgtgctgctgggaaaacgtacatgatattttttgtgctggtcattttcttgggctcattctatctaataaatttgatcttggctgtggtggccatggcctatgaggaacagaatcaggccacattggaagaggctgaacagaaggaagctgaatttcagcagatgctcgaacagttgaaaaagcaacaagaagaagctcaggcggcagctgcagccgcatctgctgaatcaagagacttcagtggtgctggtgggataggagttttttcagagagttcttcagtagcatctaagttgagctccaaaagtgaaaaagagctgaaaaacagaagaaagaaaaagaaacagaaagaacagtctggagaagaagagaaaaatgacagagtcctaaaatcggaatctgaagacagcataagaagaaaaggtttccgtttttccttggaaggaagtaggctgacatatgaaaagagattttcttctccacaccagtccttactgagcatccgtggctcccttttctctccaagacgcaacagtagggcgagccttttcagcttcagaggtcgagcaaaggacattggctctgagaatgactttgctgatgatgagcacagcacctttgaggacaatgacagccgaagagactctctgttcgtgccgcacagacatggagaacggcgccacagcaatgtcagccaggccagccgtgcctccagggtgctccccatcctgcccatgaatgggaagatgcatagcgctgtggactgcaatggtgtggtctccctggtcgggggcccttctaccctcacatctgctgggcagctcctaccagagggcacaactactgaaacagaaataagaaagagacggtccagttcttatcatgtttccatggatttattggaagatcctacatcaaggcaaagagcaatgagtatagccagtattttgaccaacaccatggaagaacttgaagaatccagacagaaatgcccaccatgctggtataaatttgctaatatgtgtttgatttgggactgttgtaaaccatggttaaaggtgaaacaccttgtcaacctggttgtaatggacccatttgttgacctggccatcaccatctgcattgtcttaaatacactcttcatggctatggagcactatcccatgacggagcagttcagcagtgtactgtctgttggaaacctggtcttcacagggatcttcacagcagaaatgtttctcaagataattgccatggatccatattattactttcaagaaggctggaatatttttgatggttttattgtgagccttagtttaatggaacttggtttggcaaatgtggaaggattgtcagttctccgatcattccggctgctccgagttttcaagttggcaaaatcttggccaactctaaatatgctaattaagatcattggcaattctgtgggggctctaggaaacctcaccttggtattggccatcatcgtcttcatttttgctgtggtcggcatgcagctctttggtaagagctacaaagaatgtgtctgcaagatttccaatgattgtgaactcccacgctggcacatgcatgactttttccactccttcctgatcgtgttccgcgtgctgtgtggagagtggatagagaccatgtgggactgtatggaggtcgctggccaaaccatgtgccttactgtcttcatgatggtcatggtgattggaaatctagtggttctgaacctcttcttggccttgcttttgagttccttcagttctgacaatcttgctgccactgatgatgataacgaaatgaataatctccagattgctgtgggaaggatgcagaaaggaatcgattttgttaaaagaaaaatacgtgaatttattcagaaagcctttgttaggaagcagaaagctttagatgaaattaaaccgcttgaagatctaaataataaaaaagacagctgtatttccaaccataccaccatagaaataggcaaagacctcaattatctcaaagacggaaatggaactactagtggcataggcagcagtgtagaaaaatatgtcgtggatgaaagtgattacatgtcatttataaacaaccctagcctcactgtgacagtaccaattgctgttggagaatctgactttgaaaatttaaatactgaagaattcagcagcgagtcagatatggaggaaagcaaagagaagctaaatgcaactagttcatctgaaggcagcacggttgatattggagctcccgccgagggagaacagcctgaggttgaacctgaggaatcccttgaacctgaagcctgttttacagaagactgtgtacggaagttcaagtgttgtcagataagcatagaagaaggcaaagggaaactctggtggaatttgaggaaaacatgctataagatagtggagcacaattggttcgaaaccttcattgtcttcatgattctgctgagcagtggggctctggcctttgaagatatatacattgagcagcgaaaaaccattaagaccatgttagaatatgctgacaaggttttcacttacatattcattctggaaatgctgctaaagtgggttgcatatggttttcaagtgtattttaccaatgcctggtgctggctagacttcctgattgttgatgtctcactggttagcttaactgcaaatgccttgggttactcagaacttggtgccatcaaatccctcagaacactaagagctctgaggccactgagagctttgtcccggtttgaaggaatgagggctgttgtaaatgctcttttaggagccattccatctatcatgaatgtacttctggtttgtctgatcttttggctaatattcagtatcatgggagtgaatctctttgctggcaagttttaccattgtattaattacaccactggagagatgtttgatgtaagcgtggtcaacaactacagtgagtgcaaagctctcattgagagcaatcaaactgccaggtggaaaaatgtgaaagtaaactttgataacgtaggacttggatatctgtctctacttcaagtagccacgtttaagggatggatggatattatgtatgcagctgttgattcacgaaatgtagaattacaacccaagtatgaagacaacctgtacatgtatctttattttgtcatctttattatttttggttcattctttaccttgaatcttttcattggtgtcatcatagataacttcaaccaacagaaaaagaagtttggaggtcaagacatttttatgacagaagaacagaagaaatactacaatgcaatgaaaaaactgggttcaaagaaaccacaaaaacccatacctcgacctgctaacaaattccaaggaatggtctttgattttgtaaccaaacaagtctttgatatcagcatcatgatcctcatctgccttaacatggtcaccatgatggtggaaaccgatgaccagagtcaagaaatgacaaacattctgtactggattaatctggtgtttattgttctgttcactggagaatgtgtgctgaaactgatctctcttcgttactactatttcactattggatggaatatttttgattttgtggtggtcattctctccattgtaggaatgtttctggctgaactgatagaaaagtattttgtgtcccctaccctgttccgagtgatccgtcttgccaggattggccgaatcctacgtctgatcaaaggagcaaaggggatccgcacgctgctctttgctttgatgatgtcccttcctgcgttgtttaacatcggcctccttcttttcctggtcatgttcatctacgccatctttgggatgtccaattttgcctatgttaagagggaagttgggatcgatgacatgttcaactttgagacctttggcaacagcatgatctgcctgttccaaattacaacctctgctggctgggatggattgctagcacctattcttaatagtggacctccagactgtgaccctgacaaagatcaccctggaagctcagttaaaggagactgtgggaacccatctgttgggattttcttttttgtcagttacatcatcatatccttcctggttgtggtgaacatgtacatcgcggtcatcctggagaacttcagtgttgctactgaagaaagtgcagagcctctgagtgaggatgactttgagatgttctatgaggtttgggagaagtttgatcccgatgcgacccagtttatagagtttgccaaactttctgattttgcagatgccctggatcctcctcttctcatagcaaaacccaacaaagtccagctcattgccatggatctgcccatggtgagtggtgaccggatccactgtcttgacatcttatttgcttttacaaagcgtgttttgggtgagagtggagagatggatgcccttcgaatacagatggaagagcgattcatggcatcaaacccctccaaagtctcttatgagcccattacgaccacgttgaaacgcaaacaagaggaggtgtctgctattattatccagagggcttacagacgctacctcttgaagcaaaaagttaaaaaggtatcaagtatatacaagaaagacaaaggcaaagaatgtgatggaacacccatcaaagaagatactctcattgataaactgaatgagaattcaactccagagaaaaccgatatgacgccttccaccacgtctccaccctcgtatgatagtgtgaccaaaccagaaaaagaaaaatttgaaaaagacaaatcagaaaaggaagacaaagggaaagatatcagggaaagtaaaaagtaaaaagaaaccaagaattttccattttgtgatcaattgtttacagcccgtgatggtgatgtgtttgtgtcaacaggactcccacaggaggtctatgccaaactgactgtttttacaaatgtatacttaaggtcagtgcctataacaagacagagacctctggtcagcaaactggaactcagtaaactggagaaatagtatcgatgggaggtttctattttcacaaccagctgacactgctgaagagcagaggcgtaatggctactcagacgataggaaccaatttaaaggggggagggaagttaaatttttatgt

SEQ ID NO: 458214 - DNA, 174 bp, Homo sapiens
tcaagattatcttcatgatattgaagctcaattaagcagtaacatgataattactttttaagtttatatgcaacttccacatactttgcgcccttctaggcggcagctgcagccgcatctgctgaatcaagagacttcagtggtgctggtgggataggagttttttcagagagt

SEQ ID NO: 458215 - DNA, 6436 bp, Homo sapiens
ttcttggtgccagcttatcaatcccaaactctgggtgtaaaagattctacagggcactttcttatgcaaggagctaaacagtgattaaaggagcaggatgaaaagatggcacagtcagtgctggtaccgccaggacctgacagcttccgcttctttaccagggaatcccttgctgctattgaacaacgcattgcagaagagaaagctaagagacccaaacaggaacgcaaggatgaggatgatgaaaatggcccaaagccaaacagtgacttggaagcaggaaaatctcttccatttatttatggagacattcctccagagatggtgtcagtgcccctggaggatctggacccctactatatcaataagaaaacgtttatagtattgaataaagggaaagcaatctctcgattcagtgccacccctgccctttacattttaactcccttcaaccctattagaaaattagctattaagattttggtacattctttattcaatatgctcattatgtgcacgattcttaccaactgtgtatttatgaccatgagtaaccctccagactggacaaagaatgtggagtatacctttacaggaatttatacttttgaatcacttattaaaatacttgcaaggggcttttgtttagaagatttcacatttttacgggatccatggaattggttggatttcacagtcattacttttgcatatgtgacagagtttgtggacctgggcaatgtctcagcgttgagaacattcagagttctccgagcattgaaaacaatttcagtcattccaggcctgaagaccattgtgggggccctgatccagtcagtgaagaagctttctgatgtcatgatcttgactgtgttctgtctaagcgtgtttgcgctaataggattgcagttgttcatgggcaacctacgaaataaatgtttgcaatggcctccagataattcttcctttgaaataaatatcacttccttctttaacaattcattggatgggaatggtactactttcaataggacagtgagcatatttaactgggatgaatatattgaggataaaagtcacttttattttttagaggggcaaaatgatgctctgctttgtggcaacagctcagatgcaggccagtgtcctgaaggatacatctgtgtgaaggctggtagaaaccccaactatggctacacgagctttgacacctttagttgggcctttttgtccttatttcgtctcatgactcaagacttctgggaaaacctttatcaactgacactacgtgctgctgggaaaacgtacatgatattttttgtgctggtcattttcttgggctcattctatctaataaatttgatcttggctgtggtggccatggcctatgaggaacagaatcaggccacattggaagaggctgaacagaaggaagctgaatttcagcagatgctcgaacagttgaaaaagcaacaagaagaagctcaggcggcagctgcagccgcatctgctgaatcaagagacttcagtggtgctggtgggataggagttttttcagagagttcttcagtagcatctaagttgagctccaaaagtgaaaaagagctgaaaaacagaagaaagaaaaagaaacagaaagaacagtctggagaagaagagaaaaatgacagagtcctaaaatcggaatctgaagacagcataagaagaaaaggtttccgtttttccttggaaggaagtaggctgacatatgaaaagagattttcttctccacaccagtccttactgagcatccgtggctcccttttctctccaagacgcaacagtagggcgagccttttcagcttcagaggtcgagcaaaggacattggctctgagaatgactttgctgatgatgagcacagcacctttgaggacaatgacagccgaagagactctctgttcgtgccgcacagacatggagaacggcgccacagcaatgtcagccaggccagccgtgcctccagggtgctccccatcctgcccatgaatgggaagatgcatagcgctgtggactgcaatggtgtggtctccctggtcgggggcccttctaccctcacatctgctgggcagctcctaccagagggcacaactactgaaacagaaataagaaagagacggtccagttcttatcatgtttccatggatttattggaagatcctacatcaaggcaaagagcaatgagtatagccagtattttgaccaacaccatggaagaacttgaagaatccagacagaaatgcccaccatgctggtataaatttgctaatatgtgtttgatttgggactgttgtaaaccatggttaaaggtgaaacaccttgtcaacctggttgtaatggacccatttgttgacctggccatcaccatctgcattgtcttaaatacactcttcatggctatggagcactatcccatgacggagcagttcagcagtgtactgtctgttggaaacctggtcttcacagggatcttcacagcagaaatgtttctcaagataattgccatggatccatattattactttcaagaaggctggaatatttttgatggttttattgtgagccttagtttaatggaacttggtttggcaaatgtggaaggattgtcagttctccgatcattccggctgctccgagttttcaagttggcaaaatcttggccaactctaaatatgctaattaagatcattggcaattctgtgggggctctaggaaacctcaccttggtattggccatcatcgtcttcatttttgctgtggtcggcatgcagctctttggtaagagctacaaagaatgtgtctgcaagatttccaatgattgtgaactcccacgctggcacatgcatgactttttccactccttcctgatcgtgttccgcgtgctgtgtggagagtggatagagaccatgtgggactgtatggaggtcgctggccaaaccatgtgccttactgtcttcatgatggtcatggtgattggaaatctagtggttctgaacctcttcttggccttgcttttgagttccttcagttctgacaatcttgctgccactgatgatgataacgaaatgaataatctccagattgctgtgggaaggatgcagaaaggaatcgattttgttaaaagaaaaatacgtgaatttattcagaaagcctttgttaggaagcagaaagctttagatgaaattaaaccgcttgaagatctaaataataaaaaagacagctgtatttccaaccataccaccatagaaataggcaaagacctcaattatctcaaagacggaaatggaactactagtggcataggcagcagtgtagaaaaatatgtcgtggatgaaagtgattacatgtcatttataaacaaccctagcctcactgtgacagtaccaattgctgttggagaatctgactttgaaaatttaaatactgaagaattcagcagcgagtcagatatggaggaaagcaaagagaagctaaatgcaactagttcatctgaaggcagcacggttgatattggagctcccgccgagggagaacagcctgaggttgaacctgaggaatcccttgaacctgaagcctgttttacagaagactgtgtacggaagttcaagtgttgtcagataagcatagaagaaggcaaagggaaactctggtggaatttgaggaaaacatgctataagatagtggagcacaattggttcgaaaccttcattgtcttcatgattctgctgagcagtggggctctggcctttgaagatatatacattgagcagcgaaaaaccattaagaccatgttagaatatgctgacaaggttttcacttacatattcattctggaaatgctgctaaagtgggttgcatatggttttcaagtgtattttaccaatgcctggtgctggctagacttcctgattgttgatgtctcactggttagcttaactgcaaatgccttgggttactcagaacttggtgccatcaaatccctcagaacactaagagctctgaggccactgagagctttgtcccggtttgaaggaatgagggctgttgtaaatgctcttttaggagccattccatctatcatgaatgtacttctggtttgtctgatcttttggctaatattcagtatcatgggagtgaatctctttgctggcaagttttaccattgtattaattacaccactggagagatgtttgatgtaagcgtggtcaacaactacagtgagtgcaaagctctcattgagagcaatcaaactgccaggtggaaaaatgtgaaagtaaactttgataacgtaggacttggatatctgtctctacttcaagtagccacgtttaagggatggatggatattatgtatgcagctgttgattcacgaaatgtagaattacaacccaagtatgaagacaacctgtacatgtatctttattttgtcatctttattatttttggttcattctttaccttgaatcttttcattggtgtcatcatagataacttcaaccaacagaaaaagaagtttggaggtcaagacatttttatgacagaagaacagaagaaatactacaatgcaatgaaaaaactgggttcaaagaaaccacaaaaacccatacctcgacctgctaacaaattccaaggaatggtctttgattttgtaaccaaacaagtctttgatatcagcatcatgatcctcatctgccttaacatggtcaccatgatggtggaaaccgatgaccagagtcaagaaatgacaaacattctgtactggattaatctggtgtttattgttctgttcactggagaatgtgtgctgaaactgatctctcttcgttactactatttcactattggatggaatatttttgattttgtggtggtcattctctccattgtaggaatgtttctggctgaactgatagaaaagtattttgtgtcccctaccctgttccgagtgatccgtcttgccaggattggccgaatcctacgtctgatcaaaggagcaaaggggatccgcacgctgctctttgctttgatgatgtcccttcctgcgttgtttaacatcggcctccttcttttcctggtcatgttcatctacgccatctttgggatgtccaattttgcctatgttaagagggaagttgggatcgatgacatgttcaactttgagacctttggcaacagcatgatctgcctgttccaaattacaacctctgctggctgggatggattgctagcacctattcttaatagtggacctccagactgtgaccctgacaaagatcaccctggaagctcagttaaaggagactgtgggaacccatctgttgggattttcttttttgtcagttacatcatcatatccttcctggttgtggtgaacatgtacatcgcggtcatcctggagaacttcagtgttgctactgaagaaagtgcagagcctctgagtgaggatgactttgagatgttctatgaggtttgggagaagtttgatcccgatgcgacccagtttatagagtttgccaaactttctgattttgcagatgccctggatcctcctcttctcatagcaaaacccaacaaagtccagctcattgccatggatctgcccatggtgagtggtgaccggatccactgtcttgacatcttatttgcttttacaaagcgtgttttgggtgagagtggagagatggatgcccttcgaatacagatggaagagcgattcatggcatcaaacccctccaaagtctcttatgagcccattacgaccacgttgaaacgcaaacaagaggaggtgtctgctattattatccagagggcttacagacgctacctcttgaagcaaaaagttaaaaaggtatcaagtatatacaagaaagacaaaggcaaagaatgtgatggaacacccatcaaagaagatactctcattgataaactgaatgagaattcaactccagagaaaaccgatatgacgccttccaccacgtctccaccctcgtatgatagtgtgaccaaaccagaaaaagaaaaatttgaaaaagacaaatcagaaaaggaagacaaagggaaagatatcagggaaagtaaaaagtaaaaagaaaccaagaattttccattttgtgatcaattgtttacagcccgtgatggtgatgtgtttgtgtcaacaggactcccacaggaggtctatgccaaactgactgtttttacaaatgtatacttaaggtcagtgcctataacaagacagagacctctggtcagcaaactggaactcagtaaactggagaaatagtatcgatgggaggtttctattttcacaaccagctgacactgctgaagagcagaggcgtaatggctactcagacgataggaaccaatttaaaggggggagggaagttaaatttttatgt

SEQ ID NO: 458216 - DNA, 399 bp, Homo sapiens
aagttggcaaaatcttggccaactctaaatatgctaattaagatcattggcaattctgtgggggctctaggaaacctcaccttggtattggccatcatcgtcttcatttttgctgtggtcggcatgcagctctttggtaagagctacaaagaatgtgtctgcaagatttccaatgattgtgaactcccacgctggcacatgcatgactttttccactccttcctgatcgtgttccgcgtgctgtgtggagagtggatagagaccatgtgggactgtatggaggtcgctggccaaaccatgtgccttactgtcttcatgatggtcatggtgattggaaatctagtggtatgtagcaaaaacattttcctcattttcattaaaagataatgtaatcattaa

SEQ ID NO: 458217 - DNA, 4076 bp, Homo sapiens
agccgggaggagcgggcgcgagcggggcagagcgcggcgcggggccggcggcgaaggtccggggtggaatcgacgtcgctgcggctgccgacgacccacacccggccggccgcctccgcagacccaccttggccgcgcggcagggggcgcgcagagccccgagggagcgagtccccgcgcgtggcagctcggcggcttctcccttcgggaggtccggctcccggctctccggacccgcctggcgtcctcgcctgcggcggggcggacgacagcggcgcccaggaatggcttcggcgggcagcggcatggaggaggtgcgcgtgtcggtgctgacccccttgaagctggtcgggctggtgtgcatcttcctggcgctgtgtctggacctgggggcggtgctgagcccggcctgggtcacagctgaccaccagtactacctgtcgttgtgggagtcctgccgcaaacccgccagcttggacatctggcactgcgagtccacgctcagcagcgattggcagattgctactctggctttactcctgggcggcgctgccatcattctcattgcattcctggtgggtttgatttctatctgcgtgggatctcgaaggcgtttctatagacctgttgcggtcatgctttttgcagcagttgttttacaggtttgcagcctggtcctttacccaatcaagttcattgaaactgtgagcttgaaaatttaccatgagttcaactggggttatggcctggcctggggtgcaactatattttcgtttgggggtgccatcctttattgcctgaaccctaagaactatgaagactactactagaaccaatagtctcaaagtaaaaacaaccaccaccatccaacaaaaggattacgtctgcatcttttctaacttactattttctaaaacacttgtggagcatcaagcagtttgctcagttgatttaatcttttttgccttttggctgtcaacatcataaccagcttttacatccattttagaaatctgcacaaattaagagagctgattagacataggcaaatgctgcaaacttccaatatgttcatatcgtttttcttgacaaatgaagggtctatatgacagcaaccattgtgagaaactagttggaatgagatttgcctcaatctcctattgcctgcaggggagcagttggcataagcaacatttagaagttcctttgcgctgacaaggattccactgttagagcccttaccgcctgcttatcctacccaatgactacattggctgttggttatttgcttgagtgagcccttgaaaaatgaactgcccttcagcatctaatgggagttgtgaatgtaactggttaatgatacacattccaccttcaggaacactctttttaatgggaggttatgctttggcaatcagcgtctccctgggaagagagtcaagacttggagacatgtgcttctcattatgtggttagaaattggtgcctcagccctatctagactggggaaaaattgaggatctctgtttttcctggggcaaacagaaagaaatctgcatgagttgcttttgtaccctttaaatcatttgccaaacattgcagcaaacaagtgtgcgtatgtaacaagcttcactgtttttatagaaggtgaaccattagtataaatggtaataagttgttccctaaccctccacatacatttgcctatcacacgtaaaattaatatttactctagtgaagtggtttgagcactaaccttgtacacattgttaagaggcttagattggtattcatacttatttaccatacaaaagtatggtaccttaaagcttttgctctatgttctttactgtttcactggaaagtgtcaatagagttgcctaagaataaaaattgaaatggtgttaatctgaaaattaatgattctctgtaagcactgtagttgaaaagagagtagcaattaggatgatcattttgtgtaaaattcattaaaatagaaggctgctattttttgcaagtattttaaatgtcttcatttttttaagaaaggaatagcgatagatttatataaatatctaaatgtctcagtagaggagtagaattcatctggttatcacctggtcctctgaagttaactgatgggctaaccgatttgtgcacacacttaggatggatttatgttaagggaattacttactgactgttcaatggaaggaagtattaataatagggaataagtttgcaactaatctcatgctgcaaacttgtgttaattctgtttaatatacaaatttggatagcttaattataaacatatttttatatcaaatatacagttctaatataaaagttataaataattatttttgttaacaaagacactaaaacagtatgttctggttttggccctcttgcagaaagaagcattagaaaaattactttaaaagtagctatatgttactgtattgcaaaatctgttaagagcaggaccacatcgatagtatttaataatttgttttacctcccaaaacacagttcttctttcagcttgtcttaagaatggttgccaaaaacaacagccaaaaaaaaaaaaacctattttattatccaaatgctagaaaacacacatgaattttctataaaatcacgaatatgaagtaccaggtttagtcttactttagcaatgatagacaaaagcgaataaatacatcacagacagaaacctttataaaaatatatgattctataaagaatcattagaaattatgagtggaaattctccagaaagatagtattatagagtcttttgaagcaattttttgagaaatagtaaaatctggggcagagtgtcttgcagttaattgcatattgtcagagcagcatgagaaatatgatatttggatagggatttcagcaactaaacattctctgttctgagatctctttattcctgaataatgaaagaatagtactttggtgctgacaccaatgaggcacttctcttggtcctagtagaggatgcagtgtactgttaaaccaatatcatcacatctcgagtcttatcaagttttcattctctgtcaatatgacaagctcaaagtgacagaatatgttataggttgaagcacacatatttgcagtttactgaaaagtagatttcttatgtgacttttttcccttctcagcaaagagccctacactagatttctaccatcactaatatttggaagtatttcattactaacaatctcagtacaacatgaaaattgttgcttctcatctaaaatacaattttgtctatcagaataaacacaagtgaaattttcacctacattaacattatgtctttgcagctttaggtttgttagatgtgttcttaagcataatttttagccacaaacccattgttagatagatatctatggatatagatctacatctatagatatagatatacacacatatatatactcacacacatatagcataaaatactcagcagggctagttattccgatttcttgcacaattatttagctttttgtaagttcaacatgtaaattttaaagacataaatatagagagacttatgtgtttgaatataaatgatatatatggattagcatgtacctgtatattattaaacatgcaatgaactgactggtaagtgacgtctaattgtatggctagcaatgtaatttattcagactgtatttttgtacagagcagtgcactctaacctatgcctctgtgtcctctttaatgcctaaagctgtgcctagaaatttcatctgtcttaaaagtaaaatatacttcatgctgtttatgctattagtttctgtactgctattctatatttattatttttaaatatatgacatgtttactacttaaacatgaattcatggtatcctggttattttttttaagtcatctgggggaaaacctgtttatcactccagtgattttgagtttgcagtttcacaatcagttcttcatttcatgatttttgtagttgacatgaagtcatctatgtggaaaaaaataaaaataaaagtgatttcacggatgtggtt

SEQ ID NO: 458218 - DNA, 4052 bp, Homo sapiens
agccgggaggagcgggcgcgagcggggcagagcgcggcgcggggccggcggcgaaggtccggggtggaatcgacgtcgctgcggctgccgacgacccacacccggccggccgcctccgcagacccaccttggccgcgcggcagggggcgcgcagagccccgagggagcgagtccccgcgcgtggcagctcggcggcttctcccttcgggaggtccggctcccggctctccggacccgcctggcgtcctcgcctgcggcggggcggacgacagcggcgcccaggaatggcttcggcgggcagcggcatggaggaggtgcgcgtgtcggtgctgacccccttgaagctggtcgggctggtgtgcatcttcctggcgctgtgtctggacctgggggcggtgctgagcccggcctgggtcacagctgaccaccagtactacctgtcgttgtgggagtcctgccgcaaacccgccagcttggacatctggcactgcgagtccacgctcagcagcgattggcagattgctactctggctttactcctgggcggcgctgccatcattctcattgcattcctggtgggtttgatttctatctgcgtgggatctcgaaggcgtttctatagacctgttgcggtcatgctttttgcagcagttgttttacaggtttgcagcctggtcctttacccaatcaagttcattgaaactgtgagcttgaaaatttaccatgagttcaactggggttatggcctggcctggggtgcaactatattttcgtttgggggtgccatcctttattgcctgaaccctaagaactatgaagactactactagaaccaatagtctcaaagtaaaaacaaccaccaccatccaacaaaaggattacgtctgcatcttttctaacttactattttctaaaacacttgtggagcatcaagcagtttgctcagttgatttaatcttttttgccttttggctgtcaacatcataaccagcttttacatccattttagaaatctgcacaaattaagagagctgattagacataggcaaatgctgcaaacttccaatatgttcatatcgtttttcttgacaaatgaagggtctatatgacagcaaccattgtgagaaactagttggaatgagatttgcctcaatctcctattgcctgcaggggagcagttggcataagcaacatttagaagttcctttgcgctgacaaggattccactgttagagcccttaccgcctgcttatcctacccaatgactacattggctgttggttatttgcttgagtgagcccttgaaaaatgaactgcccttcagcatctaatgggagttgtgaatgtaactggttaatgatacacattccaccttcaggaacactctttttaatgggaggttatgctttggcaatcagcgtctccctgggaagagagtcaagacttggagacatgtgcttctcattatgtggttagaaattggtgcctcagccctatctagactggggaaaaattgaggatctctgtttttcctggggcaaacagaaagaaatctgcatgagttgcttttgtaccctttaaatcatttgccaaacattgcagcaaacaagtgtgcgtatgtaacaagcttcactgtttttatagaaggtgaaccattagtataaatggtaataagttgttccctaaccctccacatacatttgcctatcacacgtaaaattaatatttactctagtgaagtggtttgagcactaaccttgtacacattgttaagaggcttagattggtattcatacttatttaccatacaaaagtatggtaccttaaagcttttgctctatgttctttactgtttcactggaaagtgtcaatagagttgcctaagaataaaaattgaaatggtgttaatctgaaaattaatgattctctgtaagcactgtagttgaaaagagagtagcaattaggatgatcattttgtgtaaaattcattaaaatagaaggctgctattttttgcaagtattttaaatgtcttcatttttttaagaaaggaatagcgatagatttatataaatatctaaatgtctcagtagaggagtagaattcatctggttatcacctggtcctctgaagttaactgatgggctaaccgatttgtgcacacacttaggatggatttatgttaagggaattacttactgactgttcaatggaaggaagtattaataatagggaataagtttgcaactaatctcatgctgcaaacttgtgttaattctgtttaatatacaaatttggatagcttaattataaacatatttttatatcaaatatacagttctaatataaaagttataaataattatttttgttaacaaagacactaaaacagtatgttctggttttggccctcttgcagaaagaagcattagaaaaattactttaaaagtagctatatgttactgtattgcaaaatctgttaagagcaggaccacatcgatagtatttaataatttgttttacctcccaaaacacagttcttctttcagcttgtcttaagaatggttgccaaaaacaacagccaaaaaaaaaaaaacctattttattatccaaatgctagaaaacacacatgaattttctataaaatcacgaatatgaagtaccaggtttagtcttactttagcaatgatagacaaaagcgaataaatacatcacagacagaaacctttataaaaatatatgattctataaagaatcattagaaattatgagtggaaattctccagaaagatagtattatagagtcttttgaagcaattttttgagaaatagtaaaatctggggcagagtgtcttgcagttaattgcatattgtcagagcagcatgagaaatatgatatttggatagggatttcagcaactaaacattctctgttctgagatctctttattcctgaataatgaaagaatagtactttggtgctgacaccaatgaggcacttctcttggtcctagtagaggatgcagtgtactgttaaaccaatatcatcacatctcgagtcttatcaagttttcattctctgtcaatatgacaagctcaaagtgacagaatatgttataggttgaagcacacatatttgcagtttactgaaaagtagatttcttatgtgacttttttcccttctcagcaaagagccctacactagatttctaccatcactaatatttggaagtatttcattactaacaatctcagtacaacatgaaaattgttgcttctcatctaaaatacaattttgtctatcagaataaacacaagtgaaattttcacctacattaacattatgtctttgcagctttaggtttgttagatgtgttcttaagcataatttttagccacaaacccattgttagatagatatctatggatatagatctacatctatagatatagatatacacacatatatatactcacacacatatagcataaaatactcagcagggctagttattccgatttcttgcacaattatttagctttttgtaagttcaacatgtaaattttaaagacataaatatagagagacttatgtgtttgaatataaatgatatatatggattagcatgtacctgtatattattaaacatgcaatgaactgactggtaagtgacgtctaattgtatggctagcaatgtaatttattcagactgtatttttgtacagagcagtgcactctaacctatgcctctgtgtcctctttaatgcctaaagctgtgcctagaaatttcatctgtcttaaaagtaaaatatacttcatgctgtttatgctattagtttctgtactgctattctatatttattatttttaaatatatgacatgtttactacttaaacatgaattcatggtatcctggttattttttttaagtcatctggggacactgtttcatcaggattgattgcgtcccacgtctcttcgacttggtgctgagcttggtataggtgggaatttctgagcaagacgcacccagctcacgacacaacacaccc

SEQ ID NO: 458219 - DNA, 3875 bp, Homo sapiens
agccgggaggagcgggcgcgagcggggcagagcgcggcgcggggccggcggcgaaggtccggggtggaatcgacgtcgctgcggctgccgacgacccacacccggccggccgcctccgcagacccaccttggccgcgcggcagggggcgcgcagagccccgagggagcgagtccccgcgcgtggcagctcggcggcttctcccttcgggaggtccggctcccggctctccggacccgcctggcgtcctcgcctgcggcggggcggacgacagcggcgcccaggaatggcttcggcgggcagcggcatggaggaggtgcgcgtgtcggtgctgacccccttgaagctggtcgggctggtgtgcatcttcctggcgctgtgtctggacctgggggcggtgctgagcccggcctgggtcacagctgaccaccagtactacctgtcgttgtgggagtcctgccgcaaacccgccagcttggacatctggcactgcgagtccacgctcagcagcgattggcagattgctactctggctttactcctgggcggcgctgccatcattctcattgcattcctggtgggtttgatttctatctgcgtgggatctcgaaggcgtttctatagacctgttgcggtcatgctttttgcagcagttgttttacaggtttgcagcctggtcctttacccaatcaagttcattgaaactgtgagcttgaaaatttaccatgagttcaactggggttatggcctggcctggggtgcaactatattttcgtttgggggtgccatcctttattgcctgaaccctaagaactatgaagactactactagaaccaatagtctcaaagtaaaaacaaccaccaccatccaacaaaaggattacgtctgcatcttttctaacttactattttctaaaacacttgtggagcatcaagcagtttgctcagttgatttaatcttttttgccttttggctgtcaacatcataaccagcttttacatccattttagaaatctgcacaaattaagagagctgattagacataggcaaatgctgcaaacttccaatatgttcatatcgtttttcttgacaaatgaagggtctatatgacagcaaccattgtgagaaactagttggaatgagatttgcctcaatctcctattgcctgcaggggagcagttggcataagcaacatttagaagttcctttgcgctgacaaggattccactgttagagcccttaccgcctgcttatcctacccaatgactacattggctgttggttatttgcttgagtgagcccttgaaaaatgaactgcccttcagcatctaatgggagttgtgaatgtaactggttaatgatacacattccaccttcaggaacactctttttaatgggaggttatgctttggcaatcagcgtctccctgggaagagagtcaagacttggagacatgtgcttctcattatgtggttagaaattggtgcctcagccctatctagactggggaaaaattgaggatctctgtttttcctggggcaaacagaaagaaatctgcatgagttgcttttgtaccctttaaatcatttgccaaacattgcagcaaacaagtgtgcgtatgtaacaagcttcactgtttttatagaaggtgaaccattagtataaatggtaataagttgttccctaaccctccacatacatttgcctatcacacgtaaaattaatatttactctagtgaagtggtttgagcactaaccttgtacacattgttaagaggcttagattggtattcatacttatttaccatacaaaagtatggtaccttaaagcttttgctctatgttctttactgtttcactggaaagtgtcaatagagttgcctaagaataaaaattgaaatggtgttaatctgaaaattaatgattctctgtaagcactgtagttgaaaagagagtagcaattaggatgatcattttgtgtaaaattcattaaaatagaaggctgctattttttgcaagtattttaaatgtcttcatttttttaagaaaggaatagcgatagatttatataaatatctaaatgtctcagtagaggagtagaattcatctggttatcacctggtcctctgaagttaactgatgggctaaccgatttgtgcacacacttaggatggatttatgttaagggaattacttactgactgttcaatggaaggaagtattaataatagggaataagtttgcaactaatctcatgctgcaaacttgtgttaattctgtttaatatacaaatttggatagcttaattataaacatatttttatatcaaatatacagttctaatataaaagttataaataattatttttgttaacaaagacactaaaacagtatgttctggttttggccctcttgcagaaagaagcattagaaaaattactttaaaagtagctatatgttactgtattgcaaaatctgttaagagcaggaccacatcgatagtatttaataatttgttttacctcccaaaacacagttcttctttcagcttgtcttaagaatggttgccaaaaacaacagccaaaaaaaaaaaaacctattttattatccaaatgctagaaaacacacatgaattttctataaaatcacgaatatgaagtaccaggtttagtcttactttagcaatgatagacaaaagcgaataaatacatcacagacagaaacctttataaaaatatatgattctataaagaatcattagaaattatgagtggaaattctccagaaagatagtattatagagtcttttgaagcaattttttgagaaatagtaaaatctggggcagagtgtcttgcagttaattgcatattgtcagagcagcatgagaaatatgatatttggatagggatttcagcaactaaacattctctgttctgagatctctttattcctgaataatgaaagaatagtactttggtgctgacaccaatgaggcacttctcttggtcctagtagaggatgcagtgtactgttaaaccaatatcatcacatctcgagtcttatcaagttttcattctctgtcaatatgacaagctcaaagtgacagaatatgttataggttgaagcacacatatttgcagtttactgaaaagtagatttcttatgtgacttttttcccttctcagcaaagagccctacactagatttctaccatcactaatatttggaagtatttcattactaacaatctcagtacaacatgaaaattgttgcttctcatctaaaatacaattttgtctatcagaataaacacaagtgaaattttcacctacattaacattatgtctttgcagctttaggtttgttagatgtgttcttaagcataatttttagccacaaacccattgttagatagatatctatggatatagatctacatctatagatatagatatacacacatatatatactcacacacatatagcataaaatactcagcagggctagttattccgatttcttgcacaattatttagctttttgtaagttcaacatgtaaattttaaagacataaatatagagagacttatgtgtttgaatataaatgatatatatggattagcatgtacctgtatattattaaacatgcaatgaactgactggtaagtgacgtctaattgtatggctagcaatgtaatttattcagactgtatttttgtacagagcagtgcactctaacctatgcctctgtgtcctctttaatgcctaaagctgtgcctagaaatttcatctgtcttgttatatttttaaatatatgacatgttactacttaacctgattcctgtgacccgggaattttttggtcctgggggcc

SEQ ID NO: 458220 - DNA, 3761 bp, Homo sapiens
agccgggaggagcgggcgcgagcggggcagagcgcggcgcggggccggcggcgaaggtccggggtggaatcgacgtcgctgcggctgccgacgacccacacccggccggccgcctccgcagacccaccttggccgcgcggcagggggcgcgcagagccccgagggagcgagtccccgcgcgtggcagctcggcggcttctcccttcgggaggtccggctcccggctctccggacccgcctggcgtcctcgcctgcggcggggcggacgacagcggcgcccaggaatggcttcggcgggcagcggcatggaggaggtgcgcgtgtcggtgctgacccccttgaagctggtcgggctggtgtgcatcttcctggcgctgtgtctggacctgggggcggtgctgagcccggcctgggtcacagctgaccaccagtactacctgtcgttgtgggagtcctgccgcaaacccgccagcttggacatctggcactgcgagtccacgctcagcagcgattggcagattgctactctggctttactcctgggcggcgctgccatcattctcattgcattcctggtgggtttgatttctatctgcgtgggatctcgaaggcgtttctatagacctgttgcggtcatgctttttgcagcagttgttttacaggtttgcagcctggtcctttacccaatcaagttcattgaaactgtgagcttgaaaatttaccatgagttcaactggggttatggcctggcctggggtgcaactatattttcgtttgggggtgccatcctttattgcctgaaccctaagaactatgaagactactactagaaccaatagtctcaaagtaaaaacaaccaccaccatccaacaaaaggattacgtctgcatcttttctaacttactattttctaaaacacttgtggagcatcaagcagtttgctcagttgatttaatcttttttgccttttggctgtcaacatcataaccagcttttacatccattttagaaatctgcacaaattaagagagctgattagacataggcaaatgctgcaaacttccaatatgttcatatcgtttttcttgacaaatgaagggtctatatgacagcaaccattgtgagaaactagttggaatgagatttgcctcaatctcctattgcctgcaggggagcagttggcataagcaacatttagaagttcctttgcgctgacaaggattccactgttagagcccttaccgcctgcttatcctacccaatgactacattggctgttggttatttgcttgagtgagcccttgaaaaatgaactgcccttcagcatctaatgggagttgtgaatgtaactggttaatgatacacattccaccttcaggaacactctttttaatgggaggttatgctttggcaatcagcgtctccctgggaagagagtcaagacttggagacatgtgcttctcattatgtggttagaaattggtgcctcagccctatctagactggggaaaaattgaggatctctgtttttcctggggcaaacagaaagaaatctgcatgagttgcttttgtaccctttaaatcatttgccaaacattgcagcaaacaagtgtgcgtatgtaacaagcttcactgtttttatagaaggtgaaccattagtataaatggtaataagttgttccctaaccctccacatacatttgcctatcacacgtaaaattaatatttactctagtgaagtggtttgagcactaaccttgtacacattgttaagaggcttagattggtattcatacttatttaccatacaaaagtatggtaccttaaagcttttgctctatgttctttactgtttcactggaaagtgtcaatagagttgcctaagaataaaaattgaaatggtgttaatctgaaaattaatgattctctgtaagcactgtagttgaaaagagagtagcaattaggatgatcattttgtgtaaaattcattaaaatagaaggctgctattttttgcaagtattttaaatgtcttcatttttttaagaaaggaatagcgatagatttatataaatatctaaatgtctcagtagaggagtagaattcatctggttatcacctggtcctctgaagttaactgatgggctaaccgatttgtgcacacacttaggatggatttatgttaagggaattacttactgactgttcaatggaaggaagtattaataatagggaataagtttgcaactaatctcatgctgcaaacttgtgttaattctgtttaatatacaaatttggatagcttaattataaacatatttttatatcaaatatacagttctaatataaaagttataaataattatttttgttaacaaagacactaaaacagtatgttctggttttggccctcttgcagaaagaagcattagaaaaattactttaaaagtagctatatgttactgtattgcaaaatctgttaagagcaggaccacatcgatagtatttaataatttgttttacctcccaaaacacagttcttctttcagcttgtcttaagaatggttgccaaaaacaacagccaaaaaaaaaaaaacctattttattatccaaatgctagaaaacacacatgaattttctataaaatcacgaatatgaagtaccaggtttagtcttactttagcaatgatagacaaaagcgaataaatacatcacagacagaaacctttataaaaatatatgattctataaagaatcattagaaattatgagtggaaattctccagaaagatagtattatagagtcttttgaagcaattttttgagaaatagtaaaatctggggcagagtgtcttgcagttaattgcatattgtcagagcagcatgagaaatatgatatttggatagggatttcagcaactaaacattctctgttctgagatctctttattcctgaataatgaaagaatagtactttggtgctgacaccaatgaggcacttctcttggtcctagtagaggatgcagtgtactgttaaaccaatatcatcacatctcgagtcttatcaagttttcattctctgtcaatatgacaagctcaaagtgacagaatatgttataggttgaagcacacatatttgcagtttactgaaaagtagatttcttatgtgacttttttcccttctcagcaaagagccctacactagatttctaccatcactaatatttggaagtatttcattactaacaatctcagtacaacatgaaaattgttgcttctcatctaaaatacaattttgtctatcagaataaacacaagtgaaattttcacctacattaacattatgtctttgcagctttaggtttgttagatgtgttcttaagcataatttttagccacaaacccattgttagatagatatctatggatatagatctacatctatagatatagatatacacacatatatatactcacacacatatagcataaaatactcagcagggctagttattccgatttcttgcacaattatttagctttttgtaagttcaacatgtaatgacatgtttactacttaaacatgaattcatggtatcctggttattttttttaagtcatctgggggaaaacctgtttatcactccagtgattttgagtttgcagtttcacaatcagttcttcatttcatgatttttgtagttgacatgaagtcatctatgtggaaaaaaataaaaataaaagtgatttcacggatgtggtt

SEQ ID NO: 458221 - DNA, 3880 bp, Homo sapiens
agccgggaggagcgggcgcgagcggggcagagcgcggcgcggggccggcggcgaaggtccggggtggaatcgacgtcgctgcggctgccgacgacccacacccggccggccgcctccgcagacccaccttggccgcgcggcagggggcgcgcagagccccgagggagcgagtccccgcgcgtggcagctcggcggcttctcccttcgggaggtccggctcccggctctccggacccgcctggcgtcctcgcctgcggcggggcggacgacagcggcgcccaggaatggcttcggcgggcagcggcatggaggagattggcagattgctactctggctttactcctgggcggcgctgccatcattctcattgcattcctggtgggtttgatttctatctgcgtgggatctcgaaggcgtttctatagacctgttgcggtcatgctttttgcagcagttgttttacaggtttgcagcctggtcctttacccaatcaagttcattgaaactgtgagcttgaaaatttaccatgagttcaactggggttatggcctggcctggggtgcaactatattttcgtttgggggtgccatcctttattgcctgaaccctaagaactatgaagactactactagaaccaatagtctcaaagtaaaaacaaccaccaccatccaacaaaaggattacgtctgcatcttttctaacttactattttctaaaacacttgtggagcatcaagcagtttgctcagttgatttaatcttttttgccttttggctgtcaacatcataaccagcttttacatccattttagaaatctgcacaaattaagagagctgattagacataggcaaatgctgcaaacttccaatatgttcatatcgtttttcttgacaaatgaagggtctatatgacagcaaccattgtgagaaactagttggaatgagatttgcctcaatctcctattgcctgcaggggagcagttggcataagcaacatttagaagttcctttgcgctgacaaggattccactgttagagcccttaccgcctgcttatcctacccaatgactacattggctgttggttatttgcttgagtgagcccttgaaaaatgaactgcccttcagcatctaatgggagttgtgaatgtaactggttaatgatacacattccaccttcaggaacactctttttaatgggaggttatgctttggcaatcagcgtctccctgggaagagagtcaagacttggagacatgtgcttctcattatgtggttagaaattggtgcctcagccctatctagactggggaaaaattgaggatctctgtttttcctggggcaaacagaaagaaatctgcatgagttgcttttgtaccctttaaatcatttgccaaacattgcagcaaacaagtgtgcgtatgtaacaagcttcactgtttttatagaaggtgaaccattagtataaatggtaataagttgttccctaaccctccacatacatttgcctatcacacgtaaaattaatatttactctagtgaagtggtttgagcactaaccttgtacacattgttaagaggcttagattggtattcatacttatttaccatacaaaagtatggtaccttaaagcttttgctctatgttctttactgtttcactggaaagtgtcaatagagttgcctaagaataaaaattgaaatggtgttaatctgaaaattaatgattctctgtaagcactgtagttgaaaagagagtagcaattaggatgatcattttgtgtaaaattcattaaaatagaaggctgctattttttgcaagtattttaaatgtcttcatttttttaagaaaggaatagcgatagatttatataaatatctaaatgtctcagtagaggagtagaattcatctggttatcacctggtcctctgaagttaactgatgggctaaccgatttgtgcacacacttaggatggatttatgttaagggaattacttactgactgttcaatggaaggaagtattaataatagggaataagtttgcaactaatctcatgctgcaaacttgtgttaattctgtttaatatacaaatttggatagcttaattataaacatatttttatatcaaatatacagttctaatataaaagttataaataattatttttgttaacaaagacactaaaacagtatgttctggttttggccctcttgcagaaagaagcattagaaaaattactttaaaagtagctatatgttactgtattgcaaaatctgttaagagcaggaccacatcgatagtatttaataatttgttttacctcccaaaacacagttcttctttcagcttgtcttaagaatggttgccaaaaacaacagccaaaaaaaaaaaaacctattttattatccaaatgctagaaaacacacatgaattttctataaaatcacgaatatgaagtaccaggtttagtcttactttagcaatgatagacaaaagcgaataaatacatcacagacagaaacctttataaaaatatatgattctataaagaatcattagaaattatgagtggaaattctccagaaagatagtattatagagtcttttgaagcaattttttgagaaatagtaaaatctggggcagagtgtcttgcagttaattgcatattgtcagagcagcatgagaaatatgatatttggatagggatttcagcaactaaacattctctgttctgagatctctttattcctgaataatgaaagaatagtactttggtgctgacaccaatgaggcacttctcttggtcctagtagaggatgcagtgtactgttaaaccaatatcatcacatctcgagtcttatcaagttttcattctctgtcaatatgacaagctcaaagtgacagaatatgttataggttgaagcacacatatttgcagtttactgaaaagtagatttcttatgtgacttttttcccttctcagcaaagagccctacactagatttctaccatcactaatatttggaagtatttcattactaacaatctcagtacaacatgaaaattgttgcttctcatctaaaatacaattttgtctatcagaataaacacaagtgaaattttcacctacattaacattatgtctttgcagctttaggtttgttagatgtgttcttaagcataatttttagccacaaacccattgttagatagatatctatggatatagatctacatctatagatatagatatacacacatatatatactcacacacatatagcataaaatactcagcagggctagttattccgatttcttgcacaattatttagctttttgtaagttcaacatgtaaattttaaagacataaatatagagagacttatgtgtttgaatataaatgatatatatggattagcatgtacctgtatattattaaacatgcaatgaactgactggtaagtgacgtctaattgtatggctagcaatgtaatttattcagactgtatttttgtacagagcagtgcactctaacctatgcctctgtgtcctctttaatgcctaaagctgtgcctagaaatttcatctgtcttaaaagtaaaatatacttcatgctgtttatgctattagtttctgtactgctattctatatttattatttttaaatatatgacatgtttactacttaaacatgaattcatggtatcctggttattttttttaagtcatctgggggaaaacctgtttatcactccagtgattttgagtttgcagtttcacaatcagttcttcatttcatgatttttgtagttgacatgaagtcatctatgtggaaaaaaataaaaataaaagtgatttcacggatgtggtt

SEQ ID NO: 458222 - DNA, 4032 bp, Homo sapiens
  misc_feature (4018)..(4018): n is a, c, g, or t
agccgggaggagcgggcgcgagcggggcagagcgcggcgcggggccggcggcgaaggtccggggtggaatcgacgtcgctgcggctgccgacgacccacacccggccggccgcctccgcagacccaccttggccgcgcggcagggggcgcgcagagccccgagggagcgagtccccgcgcgtggcagctcggcggcttctcccttcgggaggtccggctcccggctctccggacccgcctggcgtcctcgcctgcggcggggcggacgacagcggcgcccaggaatggcttcggcgggcagcggcatggaggaggtgcgcgtgtcggtgctgacccccttgaagctggtcgggctggtgtgcatcttcctggcgctgtgtctggacctgggggcggtgctgagcccggcctgggtcacagctgaccaccagtactacctgtcgttgtgggagtcctgccgcaaacccgccagcttggacatctggcactgcgagtccacgctcagcagcgattggcagattgctactctggctttactcctgggcggcgctgccatcattctcattgcattcctggtgggtttgatttctatctgcgtgggatctcgaaggcgtttctatagacctgttgcggtcatgctttttgcagcagttgttttacaggtttgcagcctggtcctttacccaatcaagttcattgaaactgtgagcttgaaaatttaccatgagttcaactggggttatggcctggcctggggtgcaactatattttcgtttgggggtgccatcctttattgcctgaaccctaagaactatgaagactactactagaaccaatagtctcaaagtaaaaacaaccaccaccatccaacaaaaggattacgtctgcatcttttctaacttactattttctaaaacacttgtggagcatcaagcagtttgctcagttgatttaatcttttttgccttttggctgtcaacatcataaccagcttttacatccattttagaaatctgcacaaattaagagagctgattagacataggcaaatgctgcaaacttccaatatgttcatatcgtttttcttgacaaatgaagggtctatatgacagcaaccattgtgagaaactagttggaatgagatttgcctcaatctcctattgcctgcaggggagcagttggcataagcaacatttagaagttcctttgcgctgacaaggattccactgttagagcccttaccgcctgcttatcctacccaatgactacattggctgttggttatttgcttgagtgagcccttgaaaaatgaactgcccttcagcatctaatgggagttgtgaatgtaactggttaatgatacacattccaccttcaggaacactctttttaatgggaggttatgctttggcaatcagcgtctccctgggaagagagtcaagacttggagacatgtgcttctcattatgtggttagaaattggtgcctcagccctatctagactggggaaaaattgaggatctctgtttttcctggggcaaacagaaagaaatctgcatgagttgcttttgtaccctttaaatcatttgccaaacattgcagcaaacaagtgtgcgtatgtaacaagcttcactgtttttatagaaggtgaaccattagtataaatggtaataagttgttccctaaccctccacatacatttgcctatcacacgtaaaattaatatttactctagtgaagtggtttgagcactaaccttgtacacattgttaagaggcttagattggtattcatacttatttaccatacaaaagtatggtaccttaaagcttttgctctatgttctttactgtttcactggaaagtgtcaatagagttgcctaagaataaaaattgaaatggtgttaatctgaaaattaatgattctctgtaagcactgtagttgaaaagagagtagcaattaggatgatcattttgtgtaaaattcattaaaatagaaggctgctattttttgcaagtattttaaatgtcttcatttttttaagaaaggaatagcgatagatttatataaatatctaaatgtctcagtagaggagtagaattcatctggttatcacctggtcctctgaagttaactgatgggctaaccgatttgtgcacacacttaggatggatttatgttaagggaattacttactgactgttcaatggaaggaagtattaataatagggaataagtttgcaactaatctcatgctgcaaacttgtgttaattctgtttaatatacaaatttggatagcttaattataaacatatttttatatcaaatatacagttctaatataaaagttataaataattatttttgttaacaaagacactaaaacagtatgttctggttttggccctcttgcagaaagaagcattagaaaaattactttaaaagtagctatatgttactgtattgcaaaatctgttaagagcaggaccacatcgatagtatttaataatttgttttacctcccaaaacacagttcttctttcagcttgtcttaagaatggttgccaaaaacaacagccaaaaaaaaaaaaacctattttattatccaaatgctagaaaacacacatgaattttctataaaatcacgaatatgaagtaccaggtttagtcttactttagcaatgatagacaaaagcgaataaatacatcacagacagaaacctttataaaaatatatgattctataaagaatcattagaaattatgagtggaaattctccagaaagatagtattatagagtcttttgaagcaattttttgagaaatagtaaaatctggggcagagtgtcttgcagttaattgcatattgtcagagcagcatgagaaatatgatatttggatagggatttcagcaactaaacattctctgttctgagatctctttattcctgaataatgaaagaatagtactttggtgctgacaccaatgaggcacttctcttggtcctagtagaggatgcagtgtactgttaaaccaatatcatcacatctcgagtcttatcaagttttcattctctgtcaatatgacaagctcaaagtgacagaatatgttataggttgaagcacacatatttgcagtttactgaaaagtagatttcttatgtgacttttttcccttctcagcaaagagccctacactagatttctaccatcactaatatttggaagtatttcattactaacaatctcagtacaacatgaaaattgttgcttctcatctaaaatacaattttgtctatcagaataaacacaagtgaaattttcacctacattaacattatgtctttgcagctttaggtttgttagatgtgttcttaagcataatttttagccacaaacccattgttagatagatatctatggatatagatctacatctatagatatagatatacacacatatatatactcacacacatatagcataaaatactcagcagggctagttattccgatttcttgcacaattatttagctttttgtaagttcaacatgtaaattttaaagacataaatatagagagacttatgtgtttgaatataaatgatatatatggattagcatgtacctgtatattattaaacatgcaatgaactgactggtaagtgacgtctaattgtatggctagcaatgtaatttattcagactgtatttttgtacagagcagtgcactctaacctatgcctctgtgtcctctttaatgcctaaagctgtgcctagaaatttcatctgtcttaaaagtaaaatatacttcatgctgtttatgctattagtttctgtactgctattctatatttattatttttaaatataacatgatctgggatcggtattcgtagtcacgggaaacgtgtaccaggatgatgagcccacggcctcgcatggggcgagcctggaataccagtcgcaaccgggggccccaggatcgggacgggagcacgccgggcccgcgttancaaccacacacacc

SEQ ID NO: 458223 - DNA, 1017 bp, Homo sapiens
gagtccgtcgtgctcaggggcgggcggaacgggctgacggacgcggctatgggccagtgtgagcggcgagtgggacgtgcgtggcgtgcgtgcgttgacctgggaagcactggacctgtgaggcgtgcgaactggtggcagtgagagacttcggcggacatggctcccagcgtgccagcggcagaacccgagtatcctaaaggcatccgggccgtgctgctggggcctcccggggccggtaaagggacccaggcacccagattggctgaaaacttctgtgtctgccatttagctactggggacatgctgagggccatggtggcttctggctcagagctaggaaaaaagctgaaggcaactatggatgctgggaaactggtgagtgatgaaatggtagtggagctcattgagaagaatttggagacccccttgtgcaaaaatggttttcttctggatggcttccctcggactgtgaggcaggcagaaatgctcgatgacctcatggagaagaggaaagagaagcttgattctgtgattgaattcagcatcccagactctctgctgatccgaagaatcacaggaaggctgattcaccccaagagtggccgttcctaccacgaggagttcaaccctccaaaagagcccatgaaagatgacatcaccggggaacccttgatccgtcgatcagatgataatgaaaaggccttgaaaatccgcctgcaagcctaccacactcaaaccaccccactcatagagtactacaggaaacgggggatccactccgccatcgatgcatcccagacccccgatgtcgtgttcgcaagcatcctagcagccttctccaaagccacatgtaaagacttggttatgtttatctaatgttgggtccaagaaggaatttctttccatccctgtgaggcaatgggtgggaatgataggacaggcaaagagaagcttcctcaggctagcaaaaatatcatttgatgtattgattaaaaaagcacttgcttgatgtat

SEQ ID NO: 458224 - DNA, 671 bp, Homo sapiens
ttatcttggaagctgaatcgcctgagcacaaagatgagaaagtcattgcctatcttcccctcatgagcccctttcctcacagttggtgtttctgacaaactctctgacttctgttcaccagctgctctgctcctgggagtagcaaagttcttcactggagagggtctggattgcctgtctttgtctctgatgggctttgggaacagacagcatcctgggcagaatggtcccatctcaaatctgcatctggcatggaataagaaaaccttgctaacagtcccagcctttcattgctgtcttcctgttctcagatcaccggggaacccttgatccgtcgatcagatgataatgaaaaggccttgaaaatccgcctgcaagcctaccacactcaaaccaccccactcatagagtactacaggaaacgggggatccactccgccatcgatgcatcccagacccccgatgtcgtgttcgcaagcatcctagcagccttctccaaagccacatgtaaagacttggttatgtttatctaatgttgggtccaagaaggaatttctttccatccctgtgaggcaatgggtgggaatgataggacaggcaaagagaagcttcctcaggctagcaaaaatatcatttgatgtattgattaaaaaagcacttgcttgatgtat

SEQ ID NO: 458225 - DNA, 7354 bp, Homo sapiens
  misc_feature (6646)..(6646): n is a, c, g, or t
  misc_feature (6651)..(6651): n is a, c, g, or t
  misc_feature (6716)..(6716): n is a, c, g, or t
  misc_feature (7222)..(7222): n is a, c, g, or t
gagtccgtcgtgctcaggggcgggcggaacgggctgacggacgcggctatgggccagtgtgagcggcgagtgggacgtgcgtggcgtgcgtgcgttgacctgggaagcactggacctgtgaggcgtgcgaactggtggcagtgagagacttcggcggacatggctcccagcgtgccagcggcagaacccgagtatcctaaaggcatccgggccgtgctgctggggcctcccggggccggtaaagggacccaggcacccagattggctgaaaacttctgtgtctgccatttagctactggggacatgctgagggccatggtggcttctggctcagagctaggaaaaaagctgaaggcaactatggatgctgggaaactggtgagtgatgaaatggtagtggagctcattgagaagaatttggagacccccttgtgcaaaaatggttttcttctggatggcttccctcggactgtgaggcaggcagaaatgctcgatgacctcatggagaagaggaaagagaagcttgattctgtgattgaattcagcatcccagactctctgctgatccgaagaatcacaggaaggctgattcaccccaagagtggccgttcctaccacgaggagttcaaccctccaaaagagcccatgaaagatgacatcaccggggaacccttgatccgtcgatcagatgataatgaaaaggccttgaaaatccgcctgcaagcctaccacactcaaaccaccccactcatagagtactacaggaaacgggggatccactccgccatcgatgcatcccagacccccgatgtcgtgttcgcaagcatcctagcagccttctccaaagccacatgtaaagacttggttatgtttatctaatgttgggtccaagaaggaatttctttccatccctgtgaggcaatgggtgggaatgataggacaggcaaagagaagcttcctcaggctagcaaaaatatcatttgatgtattgattaaaaaagcacttgcttgatgtatctttggcgtgtgtgctactctcatctgtgtgtatgtgtgttgtgtgtgtgtgtgtgtgcatgcacatatgtgttcactctgctactttgtaagttttaggctaggttgctttaccagctgtttacttcttttttgttgttgttttgagacaaggtttcgctctgccaccctggctggagtgcagtggcgtgatcttggctcacggcaacctctgcctcctggggctcaagcaattatcccacctcagcctcctgagcagctgggactacaggtgcatgccacaacacctggctgatatttgtattttttgtagagacaggattttgccaagttgcccaggctggtcttgaactcctaggcttaagcaatccacccaccttggcctcctgaagtgccaggatcacagacgtgagccactacacccagcccagctgtttacttctttaaccatacttttgattttattttttgaccaaaatgaactaacccaggtaatcttccagggaccgcaattccagaacctcatagtatttcttccatttccagcagctgattagaagtccaggatcatgtgaagtcaggcagggtcacagttcctgatggcacattatggacagagaattccattttgttttctaacccatgatgaaaacccacgtgagtcagtgtgtgaacagggatcattaattttttccccctaggtggaaggaaaaaggcacttactttgcaggttacagaaattactgggagaggatatcgtcataaaaagagccaggccaaattggaatatttttgtgatctgcatcatgatgctgaaaatagcaattatttgggaattgggtttgaaaactgaattgttgccagagaattaaaccaggtgaaaggtccttttgaattcagattgtcttctgaacatccaggctgatcatctgagagcagtcaaatctacttccccaaaaagagaccagggtaggtttatttgcttttatttttaatgtttgcctgtgtttccaagtgtgaacaaaacagtgtgtgatctattcttggattcattttgatcagtatttattcaaacccagtctctctccaggacataaaactgaaatcagatatgttctttttaagcccaaaccctctcctttctagatccaaccttcacccctaattttatgatggctatagccatggacttccccaagaaaagatcacccagaaataagaccacctgtgacagttaccagcttttattcataaccttagcttcccaactattgagcattttctaaggtccctgctgtcttttggtctctggtttgatttgtggcaaacagatgaagtaacagactgctatgaaggaccacaaaaacggcagcctctggaaaaaccattagaaagtcagtggcagatccagtaaataatatcgccagcctcagcataatctgctgctgactcgattcagtggactctaaagtgcccagcctcctgacctgagctctcctgccatctgtgagactaccagaggtcttatctgctgtccacatggcaactgggcatgagtacctggccaccttgcttccctctttgcctggtccaagtgagtgtctgctgcctctgtcctgccttgttttcctggctctaaaccaactccacccactcttaatggaaactcagtctggctttgtgtgtttctgggaagcacatgacttctgggaatgggcaaggaagaggagtgaaacaaaaactgtcagctatgtgtgcctggtctgggatccttctctgggtgacagtggcatcatgaatcttagaatcagctcccctttaactagggacaattgtaagcacttggcctcaaagttgaggttcttgaatgtttgctaattttatgtgcatgatccttgcccaaatatttgtcatccgtccacatagattcacgtgtgcatacaacatgtacaagtaatatttgggctgcccataagaactggaagattcatagggaatgcatatacccttctcagtatggttaggattctgtttttgcttcatttaattccagagttcctcagcctcagcaggttctgcttttacctgtcacagaaatgtccagtgtttaatgcatttggttgctggggcttacatgccagcctcctctgatatgtacttggtttttaaaaacccattttgttctctcttgtttcctctctatttccctagtatcagaaggccaggcgagactgcaacactgctcatcaccccgcggcgtgatccctgctcttaggtgctgggcagaggggaagggtggtcagggtgaggatggtgagggagggctggtgaggggctcagaggaatacttggaacaacagcagtgttattgtagtgtggcagtttcttttatacataggtgagagtttttaaagtgtaagggaaaaattaattttttaaaaaacaccatgcttggagggtgggggtagaaatagacacaatattatttctaaggaatcgggttttcatttactctggactggtgaaaatattttttaaagccagtgctctaagacctcagcttttatctcagaaccccatgggttccagaccaagagtacaggaaatcaaattgttgtcctgtctgtctatagcttggaacagggagctttgattactgactccggttccacacactgtaagatcaaaaaaccatctccacatttgaaagagatgtaaggtgtattcatagggatggtggctcaacaaatcaagcaaactggaatcaaggggagggggaagggaatgaaatggaaagggaggctgattcccttcccctgacttaccactaatttactaggctacctactttcatgagtaacctctcacagctacccagcacatgccacaatcctatgctcttgccttcttttatctgcactgtgtgaagggactcttttaaataaatgagcaagtgtcctaagctatgtcatccaaagattgtcctttccattctcaaatcctgtgactgggatcactcaacagcactgtgatgtattattttcaatgaggtgcctttcttaactgaccaaatgctgccttgtttggcccctaaatcaataaaatatgttaaaatttgtatcccctgttgtggcattttttttagataatctaagctagaaaaatgacattgaattctggacctggctggaaggaaaagaagccctttcttgtcgctggcagctgtgtggtagggaggtccaagtatgtgcatatgagataagcctgcaacctcttgaccttcagctcctatgcaggcttctcttgagcccagagacaaggcagcttggtctagtggagatagcactgtgcttggagttcaggggacctaggacaaatcccagccagttagttattcactgtgctcctgtttcctcagctgaaaaaggaagttggttatgccaccttcttggccttaatggcattaaatgaaatttataggaagaaggtttttgctcagtacctggcatgcaacagacattggataaatgttagttggatccagatatacacagaaagatatctgcttcctgccaggctggataactgttgaatggacacttgtccatagtctagaaagccagtgcttctaatccttaagccagatctttgactaccttttcagttgcttctttaacactctttgttgcttctctgtgtgtcctagtttaaattcatttcctctccagcaaaagtgagcttaaataatttctccaaactaaagctctcatgtttttggaagggctgcctttgcaagtgaggtttctgagaaatgactgttgttcccaaaacaagagggagctgggctggaagcaccactattcttctttaggcatcttgttacagagagaggcagggtcttcactgacatattaaatcctgttccctgaaccagcccctccctcttctgctccacttcctcacctgtgcagagtcattttcaggtgttagccttactgatttgcactgatctgtttgttccctgagctttttaaataccctgtgaaaattttctttcctcccttggtcatcatgcatctaattgtggggaaatgtttgtcaaaccaacctgcaaagcagcatggtgtagttgagaagaataaacagagaagactgggtgagctattgtttgtttgcttctttgggcctgggtttcctcatctaatctgcaaaccaagaatgcagactagtcctaccactcccggaagactgacgttgtgccaggtattatgcaaaggcttcatgtaaccctcgacttcacgtaaccctcacacagcaccctgtggagtcagaactgtccttcacttttataggtgaggaaaccagactcagagaggtgaagtggcattcctgaggtcatgcataagaggcagtcaggactgaaacacagtctctaacacttatccgtccccttgatcttgttgctgaagtgatttaattacttgcgtagctctgcacacaggaagggctgctctgaataagagctcttttccatggacactcagcgctgccggaactgattttgaagaagtcactgccggctctgagggcctagggtatgtgtcttaggatctcctgtgtgcacaaagtgtcactgacagaacacagcaggatggagagcagcctcctcagaagcctcacaagtctttcctcagatgaagacagagcaacgagtcagaagacagatttcaacagcgacttcaccatgcgaccttggacaagttatctcacctcatcagtagaataggaatgatccctacccctcaaaggtgctgatgacactagtgaccaagatactcatgtgggttggactgcccaggacacagcagatgcttagtaaacacagatggaattcagagggaaaatgtaggcattgaagaaagttgtcttactgaccatccggaaccaggctaaggatcccctagaaatcatagacctctgaaattatatgcagaattctttatgtgttttcataattaataatagtctaacatattaaattcttagctgtgtgagaggttctgcatgcattatctcatttattctcctcgataaccctgtggaggtaagtattgctattatctctatggtatgtctgtagactttgagattcagacatctgataatggcagaaccagagcctgagtccaagtctggctccacaccccagcctcttaacactgtgccaattgctttgacactttgctggggagagatgaaatgatctcaaaggcactcatgatacagaaaaggctatgagccatggatccaaacaaaaggagaaactcaagtaggtttgctctgttacagtgaaggacctgccacaggtaagacctttttctattttgccatcctccgttgtttccttattgttggtactaaagttccaatgtgctggatttgcatagctcctggaatcacccgtattccagaaaggctggaggggtgagttatgttgggggaaggagccggttcccatctcttgtcctccacgattatctcctggttctggataaggtggccaggagagggtgtgtatgtaggctgttgagtcacaggcagccgtctcagattgcagctctgtgtagcngatgntgttgcattattcataactccagggggagcagtgtgcttctgatgttttgggaatgcagcagctntgggtttagagtcatccatggcagtgtgatgatgagctgctctcacagagggccccttccaggtgcccagtccagattgaggtgcccccagcagaaaacaggtggaaatggaaagacagagcatcagagggcaagacaacatgggcctagatcctgtgcaggtagccctcaagccaataagccaaacagatctgcactttgggggtaaagttgctatggagcaaataatttgattgtgtggtgttctgtaagggttttgcagacaaattcctctgagcttagctaggagttcattatgcttcctgtttagctggtcttctttcttctactaaataagaaatgcttcatttttggccgagcacggtggctcatgcctgtaatctcagcactttgggaggccggggcatgcggatcacaaggtcaggagtttgagaccagcctggccaacgtggtgaaaccccgtctctactaaagatacaaaaaaatcagctgggcatggtggcgcncacctgtaatcgcaactatttgggagttcgaggcaggagaattgcttgaacccgggaggcggaggttgcagtgagccgagatcgcgccattgcactccagcctgggcaacagggtaaggctccgtctcaaga

SEQ ID NO: 458226 - DNA, 6073 bp, Homo sapiens
gagtccgtcgtgctcaggggcgggcggaacgggctgacggacgcggctatgggccagtgtgagcggcgagtgggacgtgcgtggcgtgcgtgcgttgacctgggaagcactggacctgtgaggcgtgcgaactggtggcagtgagagacttcggcggacatggctcccagcgtgccagcggcagaacccgagtatcctaaaggcatccgggccgtgctgctggggcctcccggggccggtaaagggacccaggcacccagattggctgaaaacttctgtgtctgccatttagctactggggacatgctgagggccatggtggcttctggctcagagctaggaaaaaagctgaaggcaactatggatgctgggaaactggtgagtgatgaaatggtagtggagctcattgagaagaatttggagacccccttgtgcaaaaatggttttcttctggatggcttccctcggactgtgaggcaggcagaaatgctcgatgacctcatggagaagaggaaagagaagcttgattctgtgattgaattcagcatcccagactctctgctgatccgaagaatcacaggaaggctgattcaccccaagagtggccgttcctaccacgaggagttcaaccctccaaaagagcccatgaaagatgacatcaccggggaacccttgatccgtcgatcagatgataatgaaaaggccttgaaaatccgcctgcaagcctaccacactcaaaccaccccactcatagagtactacaggaaacgggggatccactccgccatcgatgcatcccagacccccgatgtcgtgttcgcaagcatcctagcagccttctccaaagccacatgtaaagacttggttatgtttatctaatgttgggtccaagaaggaatttctttccatccctgtgaggcaatgggtgggaatgataggacaggcaaagagaagcttcctcaggctagcaaaaatatcatttgatgtattgattaaaaaagcacttgcttgatgtatctttggcgtgtgtgctactctcatctgtgtgtatgtgtgttgtgtgtgtgtgtgtgtgcatgcacatatgtgttcactctgctactttgtaagttttaggctaggttgctttaccagctgtttacttcttttttgttgttgttttgagacaaggtttcgctctgccaccctggctggagtgcagtggcgtgatcttggctcacggcaacctctgcctcctggggctcaagcaattatcccacctcagcctcctgagcagctgggactacaggtgcatgccacaacacctggctgatatttgtattttttgtagagacaggattttgccaagttgcccaggctggtcttgaactcctaggcttaagcaatccacccaccttggcctcctgaagtgccaggatcacagacgtgagccactacacccagcccagctgtttacttctttaaccatacttttgattttattttttgaccaaaatgaactaacccaggtaatcttccagggaccgcaattccagaacctcatagtatttcttccatttccagcagctgattagaagtccaggatcatgtgaagtcaggcagggtcacagttcctgatggcacattatggacagagaattccattttgttttctaacccatgatgaaaacccacgtgagtcagtgtgtgaacagggatcattaattttttccccctaggtggaaggaaaaaggcacttactttgcaggttacagaaattactgggagaggatatcgtcataaaaagagccaggccaaattggaatatttttgtgatctgcatcatgatgctgaaaatagcaattatttgggaattgggtttgaaaactgaattgttgccagagaattaaaccaggtgaaaggtccttttgaattcagattgtcttctgaacatccaggctgatcatctgagagcagtcaaatctacttccccaaaaagagaccagggtaggtttatttgcttttatttttaatgtttgcctgtgtttccaagtgtgaacaaaacagtgtgtgatctattcttggattcattttgatcagtatttattcaaacccagtctctctccaggacataaaactgaaatcagatatgttctttttaagcccaaaccctctcctttctagatccaaccttcacccctaattttatgatggctatagccatggacttccccaagaaaagatcacccagaaataagaccacctgtgacagttaccagcttttattcataaccttagcttcccaactattgagcattttctaaggtccctgctgtcttttggtctctggtttgatttgtggcaaacagatgaagtaacagactgctatgaaggaccacaaaaacggcagcctctggaaaaaccattagaaagtcagtggcagatccagtaaataatatcgccagcctcagcataatctgctgctgactcgattcagtggactctaaagtgcccagcctcctgacctgagctctcctgccatctgtgagactaccagaggtcttatctgctgtccacatggcaactgggcatgagtacctggccaccttgcttccctctttgcctggtccaagtgagtgtctgctgcctctgtcctgccttgttttcctggctctaaaccaactccacccactcttaatggaaactcagtctggctttgtgtgtttctgggaagcacatgacttctgggaatgggcaaggaagaggagtgaaacaaaaactgtcagctatgtgtgcctggtctgggatccttctctgggtgacagtggcatcatgaatcttagaatcagctcccctttaactagggacaattgtaagcacttggcctcaaagttgaggttcttgaatgtttgctaattttatgtgcatgatccttgcccaaatatttgtcatccgtccacatagattcacgtgtgcatacaacatgtacaagtaatatttgggctgcccataagaactggaagattcatagggaatgcatatacccttctcagtatggttaggattctgtttttgcttcatttaattccagagttcctcagcctcagcaggttctgcttttacctgtcacagaaatgtccagtgtttaatgcatttggttgctggggcttacatgccagcctcctctgatatgtacttggtttttaaaaacccattttgttctctcttgtttcctctctatttccctagtatcagaaggccaggcgagactgcaacactgctcatcaccccgcggcgtgatccctgctcttaggtgctgggcagaggggaagggtggtcagggtgaggatggtgagggagggctggtgaggggctcagaggaatacttggaacaacagcagtgttattgtagtgtggcagtttcttttatacataggtgagagtttttaaagtgtaagggaaaaattaattttttaaaaaacaccatgcttggagggtgggggtagaaatagacacaatattatttctaaggaatcgggttttcatttactctggactggtgaaaatattttttaaagccagtgctctaagacctcagcttttatctcagaaccccatgggttccagaccaagagtacaggaaatcaaattgttgtcctgtctgtctatagcttggaacagggagctttgattactgactccggttccacacactgtaagatcaaaaaaccatctccacatttgaaagagatgtaaggtgtattcatagggatggtggctcaacaaatcaagcaaactggaatcaaggggagggggaagggaatgaaatggaaagggaggctgattcccttcccctgacttaccactaatttactaggctacctactttcatgagtaacctctcacagctacccagcacatgccacaatcctatgctcttgccttcttttatctgcactgtgtgaagggactcttttaaataaatgagcaagtgtcctaagctatgtcatccaaagattgtcctttccattctcaaatcctgtgactgggatcactcaacagcactgtgatgtattattttcaatgaggtgcctttcttaactgaccaaatgctgccttgtttggcccctaaatcaataaaatatgttaaaatttgtatcccctgttgtggcattttttttagataatctaagctagaaaaatgacattgaattctggacctggctggaaggaaaagaagccctttcttgtcgctggcagctgtgtggtagggaggtccaagtatgtgcatatgagataagcctgcaacctcttgaccttcagctcctatgcaggcttctcttgagcccagagacaaggcagcttggtctagtggagatagcactgtgcttggagttcaggggacctaggacaaatcccagccagttagttattcactgtgctcctgtttcctcagctgaaaaaggaagttggttatgccaccttcttggccttaatggcattaaatgaaatttataggaagaaggtttttgctcagtacctggcatgcaacagacattggataaatgttagttggatccagatatacacagaaagatatctgcttcctgccaggctggataactgttgaatggacacttgtccatagtctagaaagccagtgcttctaatccttaagccagatctttgactaccttttcagttgcttctttaacactctttgttgcttctctgtgtgtcctagtttaaattcatttcctctccagcaaaagtgagcttaaataatttctccaaactaaagctctcatgtttttggaagggctgcctttgcaagtgaggtttctgagaaatgactgttgttcccaaaacaagagggagctgggctggaagcaccactattcttctttaggcatcttgttacagagagaggcagggtcttcactgacatattaaatcctgttccctgaaccagcccctccctcttctgctccacttcctcacctgtgcagagtcattttcaggtgttagccttactgatttgcactgatctgtttgttccctgagctttttaaataccctgtgaaaattttctttcctcccttggtcatcatgcatctaattgtggggaaatgtttgtcaaaccaacctgcaaagcagcatggtgtagttgagaagaataaacagagaagactgggtgagctattgtttgtttgcttctttgggcctgggtttcctcatctaatctgcaaaccaagaatgcagactagtcctaccactcccggaagactgacgttgtgccaggtattatgcaaaggcttcatgtaaccctcgacttcacgtaaccctcacacagcaccctgtggagtcagaactgtccttcacttttataggtgaggaaaccagactcagagaggtgaagtggcattcctgaggtcatgcataagaggcagtcaggactgaaacacagtctctaacacttatccgtccccttgatcttgttgctgaagtgatttaattacttgcgtagctctgcacacaggaagggctgctctgaataagagctcttttccatggacactcagcgctgccggaactgattttgaagaagtcactgccggctctgagggcctagggtatgtgtcttaggatctcctgtgtgcacaaagtgtcactgacagaacacagcaggatggagagcagcctcctcagaagcctcacaagtctttcctcagatgaagacagagcaacgagtcagaagacagatttcaacagcgacttcaccatgcgaccttggacaagttatctcacctcatcagtagaataggaatgatccctacccctcaaaggtgctgatgacactagtgaccaagatactcatgtgggttggactgcccaggacacagcagatgcttagtaaacacagatggaattcagagggaaaatgtaggcattgaagaaagttgtcttactgaccatccggaaccaggctaaggatcccctagaaatcatagacctctgaaattatatgcagaattctttatgtgttttcataattaataatagtctaacatattaaattcttagctgtgtgaga

SEQ ID NO: 458227 - DNA, 5174 bp, Homo sapiens
gagtccgtcgtgctcaggggcgggcggaacgggctgacggacgcggctatgggccagtgtgagcggcgagtgggacgtgcgtggcgtgcgtgcgttgacctgggaagcactggacctgtgaggcgtgcgaactggtggcagtgagagacttcggcggacatggctcccagcgtgccagcggcagaacccgagtatcctaaaggcatccgggccgtgctgctggggcctcccggggccggtaaagggacccaggcacccagattggctgaaaacttctgtgtctgccatttagctactggggacatgctgagggccatggtggcttctggctcagagctaggaaaaaagctgaaggcaactatggatgctgggaaactggtgagtgatgaaatggtagtggagctcattgagaagaatttggagacccccttgtgcaaaaatggttttcttctggatggcttccctcggactgtgaggcaggcagaaatgctcgatgacctcatggagaagaggaaagagaagcttgattctgtgattgaattcagcatcccagactctctgctgatccgaagaatcacaggaaggctgattcaccccaagagtggccgttcctaccacgaggagttcaaccctccaaaagagcccatgaaagatgacatcaccggggaacccttgatccgtcgatcagatgataatgaaaaggccttgaaaatccgcctgcaagcctaccacactcaaaccaccccactcatagagtactacaggaaacgggggatccactccgccatcgatgcatcccagacccccgatgtcgtgttcgcaagcatcctagcagccttctccaaagccacatgtaaagacttggttatgtttatctaatgttgggtccaagaaggaatttctttccatccctgtgaggcaatgggtgggaatgataggacaggcaaagagaagcttcctcaggctagcaaaaatatcatttgatgtattgattaaaaaagcacttgcttgatgtatctttggcgtgtgtgctactctcatctgtgtgtatgtgtgttgtgtgtgtgtgtgtgtgcatgcacatatgtgttcactctgctactttgtaagttttaggctaggttgctttaccagctgtttacttcttttttgttgttgttttgagacaaggtttcgctctgccaccctggctggagtgcagtggcgtgatcttggctcacggcaacctctgcctcctggggctcaagcaattatcccacctcagcctcctgagcagctgggactacaggtgcatgccacaacacctggctgatatttgtattttttgtagagacaggattttgccaagttgcccaggctggtcttgaactcctaggcttaagcaatccacccaccttggcctcctgaagtgccaggatcacagacgtgagccactacacccagcccagctgtttacttctttaaccatacttttgattttattttttgaccaaaatgaactaacccaggtaatcttccagggaccgcaattccagaacctcatagtatttcttccatttccagcagctgattagaagtccaggatcatgtgaagtcaggcagggtcacagttcctgatggcacattatggacagagaattccattttgttttctaacccatgatgaaaacccacgtgagtcagtgtgtgaacagggatcattaattttttccccctaggtggaaggaaaaaggcacttactttgcaggttacagaaattactgggagaggatatcgtcataaaaagagccaggccaaattggaatatttttgtgatctgcatcatgatgctgaaaatagcaattatttgggaattgggtttgaaaactgaattgttgccagagaattaaaccaggtgaaaggtccttttgaattcagattgtcttctgaacatccaggctgatcatctgagagcagtcaaatctacttccccaaaaagagaccagggtaggtttatttgcttttatttttaatgtttgcctgtgtttccaagtgtgaacaaaacagtgtgtgatctattcttggattcattttgatcagtatttattcaaacccagtctctctccaggacataaaactgaaatcagatatgttctttttaagcccaaaccctctcctttctagatccaaccttcacccctaattttatgatggctatagccatggacttccccaagaaaagatcacccagaaataagaccacctgtgacagttaccagcttttattcataaccttagcttcccaactattgagcattttctaaggtccctgctgtcttttggtctctggtttgatttgtggcaaacagatgaagtaacagactgctatgaaggaccacaaaaacggcagcctctggaaaaaccattagaaagtcagtggcagatccagtaaataatatcgccagcctcagcataatctgctgctgactcgattcagtggactctaaagtgcccagcctcctgacctgagctctcctgccatctgtgagactaccagaggtcttatctgctgtccacatggcaactgggcatgagtacctggccaccttgcttccctctttgcctggtccaagtgagtgtctgctgcctctgtcctgccttgttttcctggctctaaaccaactccacccactcttaatggaaactcagtctggctttgtgtgtttctgggaagcacatgacttctgggaatgggcaaggaagaggagtgaaacaaaaactgtcagctatgtgtgcctggtctgggatccttctctgggtgacagtggcatcatgaatcttagaatcagctcccctttaactagggacaattgtaagcacttggcctcaaagttgaggttcttgaatgtttgctaattttatgtgcatgatccttgcccaaatatttgtcatccgtccacatagattcacgtgtgcatacaacatgtacaagtaatatttgggctgcccataagaactggaagattcatagggaatgcatatacccttctcagtatggttaggattctgtttttgcttcatttaattccagagttcctcagcctcagcaggttctgcttttacctgtcacagaaatgtccagtgtttaatgcatttggttgctggggcttacatgccagcctcctctgatatgtacttggtttttaaaaacccattttgttctctcttgtttcctctctatttccctagtatcagaaggccaggcgagactgcaacactgctcatcaccccgcggcgtgatccctgctcttaggtgctgggcagaggggaagggtggtcagggtgaggatggtgagggagggctggtgaggggctcagaggaatacttggaacaacagcagtgttattgtagtgtggcagtttcttttatacataggtgagagtttttaaagtgtaagggaaaaattaattttttaaaaaacaccatgcttggagggtgggggtagaaatagacacaatattatttctaaggaatcgggttttcatttactctggactggtgaaaatattttttaaagccagtgctctaagacctcagcttttatctcagaaccccatgggttccagaccaagagtacaggaaatcaaattgttgtcctgtctgtctatagcttggaacagggagctttgattactgactccggttccacacactgtaagatcaaaaaaccatctccacatttgaaagagatgtaaggtgtattcatagggatggtggctcaacaaatcaagcaaactggaatcaaggggagggggaagggaatgaaatggaaagggaggctgattcccttcccctgacttaccactaatttactaggctacctactttcatgagtaacctctcacagctacccagcacatgccacaatcctatgctcttgccttcttttatctgcactgtgtgaagggactcttttaaataaatgagcaagtgtcctaagctatgtcatccaaagattgtcctttccattctcaaatcctgtgactgggatcactcaacagcactgtgatgtattattttcaatgaggtgcctttcttaactgaccaaatgctgccttgtttggcccctaaatcaataaaatatgttaaaatttgtatcccctgttgtggcattttttttagataatctaagctagaaaaatgacattgaattctggacctggctggaaggaaaagaagccctttcttgtcgctggcagctgtgtggtagggaggtccaagtatgtgcatatgagataagcctgcaacctcttgaccttcagctcctatgcaggcttctcttgagcccagagacaaggcagcttggtctagtggagatagcactgtgcttggagttcaggggacctaggacaaatcccagccagttagttattcactgtgctcctgtttcctcagctgaaaaaggaagttggttatgccaccttcttggccttaatggcattaaatgaaatttataggaagaaggtttttgctcagtacctggcatgcaacagacattggataaatgttagttggatccagatatacacagaaagatatctgcttcctgccaggctggataactgttgaatggacacttgtccatagtctagaaagccagtgcttctaatccttaagccagatctttgactaccttttcagttgcttctttaacactctttgttgcttctctgtgtgtcctagtttaaattcatttcctctccagcaaaagtgagcttaaataatttctccaaactaaagctctcatgtttttggaagggctgcctttgcaagtgaggtttctgagaaatgactgttgttcccaaaacaagagggagctgggctggaagcaccactattcttctttaggcatcttgttacagagagaggcagggtcttcactgacatattaaatcctgttccctgaaccagcccctccctcttctgctccacttcctcacctgtgcagagtcattttcaggtgttagccttactgatttgcactgatctgtttgttccctgagctttttaaataccctgtgaaaattttctttcctcccttggtcatcatgcatctaattgtggggaaatgtttgtcaaaccaacctgcaaagcagcatggtgtagttgagaagaataaacagagaagactggg

SEQ ID NO: 458228 - DNA, 7161 bp, Homo sapiens
  misc_feature (27)..(27): n is a, c, g, or t
  misc_feature (47)..(47): n is a, c, g, or t
  misc_feature (86)..(86): n is a, c, g, or t
  misc_feature (163)..(164): n is a, c, g, or t
  misc_feature (6453)..(6453): n is a, c, g, or t
  misc_feature (6458)..(6458): n is a, c, g, or t
  misc_feature (6523)..(6523): n is a, c, g, or t
  misc_feature (7029)..(7029): n is a, c, g, or t
taaaccgggtgtctttagtcctaaagntcttgactttggcacattcnccagttgagcagcagcctctatgttccacgttcagtaanaattccagtccttcatatcttttgtagctcaccctcaagctctcccgcttcaccatccaatagtttctcccatcacnnccagcaccactagtggtgttggtgagtgatgaaatggtagtggagctcattgagaagaatttggagacccccttgtgcaaaaatggttttcttctggatggcttccctcggactgtgaggcaggcagaaatgctcgatgacctcatggagaagaggaaagagaagcttgattctgtgattgaattcagcatcccagactctctgctgatccgaagaatcacaggaaggctgattcaccccaagagtggccgttcctaccacgaggagttcaaccctccaaaagagcccatgaaagatgacatcaccggggaacccttgatccgtcgatcagatgataatgaaaaggccttgaaaatccgcctgcaagcctaccacactcaaaccaccccactcatagagtactacaggaaacgggggatccactccgccatcgatgcatcccagacccccgatgtcgtgttcgcaagcatcctagcagccttctccaaagccacatgtaaagacttggttatgtttatctaatgttgggtccaagaaggaatttctttccatccctgtgaggcaatgggtgggaatgataggacaggcaaagagaagcttcctcaggctagcaaaaatatcatttgatgtattgattaaaaaagcacttgcttgatgtatctttggcgtgtgtgctactctcatctgtgtgtatgtgtgttgtgtgtgtgtgtgtgtgcatgcacatatgtgttcactctgctactttgtaagttttaggctaggttgctttaccagctgtttacttcttttttgttgttgttttgagacaaggtttcgctctgccaccctggctggagtgcagtggcgtgatcttggctcacggcaacctctgcctcctggggctcaagcaattatcccacctcagcctcctgagcagctgggactacaggtgcatgccacaacacctggctgatatttgtattttttgtagagacaggattttgccaagttgcccaggctggtcttgaactcctaggcttaagcaatccacccaccttggcctcctgaagtgccaggatcacagacgtgagccactacacccagcccagctgtttacttctttaaccatacttttgattttattttttgaccaaaatgaactaacccaggtaatcttccagggaccgcaattccagaacctcatagtatttcttccatttccagcagctgattagaagtccaggatcatgtgaagtcaggcagggtcacagttcctgatggcacattatggacagagaattccattttgttttctaacccatgatgaaaacccacgtgagtcagtgtgtgaacagggatcattaattttttccccctaggtggaaggaaaaaggcacttactttgcaggttacagaaattactgggagaggatatcgtcataaaaagagccaggccaaattggaatatttttgtgatctgcatcatgatgctgaaaatagcaattatttgggaattgggtttgaaaactgaattgttgccagagaattaaaccaggtgaaaggtccttttgaattcagattgtcttctgaacatccaggctgatcatctgagagcagtcaaatctacttccccaaaaagagaccagggtaggtttatttgcttttatttttaatgtttgcctgtgtttccaagtgtgaacaaaacagtgtgtgatctattcttggattcattttgatcagtatttattcaaacccagtctctctccaggacataaaactgaaatcagatatgttctttttaagcccaaaccctctcctttctagatccaaccttcacccctaattttatgatggctatagccatggacttccccaagaaaagatcacccagaaataagaccacctgtgacagttaccagcttttattcataaccttagcttcccaactattgagcattttctaaggtccctgctgtcttttggtctctggtttgatttgtggcaaacagatgaagtaacagactgctatgaaggaccacaaaaacggcagcctctggaaaaaccattagaaagtcagtggcagatccagtaaataatatcgccagcctcagcataatctgctgctgactcgattcagtggactctaaagtgcccagcctcctgacctgagctctcctgccatctgtgagactaccagaggtcttatctgctgtccacatggcaactgggcatgagtacctggccaccttgcttccctctttgcctggtccaagtgagtgtctgctgcctctgtcctgccttgttttcctggctctaaaccaactccacccactcttaatggaaactcagtctggctttgtgtgtttctgggaagcacatgacttctgggaatgggcaaggaagaggagtgaaacaaaaactgtcagctatgtgtgcctggtctgggatccttctctgggtgacagtggcatcatgaatcttagaatcagctcccctttaactagggacaattgtaagcacttggcctcaaagttgaggttcttgaatgtttgctaattttatgtgcatgatccttgcccaaatatttgtcatccgtccacatagattcacgtgtgcatacaacatgtacaagtaatatttgggctgcccataagaactggaagattcatagggaatgcatatacccttctcagtatggttaggattctgtttttgcttcatttaattccagagttcctcagcctcagcaggttctgcttttacctgtcacagaaatgtccagtgtttaatgcatttggttgctggggcttacatgccagcctcctctgatatgtacttggtttttaaaaacccattttgttctctcttgtttcctctctatttccctagtatcagaaggccaggcgagactgcaacactgctcatcaccccgcggcgtgatccctgctcttaggtgctgggcagaggggaagggtggtcagggtgaggatggtgagggagggctggtgaggggctcagaggaatacttggaacaacagcagtgttattgtagtgtggcagtttcttttatacataggtgagagtttttaaagtgtaagggaaaaattaattttttaaaaaacaccatgcttggagggtgggggtagaaatagacacaatattatttctaaggaatcgggttttcatttactctggactggtgaaaatattttttaaagccagtgctctaagacctcagcttttatctcagaaccccatgggttccagaccaagagtacaggaaatcaaattgttgtcctgtctgtctatagcttggaacagggagctttgattactgactccggttccacacactgtaagatcaaaaaaccatctccacatttgaaagagatgtaaggtgtattcatagggatggtggctcaacaaatcaagcaaactggaatcaaggggagggggaagggaatgaaatggaaagggaggctgattcccttcccctgacttaccactaatttactaggctacctactttcatgagtaacctctcacagctacccagcacatgccacaatcctatgctcttgccttcttttatctgcactgtgtgaagggactcttttaaataaatgagcaagtgtcctaagctatgtcatccaaagattgtcctttccattctcaaatcctgtgactgggatcactcaacagcactgtgatgtattattttcaatgaggtgcctttcttaactgaccaaatgctgccttgtttggcccctaaatcaataaaatatgttaaaatttgtatcccctgttgtggcattttttttagataatctaagctagaaaaatgacattgaattctggacctggctggaaggaaaagaagccctttcttgtcgctggcagctgtgtggtagggaggtccaagtatgtgcatatgagataagcctgcaacctcttgaccttcagctcctatgcaggcttctcttgagcccagagacaaggcagcttggtctagtggagatagcactgtgcttggagttcaggggacctaggacaaatcccagccagttagttattcactgtgctcctgtttcctcagctgaaaaaggaagttggttatgccaccttcttggccttaatggcattaaatgaaatttataggaagaaggtttttgctcagtacctggcatgcaacagacattggataaatgttagttggatccagatatacacagaaagatatctgcttcctgccaggctggataactgttgaatggacacttgtccatagtctagaaagccagtgcttctaatccttaagccagatctttgactaccttttcagttgcttctttaacactctttgttgcttctctgtgtgtcctagtttaaattcatttcctctccagcaaaagtgagcttaaataatttctccaaactaaagctctcatgtttttggaagggctgcctttgcaagtgaggtttctgagaaatgactgttgttcccaaaacaagagggagctgggctggaagcaccactattcttctttaggcatcttgttacagagagaggcagggtcttcactgacatattaaatcctgttccctgaaccagcccctccctcttctgctccacttcctcacctgtgcagagtcattttcaggtgttagccttactgatttgcactgatctgtttgttccctgagctttttaaataccctgtgaaaattttctttcctcccttggtcatcatgcatctaattgtggggaaatgtttgtcaaaccaacctgcaaagcagcatggtgtagttgagaagaataaacagagaagactgggtgagctattgtttgtttgcttctttgggcctgggtttcctcatctaatctgcaaaccaagaatgcagactagtcctaccactcccggaagactgacgttgtgccaggtattatgcaaaggcttcatgtaaccctcgacttcacgtaaccctcacacagcaccctgtggagtcagaactgtccttcacttttataggtgaggaaaccagactcagagaggtgaagtggcattcctgaggtcatgcataagaggcagtcaggactgaaacacagtctctaacacttatccgtccccttgatcttgttgctgaagtgatttaattacttgcgtagctctgcacacaggaagggctgctctgaataagagctcttttccatggacactcagcgctgccggaactgattttgaagaagtcactgccggctctgagggcctagggtatgtgtcttaggatctcctgtgtgcacaaagtgtcactgacagaacacagcaggatggagagcagcctcctcagaagcctcacaagtctttcctcagatgaagacagagcaacgagtcagaagacagatttcaacagcgacttcaccatgcgaccttggacaagttatctcacctcatcagtagaataggaatgatccctacccctcaaaggtgctgatgacactagtgaccaagatactcatgtgggttggactgcccaggacacagcagatgcttagtaaacacagatggaattcagagggaaaatgtaggcattgaagaaagttgtcttactgaccatccggaaccaggctaaggatcccctagaaatcatagacctctgaaattatatgcagaattctttatgtgttttcataattaataatagtctaacatattaaattcttagctgtgtgagaggttctgcatgcattatctcatttattctcctcgataaccctgtggaggtaagtattgctattatctctatggtatgtctgtagactttgagattcagacatctgataatggcagaaccagagcctgagtccaagtctggctccacaccccagcctcttaacactgtgccaattgctttgacactttgctggggagagatgaaatgatctcaaaggcactcatgatacagaaaaggctatgagccatggatccaaacaaaaggagaaactcaagtaggtttgctctgttacagtgaaggacctgccacaggtaagacctttttctattttgccatcctccgttgtttccttattgttggtactaaagttccaatgtgctggatttgcatagctcctggaatcacccgtattccagaaaggctggaggggtgagttatgttgggggaaggagccggttcccatctcttgtcctccacgattatctcctggttctggataaggtggccaggagagggtgtgtatgtaggctgttgagtcacaggcagccgtctcagattgcagctctgtgtagcngatgntgttgcattattcataactccagggggagcagtgtgcttctgatgttttgggaatgcagcagctntgggtttagagtcatccatggcagtgtgatgatgagctgctctcacagagggccccttccaggtgcccagtccagattgaggtgcccccagcagaaaacaggtggaaatggaaagacagagcatcagagggcaagacaacatgggcctagatcctgtgcaggtagccctcaagccaataagccaaacagatctgcactttgggggtaaagttgctatggagcaaataatttgattgtgtggtgttctgtaagggttttgcagacaaattcctctgagcttagctaggagttcattatgcttcctgtttagctggtcttctttcttctactaaataagaaatgcttcatttttggccgagcacggtggctcatgcctgtaatctcagcactttgggaggccggggcatgcggatcacaaggtcaggagtttgagaccagcctggccaacgtggtgaaaccccgtctctactaaagatacaaaaaaatcagctgggcatggtggcgcncacctgtaatcgcaactatttgggagttcgaggcaggagaattgcttgaacccgggaggcggaggttgcagtgagccgagatcgcgccattgcactccagcctgggcaacagggtaaggctccgtctcaaga

SEQ ID NO: 458229 - DNA, 5575 bp, Homo sapiens
  misc_feature (4867)..(4867): n is a, c, g, or t
  misc_feature (4872)..(4872): n is a, c, g, or t
  misc_feature (4937)..(4937): n is a, c, g, or t
  misc_feature (5443)..(5443): n is a, c, g, or t
gcatgttctccaggtgcaggctgaaccctgggacagtgacatttttcatccaagggccttcgtaatagcttaatgtttgaattgaacccctggggttgccagagaattaaaccaggtgaaaggtccttttgaattcagattgtcttctgaacatccaggctgatcatctgagagcagtcaaatctacttccccaaaaagagaccagggtaggtttatttgcttttatttttaatgtttgcctgtgtttccaagtgtgaacaaaacagtgtgtgatctattcttggattcattttgatcagtatttattcaaacccagtctctctccaggacataaaactgaaatcagatatgttctttttaagcccaaaccctctcctttctagatccaaccttcacccctaattttatgatggctatagccatggacttccccaagaaaagatcacccagaaataagaccacctgtgacagttaccagcttttattcataaccttagcttcccaactattgagcattttctaaggtccctgctgtcttttggtctctggtttgatttgtggcaaacagatgaagtaacagactgctatgaaggaccacaaaaacggcagcctctggaaaaaccattagaaagtcagtggcagatccagtaaataatatcgccagcctcagcataatctgctgctgactcgattcagtggactctaaagtgcccagcctcctgacctgagctctcctgccatctgtgagactaccagaggtcttatctgctgtccacatggcaactgggcatgagtacctggccaccttgcttccctctttgcctggtccaagtgagtgtctgctgcctctgtcctgccttgttttcctggctctaaaccaactccacccactcttaatggaaactcagtctggctttgtgtgtttctgggaagcacatgacttctgggaatgggcaaggaagaggagtgaaacaaaaactgtcagctatgtgtgcctggtctgggatccttctctgggtgacagtggcatcatgaatcttagaatcagctcccctttaactagggacaattgtaagcacttggcctcaaagttgaggttcttgaatgtttgctaattttatgtgcatgatccttgcccaaatatttgtcatccgtccacatagattcacgtgtgcatacaacatgtacaagtaatatttgggctgcccataagaactggaagattcatagggaatgcatatacccttctcagtatggttaggattctgtttttgcttcatttaattccagagttcctcagcctcagcaggttctgcttttacctgtcacagaaatgtccagtgtttaatgcatttggttgctggggcttacatgccagcctcctctgatatgtacttggtttttaaaaacccattttgttctctcttgtttcctctctatttccctagtatcagaaggccaggcgagactgcaacactgctcatcaccccgcggcgtgatccctgctcttaggtgctgggcagaggggaagggtggtcagggtgaggatggtgagggagggctggtgaggggctcagaggaatacttggaacaacagcagtgttattgtagtgtggcagtttcttttatacataggtgagagtttttaaagtgtaagggaaaaattaattttttaaaaaacaccatgcttggagggtgggggtagaaatagacacaatattatttctaaggaatcgggttttcatttactctggactggtgaaaatattttttaaagccagtgctctaagacctcagcttttatctcagaaccccatgggttccagaccaagagtacaggaaatcaaattgttgtcctgtctgtctatagcttggaacagggagctttgattactgactccggttccacacactgtaagatcaaaaaaccatctccacatttgaaagagatgtaaggtgtattcatagggatggtggctcaacaaatcaagcaaactggaatcaaggggagggggaagggaatgaaatggaaagggaggctgattcccttcccctgacttaccactaatttactaggctacctactttcatgagtaacctctcacagctacccagcacatgccacaatcctatgctcttgccttcttttatctgcactgtgtgaagggactcttttaaataaatgagcaagtgtcctaagctatgtcatccaaagattgtcctttccattctcaaatcctgtgactgggatcactcaacagcactgtgatgtattattttcaatgaggtgcctttcttaactgaccaaatgctgccttgtttggcccctaaatcaataaaatatgttaaaatttgtatcccctgttgtggcattttttttagataatctaagctagaaaaatgacattgaattctggacctggctggaaggaaaagaagccctttcttgtcgctggcagctgtgtggtagggaggtccaagtatgtgcatatgagataagcctgcaacctcttgaccttcagctcctatgcaggcttctcttgagcccagagacaaggcagcttggtctagtggagatagcactgtgcttggagttcaggggacctaggacaaatcccagccagttagttattcactgtgctcctgtttcctcagctgaaaaaggaagttggttatgccaccttcttggccttaatggcattaaatgaaatttataggaagaaggtttttgctcagtacctggcatgcaacagacattggataaatgttagttggatccagatatacacagaaagatatctgcttcctgccaggctggataactgttgaatggacacttgtccatagtctagaaagccagtgcttctaatccttaagccagatctttgactaccttttcagttgcttctttaacactctttgttgcttctctgtgtgtcctagtttaaattcatttcctctccagcaaaagtgagcttaaataatttctccaaactaaagctctcatgtttttggaagggctgcctttgcaagtgaggtttctgagaaatgactgttgttcccaaaacaagagggagctgggctggaagcaccactattcttctttaggcatcttgttacagagagaggcagggtcttcactgacatattaaatcctgttccctgaaccagcccctccctcttctgctccacttcctcacctgtgcagagtcattttcaggtgttagccttactgatttgcactgatctgtttgttccctgagctttttaaataccctgtgaaaattttctttcctcccttggtcatcatgcatctaattgtggggaaatgtttgtcaaaccaacctgcaaagcagcatggtgtagttgagaagaataaacagagaagactgggtgagctattgtttgtttgcttctttgggcctgggtttcctcatctaatctgcaaaccaagaatgcagactagtcctaccactcccggaagactgacgttgtgccaggtattatgcaaaggcttcatgtaaccctcgacttcacgtaaccctcacacagcaccctgtggagtcagaactgtccttcacttttataggtgaggaaaccagactcagagaggtgaagtggcattcctgaggtcatgcataagaggcagtcaggactgaaacacagtctctaacacttatccgtccccttgatcttgttgctgaagtgatttaattacttgcgtagctctgcacacaggaagggctgctctgaataagagctcttttccatggacactcagcgctgccggaactgattttgaagaagtcactgccggctctgagggcctagggtatgtgtcttaggatctcctgtgtgcacaaagtgtcactgacagaacacagcaggatggagagcagcctcctcagaagcctcacaagtctttcctcagatgaagacagagcaacgagtcagaagacagatttcaacagcgacttcaccatgcgaccttggacaagttatctcacctcatcagtagaataggaatgatccctacccctcaaaggtgctgatgacactagtgaccaagatactcatgtgggttggactgcccaggacacagcagatgcttagtaaacacagatggaattcagagggaaaatgtaggcattgaagaaagttgtcttactgaccatccggaaccaggctaaggatcccctagaaatcatagacctctgaaattatatgcagaattctttatgtgttttcataattaataatagtctaacatattaaattcttagctgtgtgagaggttctgcatgcattatctcatttattctcctcgataaccctgtggaggtaagtattgctattatctctatggtatgtctgtagactttgagattcagacatctgataatggcagaaccagagcctgagtccaagtctggctccacaccccagcctcttaacactgtgccaattgctttgacactttgctggggagagatgaaatgatctcaaaggcactcatgatacagaaaaggctatgagccatggatccaaacaaaaggagaaactcaagtaggtttgctctgttacagtgaaggacctgccacaggtaagacctttttctattttgccatcctccgttgtttccttattgttggtactaaagttccaatgtgctggatttgcatagctcctggaatcacccgtattccagaaaggctggaggggtgagttatgttgggggaaggagccggttcccatctcttgtcctccacgattatctcctggttctggataaggtggccaggagagggtgtgtatgtaggctgttgagtcacaggcagccgtctcagattgcagctctgtgtagcngatgntgttgcattattcataactccagggggagcagtgtgcttctgatgttttgggaatgcagcagctntgggtttagagtcatccatggcagtgtgatgatgagctgctctcacagagggccccttccaggtgcccagtccagattgaggtgcccccagcagaaaacaggtggaaatggaaagacagagcatcagagggcaagacaacatgggcctagatcctgtgcaggtagccctcaagccaataagccaaacagatctgcactttgggggtaaagttgctatggagcaaataatttgattgtgtggtgttctgtaagggttttgcagacaaattcctctgagcttagctaggagttcattatgcttcctgtttagctggtcttctttcttctactaaataagaaatgcttcatttttggccgagcacggtggctcatgcctgtaatctcagcactttgggaggccggggcatgcggatcacaaggtcaggagtttgagaccagcctggccaacgtggtgaaaccccgtctctactaaagatacaaaaaaatcagctgggcatggtggcgcncacctgtaatcgcaactatttgggagttcgaggcaggagaattgcttgaacccgggaggcggaggttgcagtgagccgagatcgcgccattgcactccagcctgggcaacagggtaaggctccgtctcaaga

SEQ ID NO: 458230 - DNA, 3460 bp, Homo sapiens
  misc_feature (27)..(27): n is a, c, g, or t
  misc_feature (47)..(47): n is a, c, g, or t
  misc_feature (86)..(86): n is a, c, g, or t
  misc_feature (163)..(164): n is a, c, g, or t
taaaccgggtgtctttagtcctaaagntcttgactttggcacattcnccagttgagcagcagcctctatgttccacgttcagtaanaattccagtccttcatatcttttgtagctcaccctcaagctctcccgcttcaccatccaatagtttctcccatcacnnccagcaccactagtggtgttggtgagtgatgaaatggtagtggagctcattgagaagaatttggagacccccttgtgcaaaaatggttttcttctggatggcttccctcggactgtgaggcaggcagaaatgctcgatgacctcatggagaagaggaaagagaagcttgattctgtgattgaattcagcatcccagactctctgctgatccgaagaatcacaggaaggctgattcaccccaagagtggccgttcctaccacgaggagttcaaccctccaaaagagcccatgaaagatgacatcaccggggaacccttgatccgtcgatcagatgataatgaaaaggccttgaaaatccgcctgcaagcctaccacactcaaaccaccccactcatagagtactacaggaaacgggggatccactccgccatcgatgcatcccagacccccgatgtcgtgttcgcaagcatcctagcagccttctccaaagccacatcctagtatcagaaggccaggcgagactgcaacactgctcatcaccccgcggcgtgatccctgctcttaggtgctgggcagaggggaagggtggtcagggtgaggatggtgagggagggctggtgaggggctcagaggaatacttggaacaacagcagtgttattgtagtgtggcagtttcttttatacataggtgagagtttttaaagtgtaagggaaaaattaattttttaaaaaacaccatgcttggagggtgggggtagaaatagacacaatattatttctaaggaatcgggttttcatttactctggactggtgaaaatattttttaaagccagtgctctaagacctcagcttttatctcagaaccccatgggttccagaccaagagtacaggaaatcaaattgttgtcctgtctgtctatagcttggaacagggagctttgattactgactccggttccacacactgtaagatcaaaaaaccatctccacatttgaaagagatgtaaggtgtattcatagggatggtggctcaacaaatcaagcaaactggaatcaaggggagggggaagggaatgaaatggaaagggaggctgattcccttcccctgacttaccactaatttactaggctacctactttcatgagtaacctctcacagctacccagcacatgccacaatcctatgctcttgccttcttttatctgcactgtgtgaagggactcttttaaataaatgagcaagtgtcctaagctatgtcatccaaagattgtcctttccattctcaaatcctgtgactgggatcactcaacagcactgtgatgtattattttcaatgaggtgcctttcttaactgaccaaatgctgccttgtttggcccctaaatcaataaaatatgttaaaatttgtatcccctgttgtggcattttttttagataatctaagctagaaaaatgacattgaattctggacctggctggaaggaaaagaagccctttcttgtcgctggcagctgtgtggtagggaggtccaagtatgtgcatatgagataagcctgcaacctcttgaccttcagctcctatgcaggcttctcttgagcccagagacaaggcagcttggtctagtggagatagcactgtgcttggagttcaggggacctaggacaaatcccagccagttagttattcactgtgctcctgtttcctcagctgaatttataggaagaaggtttttgctcagtacctggcatgcaacagacattggataaatgttagttggatccagatatacacagaaagatatctgcttcctgccaggctggataactgttgaatggacacttgtccatagtctagaaagccagtgcttctaatccttaagccagatctttgactaccttttcagttgcttctttaacactctttgttgcttctctgtgtgtcctagtttaaattcatttcctctccagcaaaagtgagcttaaataatttctccaaactaaagctctcatgtttttggaagggctgcctttgcaagtgaggtttctgagaaatgactgttgttcccaaaacaagagggagctgggctggaagcaccactattcttctttaggcatcttgttacagagagaggcagggtcttcactgacatattaaatcctgttccctgaaccagcccctccctcttctgctccacttcctcacctgtgcagagtcattttcaggtgttagccttactgatttgcactgatctgtttgttccctgagctttttaaataccctgtgaaaattttctttcctcccttggtcatcatgcatctaattgtggggaaatgtttgtcaaaccaacctgcaaagcagcatggtgtagttgagaagaataaacagagaagactgggtgagctattgtttgtttgcttctttgggcctgggtttcctcatctaatctgcaaaccaagaatgcagactagtcctaccactcccggaagactgacgttgtgccaggtattatgcaaaggcttcatgtaaccctcgacttcacgtaaccctcacacagcaccctgtggagtcagaactgtccttcacttttataggtgaggaaaccagactcagagaggtgaagtggcattcctgaggtcatgcataagaggcagtcaggactgaaacacagtctctaacacttatccgtccccttgatcttgttgctgaagtgatttaattacttgcgtagctctgcacacaggaagggctgctctgaataagagctcttttccatggacactcagcgctgccggaactgattttgaagaagtcactgccggctctgagggcctagggtatgtgtcttaggatctcctgtgtgcacaaagtgtcactgacagaacacagcaggatggagagcagcctcctcagaagcctcacaagtctttcctcagatgaagacagagcaacgagtcagaagacagatttcaacagcgacttcaccatgcgaccttggacaagttatctcacctcatcagtagaataggaatgatccctacccctcaaaggtgctgatgacactagtgaccaagatactcatgtgggttggactgcccaggacacagcagatgcttagtaaacacagatggaattcagagggaaaatgtaggcattgaagaaagttgtcttactgaccatccggaaccaggctaaggatcccctagaaatcatagacctctgaaattatatgcagaattctttatgtgttttcataattaataatagtctaacatattaaattcttagctgtgtgaga

SEQ ID NO: 458231 - DNA, 2937 bp, Homo sapiens
ttcaacggtatcgataagcttgatcagacagccggacccccgatgtcgtgttcgcaagcatcctagcagccttctccaaagccacatcctagtatcagaaggccaggcgagactgcaacactgctcatcaccccgcggcgtgatccctgctcttaggtgctgggcagaggggaagggtggtcagggtgaggatggtgagggagggctggtgaggggctcagaggaatacttggaacaacagcagtgttattgtagtgtggcagtttcttttatacataggtgagagtttttaaagtgtaagggaaaaattaattttttaaaaaacaccatgcttggagggtgggggtagaaatagacacaatattatttctaaggaatcgggttttcatttactctggactggtgaaaatattttttaaagccagtgctctaagacctcagcttttatctcagaaccccatgggttccagaccaagagtacaggaaatcaaattgttgtcctgtctgtctatagcttggaacagggagctttgattactgactccggttccacacactgtaagatcaaaaaaccatctccacatttgaaagagatgtaaggtgtattcatagggatggtggctcaacaaatcaagcaaactggaatcaaggggagggggaagggaatgaaatggaaagggaggctgattcccttcccctgacttaccactaatttactaggctacctactttcatgagtaacctctcacagctacccagcacatgccacaatcctatgctcttgccttcttttatctgcactgtgtgaagggactcttttaaataaatgagcaagtgtcctaagctatgtcatccaaagattgtcctttccattctcaaatcctgtgactgggatcactcaacagcactgtgatgtattattttcaatgaggtgcctttcttaactgaccaaatgctgccttgtttggcccctaaatcaataaaatatgttaaaatttgtatcccctgttgtggcattttttttagataatctaagctagaaaaatgacattgaattctggacctggctggaaggaaaagaagccctttcttgtcgctggcagctgtgtggtagggaggtccaagtatgtgcatatgagataagcctgcaacctcttgaccttcagctcctatgcaggcttctcttgagcccagagacaaggcagcttggtctagtggagatagcactgtgcttggagttcaggggacctaggacaaatcccagccagttagttattcactgtgctcctgtttcctcagctgaaaaaggaagttggttatgccaccttcttggccttaatggcattaaatgaaatttataggaagaaggtttttgctcagtacctggcatgcaacagacattggataaatgttagttggatccagatatacacagaaagatatctgcttcctgccaggctggataactgttgaatggacacttgtccatagtctagaaagccagtgcttctaatccttaagccagatctttgactaccttttcagttgcttctttaacactctttgttgcttctctgtgtgtcctagtttaaattcatttcctctccagcaaaagtgagcttaaataatttctccaaactaaagctctcatgtttttggaagggctgcctttgcaagtgaggtttctgagaaatgactgttgttcccaaaacaagagggagctgggctggaagcaccactattcttctttaggcatcttgttacagagagaggcagggtcttcactgacatattaaatcctgttccctgaaccagcccctccctcttctgctccacttcctcacctgtgcagagtcattttcaggtgttagccttactgatttgcactgatctgtttgttccctgagctttttaaataccctgtgaaaattttctttcctcccttggtcatcatgcatctaattgtggggaaatgtttgtcaaaccaacctgcaaagcagcatggtgtagttgagaagaataaacagagaagactgggtgagctattgtttgtttgcttctttgggcctgggtttcctcatctaatctgcaaaccaagaatgcagactagtcctaccactcccggaagactgacgttgtgccaggtattatgcaaaggcttcatgtaaccctcgacttcacgtaaccctcacacagcaccctgtggagtcagaactgtccttcacttttataggtgaggaaaccagactcagagaggtgaagtggcattcctgaggtcatgcataagaggcagtcaggactgaaacacagtctctaacacttatccgtccccttgatcttgttgctgaagtgatttaattacttgcgtagctctgcacacaggaagggctgctctgaataagagctcttttccatggacactcagcgctgccggaactgattttgaagaagtcactgccggctctgagggcctagggtatgtgtcttaggatctcctgtgtgcacaaagtgtcactgacagaacacagcaggatggagagcagcctcctcagaagcctcacaagtctttcctcagatgaagacagagcaacgagtcagaagacagatttcaacagcgacttcaccatgcgaccttggacaagttatctcacctcatcagtagaataggaatgatccctacccctcaaaggtgctgatgacactagtgaccaagatactcatgtgggttggactgcccaggacacagcagatgcttagtaaacacagatggaattcagagggaaaatgtaggcattgaagaaagttgtcttactgaccatccggaaccaggctaaggatcccctagaaatcatagacctctgaaattatatgcagaattctttatgtgttttcataattaataatagtctaacatattaaattcttagctgtgtgaga

SEQ ID NO: 458232 - DNA, 3819 bp, Homo sapiens
  misc_feature (27)..(27): n is a, c, g, or t
  misc_feature (47)..(47): n is a, c, g, or t
  misc_feature (86)..(86): n is a, c, g, or t
  misc_feature (163)..(164): n is a, c, g, or t
taaaccgggtgtctttagtcctaaagntcttgactttggcacattcnccagttgagcagcagcctctatgttccacgttcagtaanaattccagtccttcatatcttttgtagctcaccctcaagctctcccgcttcaccatccaatagtttctcccatcacnnccagcaccactagtggtgttggtgagtgatgaaatggtagtggagctcattgagaagaatttggagacccccttgtgcaaaaatggttttcttctggatggcttccctcggactgtgaggcaggcagaaatgctcgatgacctcatggagaagaggaaagagaagcttgattctgtgattgaattcagcatcccagactctctgctgatccgaagaatcacaggaaggctgattcaccccaagagtggccgttcctaccacgaggagttcaaccctccaaaagagcccatgaaagatgacatcaccggggaacccttgatccgtcgatcagatgataatgaaaaggccttgaaaatccgcctgcaagcctaccacactcaaaccaccccactcatagagtactacaggaaacgggggatccactccgccatcgatgcatcccagacccccgatgtcgtgttcgcaagcatcctagcagccttctccaaagccacatgctgatcatctgagagcagtcaaatctacttccccaaaaagagaccaggaagtaacagactgctatgaaggaccacaaaaacggcagcctctggaaaaaccattagaaagtcagtggcagatccagtaaataatatcgccagcctcagcataatctgctgctgactcgattcagtggactctaaagtgcccagcctcctgacctgagctctcctgccatctgtgagactaccagaggtcttatctgctgtccacatggcaactgggcatgagtacctggccaccttgcttccctctttgcctggtccaacctagtatcagaaggccaggcgagactgcaacactgctcatcaccccgcggcgtgatccctgctcttaggtgctgggcagaggggaagggtggtcagggtgaggatggtgagggagggctggtgaggggctcagaggaatacttggaacaacagcagtgttattgtagtgtggcagtttcttttatacataggtgagagtttttaaagtgtaagggaaaaattaattttttaaaaaacaccatgcttggagggtgggggtagaaatagacacaatattatttctaaggaatcgggttttcatttactctggactggtgaaaatattttttaaagccagtgctctaagacctcagcttttatctcagaaccccatgggttccagaccaagagtacaggaaatcaaattgttgtcctgtctgtctatagcttggaacagggagctttgattactgactccggttccacacactgtaagatcaaaaaaccatctccacatttgaaagagatgtaaggtgtattcatagggatggtggctcaacaaatcaagcaaactggaatcaaggggagggggaagggaatgaaatggaaagggaggctgattcccttcccctgacttaccactaatttactaggctacctactttcatgagtaacctctcacagctacccagcacatgccacaatcctatgctcttgccttcttttatctgcactgtgtgaagggactcttttaaataaatgagcaagtgtcctaagctatgtcatccaaagattgtcctttccattctcaaatcctgtgactgggatcactcaacagcactgtgatgtattattttcaatgaggtgcctttcttaactgaccaaatgctgccttgtttggcccctaaatcaataaaatatgttaaaatttgtatcccctgttgtggcattttttttagataatctaagctagaaaaatgacattgaattctggacctggctggaaggaaaagaagccctttcttgtcgctggcagctgtgtggtagggaggtccaagtatgtgcatatgagataagcctgcaacctcttgaccttcagctcctatgcaggcttctcttgagcccagagacaaggcagcttggtctagtggagatagcactgtgcttggagttcaggggacctaggacaaatcccagccagttagttattcactgtgctcctgtttcctcagctgaaaaaggaagttggttatgccaccttcttggccttaatggcattaaatgaaatttataggaagaaggtttttgctcagtacctggcatgcaacagacattggataaatgttagttggatccagatatacacagaaagatatctgcttcctgccaggctggataactgttgaatggacacttgtccatagtctagaaagccagtgcttctaatccttaagccagatctttgactaccttttcagttgcttctttaacactctttgttgcttctctgtgtgtcctagtttaaattcatttcctctccagcaaaagtgagcttaaataatttctccaaactaaagctctcatgtttttggaagggctgcctttgcaagtgaggtttctgagaaatgactgttgttcccaaaacaagagggagctgggctggaagcaccactattcttctttaggcatcttgttacagagagaggcagggtcttcactgacatattaaatcctgttccctgaaccagcccctccctcttctgctccacttcctcacctgtgcagagtcattttcaggtgttagccttactgatttgcactgatctgtttgttccctgagctttttaaataccctgtgaaaattttctttcctcccttggtcatcatgcatctaattgtggggaaatgtttgtcaaaccaacctgcaaagcagcatggtgtagttgagaagaataaacagagaagactgggtgagctattgtttgtttgcttctttgggcctgggtttcctcatctaatctgcaaaccaagaatgcagactagtcctaccactcccggaagactgacgttgtgccaggtattatgcaaaggcttcatgtaaccctcgacttcacgtaaccctcacacagcaccctgtggagtcagaactgtccttcacttttataggtgaggaaaccagactcagagaggtgaagtggcattcctgaggtcatgcataagaggcagtcaggactgaaacacagtctctaacacttatccgtccccttgatcttgttgctgaagtgatttaattacttgcgtagctctgcacacaggaagggctgctctgaataagagctcttttccatggacactcagcgctgccggaactgattttgaagaagtcactgccggctctgagggcctagggtatgtgtcttaggatctcctgtgtgcacaaagtgtcactgacagaacacagcaggatggagagcagcctcctcagaagcctcacaagtctttcctcagatgaagacagagcaacgagtcagaagacagatttcaacagcgacttcaccatgcgaccttggacaagttatctcacctcatcagtagaataggaatgatccctacccctcaaaggtgctgatgacactagtgaccaagatactcatgtgggttggactgcccaggacacagcagatgcttagtaaacacagatggaattcagagggaaaatgtaggcattgaagaaagttgtcttactgaccatccggaaccaggctaaggatcccctagaaatcatagacctctgaaattatatgcagaattctttatgtgttttcataattaataatagtctaacatattaaattcttagctgtgtgaga

SEQ ID NO: 458233 - DNA, 2283 bp, Homo sapiens
  misc_feature (27)..(27): n is a, c, g, or t
  misc_feature (47)..(47): n is a, c, g, or t
  misc_feature (86)..(86): n is a, c, g, or t
  misc_feature (163)..(164): n is a, c, g, or t
taaaccgggtgtctttagtcctaaagntcttgactttggcacattcnccagttgagcagcagcctctatgttccacgttcagtaanaattccagtccttcatatcttttgtagctcaccctcaagctctcccgcttcaccatccaatagtttctcccatcacnnccagcaccactagtggtgttggtgagtgatgaaatggtagtggagctcattgagaagaatttggagacccccttgtgcaaaaatggttttcttctggatggcttccctcggactgtgaggcaggcagaaatgctcgatgacctcatggagaagaggaaagagaagcttgattctgtgattgaattcagcatcccagactctctgctgatccgaagaatcacaggaaggctgattcaccccaagagtggccgttcctaccacgaggagttcaaccctccaaaagagcccatgaaagatgacatcaccggggaacccttgatccgtcgatcagatgataatgaaaaggccttgaaaatccgcctgcaagcctaccacactcaaaccaccccactcatagagtactacaggaaacgggggatccactccgccatcgatgcatcccagacccccgatgtcgtgttcgcaagcatcctagcagccttctccaaagccacatcctagtatcagaaggccaggcgagactgcaacactgctcatcaccccgcggcgtgatccctgctcttaggtgctgggcagaggggaagggtggtcagggtgaggatggtgagggagggctggtgaggggctcagaggaatacttggaacaacagcagtgttattgtagtgtggcagtttcttttatacataggtgagagtttttaaagtgtaagggaaaaattaattttttaaaaaacaccatgcttggagggtgggggtagaaatagacacaatattatttctaaggaatcgggttttcatttactctggactggtgaaaatattttttaaagccagtgctctaagacctcagcttttatctcagaaccccatgggttccagaccaagagtacaggaaatcaaattgttgtcctgtctgtctatagcttggaacagggagctttgattactgactccggttccacacactgtaagatcaaaaaaccatctccacatttgaaagagatgtaaggtgtattcatagggatggtggctcaacaaatcaagcaaactggaatcaaggggagggggaagggaatgaaatggaaagggaggctgattcccttcccctgacttaccactaatttactaggctacctactttcatgagtaacctctcacagctacccagcacatgccacaatcctatgctcttgccttcttttatctgcactgtgtgaagggactcttttaaataaatgagcaagtgtcctaagctatgtcatccaaagattgtcctttccattctcaaatcctgtgactgggatcactcaacagcactgtgatgtattattttcaatgaggtgcctttcttaactgaccaaatgctgccttgtttggcccctaaatcaataaaatatgttaaaatttgtatcccctgttgtggcattttttttagataatctaagctagaaaaatgacattgaattctggacctggctggaaggaaaagaagccctttcttgtcgctggcagctgtgtggtagggaggtccaagtatgtgcatatgagataagcctgcaacctcttgaccttcagctcctatgcaggcttctcttgagcccagagacaaggcagcttggtctagtggagatagcactgtgcttggagttcaggggacctaggacaaatcccagccagttagttattcactgtgctcctgtttcctcagctgaaaaaggaagttggttatgccaccttcttggccttaatggcattaaatgaaatttataggaagaaggtttttgctcagtacctggcatgcaacagacattggataaatgttagttggatccagatatacacagaaagatatctgcttcctgccaggctggataactgttgaatggacacttgtccatagtctagaaagccagtgcttctaatccttaagccagatctttgactaccttttcagttgcttctttaacactctttgttgcttccctgagctttttaaataccctgtgaaaattttctttcctcccttggtcatcatgcatctaattgtggggaaatgtttgtcaaaccaacctgcaaagcagcatggtgtagttgagaagaataaacagagaagactggg

SEQ ID NO: 458234 - DNA, 2446 bp, Homo sapiens
  misc_feature (27)..(27): n is a, c, g, or t
  misc_feature (47)..(47): n is a, c, g, or t
  misc_feature (86)..(86): n is a, c, g, or t
  misc_feature (163)..(164): n is a, c, g, or t
taaaccgggtgtctttagtcctaaagntcttgactttggcacattcnccagttgagcagcagcctctatgttccacgttcagtaanaattccagtccttcatatcttttgtagctcaccctcaagctctcccgcttcaccatccaatagtttctcccatcacnnccagcaccactagtggtgttggtgagtgatgaaatggtagtggagctcattgagaagaatttggagacccccttgtgcaaaaatggttttcttctggatggcttccctcggactgtgaggcaggcagaaatgctcgatgacctcatggagaagaggaaagagaagcttgattctgtgattgaattcagcatcccagactctctgctgatccgaagaatcacaggaaggctgattcaccccaagagtggccgttcctaccacgaggagttcaaccctccaaaagagcccatgaaagatgacatcaccggggaacccttgatccgtcgatcagatgataatgaaaaggccttgaaaatccgcctgcaagcctaccacactcaaaccaccccactcatagagtactacaggaaacgggggatccactccgccatcgatgcatcccagacccccgatgtcgtgttcgcaagcatcctagcagccttctccaaagccacatcctagtatcagaaggccaggcgagactgcaacactgctcatcaccccgcggcgtgatccctgctcttaggtgctgggcagaggggaagggtggtcagggtgaggatggtgagggagggctggtgaggggctcagaggaatacttggaacaacagcagtgttattgtagtgtggcagtttcttttatacataggtgagagtttttaaagtgtaagggaaaaattaattttttaaaaaacaccatgcttggagggtgggggtagaaatagacacaatattatttctaaggaatcgggttttcatttactctggactggtgaaaatattttttaaagccagtgctctaagacctcagcttttatctcagaaccccatgggttccagaccaagagtacaggaaatcaaattgttgtcctgtctgtctatagcttggaacagggagctttgattactgactccggttccacacactgtaagatcaaaaaaccatctccacatttgaaagagatgtaaggtgtattcatagggatggtggctcaacaaatcaagcaaactggaatcaaggggagggggaagggaatgaaatggaaagggaggctgattcccttcccctgacttaccactaatttactaggctacctactttcatgagtaacctctcacagctacccagcacatgccacaatcctatgctcttgccttcttttatctgcactgtgtgaagggactcttttaaataaatgagcaagtgtcctaagctatgtcatccaaagattgtcctttccattctcaaatcctgtgactgggatcactcaacagcactgtgatgtattattttcaatgaggtgcctttcttaactgaccaaatgctgccttgtttggcccctaaatcaataaaatatgttaaaatttgtatcccctgttgtggcattttttttagataatctaagctagaaaaatgacattgaattctggacctggctggaaggaaaagaagccctttcttgtcgctggcagctgtgtggtagggaggtccaagtatgtgcatatgagataagcctgcaacctcttgaccttcagctcctatgcaggcttctcttgagcccagagacaaggcagcttggtctagtggagatagcactgtgcttggagttcaggggacctaggacaaatcccagccagttagttattcactgtgctcctgtttcctcagctgaaaaaggaagttggttatgccaccttcttggccttaatggcattaaatgaatgttgaatggacacttgtccatagtctagaaagccagtgcttctaatccttaagccagatctttgactaccttttcagttgcttctttaacactctttgttgcttctctgtgtgtcctagtttaaattcatttcctctccagcaaaagtgagcttaaataatttctccaaactaaagctctcatgtttttggaagggctgcctttgcaagtgaggtttctgagaaatgactgttgttcccaaaacaagagggagctgggctggaagcaccaatattaaatcctgttccctgaaccagcccctccctcttctgctccacttcctcacctgtgcagagtcattttcaggtgttagccttactgatttgcactgatctgtttgttccctgagctttttaaataccctgtgaaaattttctttcctcccttggtcatcatgcatctaattgtggggaaatgtttgtcaaaccaacctgcaaagcagcatggtgtagttgagaagaataaacagagaagactggg

SEQ ID NO: 458235 - DNA, 1572 bp, Homo sapiens
  misc_feature (27)..(27): n is a, c, g, or t
  misc_feature (47)..(47): n is a, c, g, or t
  misc_feature (86)..(86): n is a, c, g, or t
  misc_feature (163)..(164): n is a, c, g, or t
taaaccgggtgtctttagtcctaaagntcttgactttggcacattcnccagttgagcagcagcctctatgttccacgttcagtaanaattccagtccttcatatcttttgtagctcaccctcaagctctcccgcttcaccatccaatagtttctcccatcacnnccagcaccactagtggtgttggtgagtgatgaaatggtagtggagctcattgagaagaatttggagacccccttgtgcaaaaatggttttcttctggatggcttccctcggactgtgaggcaggcagaaatgctcgatgacctcatggagaagaggaaagagaagcttgattctgtgattgaattcagcatcccagactctctgctgatccgaagaatcacaggaaggctgattcaccccaagagtggccgttcctaccacgaggagttcaaccctccaaaagagcccatgaaagatgacatcaccggggaacccttgatccgtcgatcagatgataatgaaaaggccttgaaaatccgcctgcaagcctaccacactcaaaccaccccactcatagagtactacaggaaacgggggatccactccgccatcgatgcatcccagacccccgatgtcgtgttcgcaagcatcctagcagccttctccaaagccacatcctagtatcagaaggccaggcgagactgcaacactgctcatcaccccgcggcgtgatccctgctcttaggtgctgggcagaggggaagggtggtcagggtgaggatggtgagggagggctggtgaggggctcagaggaatacttggaacaacagcagtgttattgtagtgtggcagtttcttttatacataggtgagagtttttaaagtgtaagggaaaaattaattttttaaaaaacaccatgcttggagggtgggggtagaaatagacacaatattatttctaaggaatcgggttttcatttactctggactggtgaaaatattttttaaagccagtgctctaagacctcagcttttatctcagaaccccatgggttccagaccaagagtacaggaaatcaaattgttgtcctgtctgtctatagcttggaacagggagctttgattactgactccggttccacacactgtaagatcaaaaaaccatctccacatttgaaagagatgtaaggtgtattcatagggatggtggctcaacaaatcaagcaaactggaatcaaggggagggggaagggaatgaaatggaaagggaggctgattcccttcccctgacttaccactaatttactaggctacctactttcatgagtaacctctcacagctacccagcacatgccacaatcctatgctcttgccttcttttatctgcactgtgtgaagggactcttttaaataaatgagcaagtgtcctaagctatgtcatccaaagattgtcctttccattctcaaatcctgtgactgggatcactcaacagcactgtgatgtattattttcaatgaggtgcctttcttaactgaccaaatgctgccttgtttggcccctaaatcaataaaatatgttaaaatttg

SEQ ID NO: 458236 - DNA, 1034 bp, Homo sapiens
gagtccgtcgtgctcaggggcgggcggaacgggctgacggacgcggctatgggccagtgtgagcggcgagtgggacgtgcgtggcgtgcgtgcgttgacctgggaagcactggacctgtgaggcgtgcgaactggtggcagtgagagacttcggcggacatggctcccagcgtgccagcggcagaacccgagtatcctaaaggcatccgggccgtgctgctggggcctcccggggccggtaaagggacccaggcacccagattggctgaaaacttctgtgtctgccatttagctactggggacatgctgagggccatggtggcttctggctcagagctaggaaaaaagctgaaggcaactatggatgctgggaaactggtgagtgatgaaatggtagtggagctcattgagaagaatttggagacccccttgtgcaaaaatggttttcttctggatggcttccctcggactgtgaggcaggcagaaatgctcgatgacctcatggagaagaggaaagagaagcttgattctgtgattgaattcagcatcccagactctctgctgatccgaagaatcacaggaaggctgattcaccccaagagtggccgttcctaccacgaggagttcaaccctccaaaagagcccatgaaagatgaccgtatgtaaactcaggacaaaaaatttccttttctttccttcccctttcttcactgtttttctttttcctttattctttccatcttccttttatttctaccaatattactaacttagtcatgaaaaataacactatcaagtaaatcacatggcctgtgtcagatctattcagtgtctcctcaggtggtttattgcttggcctcaaggttgcttccagtggtgctagctttttgcagtgcccagattgtacctgtcttctgtcaagagcagccccttttctggcatcatggccacctaagtgatcagctaatcaggagaagctttcttaaaagcctacaattggagagtgggaagagtgtggcactgaagagaagttt

SEQ ID NO: 458237 - DNA, 3746 bp, Homo sapiens
  misc_feature (27)..(27): n is a, c, g, or t
  misc_feature (47)..(47): n is a, c, g, or t
  misc_feature (86)..(86): n is a, c, g, or t
  misc_feature (163)..(164): n is a, c, g, or t
taaaccgggtgtctttagtcctaaagntcttgactttggcacattcnccagttgagcagcagcctctatgttccacgttcagtaanaattccagtccttcatatcttttgtagctcaccctcaagctctcccgcttcaccatccaatagtttctcccatcacnnccagcaccactagtggtgttggtgagtgatgaaatggtagtggagctcattgagaagaatttggagacccccttgtgcaaaaatggttttcttctggatggcttccctcggactgtgaggcaggcagaaatgctcgatgacctcatggagaagaggaaagagaagcttgattctgtgattgaattcagcatcccagactctctgctgatccgaagaatcacaggaaggctgattcaccccaagagtggccgttcctaccacgaggagttcaaccctccaaaagagcccatgaaagatgacatcaccggggaacccttgatccgtcgatcagatgataatgaaaaggccttgaaaatccgcctgcaagcctaccacactcaaaccaccccactcatagagtactacaggaaacgggggatccactccgccatcgatgcatcccagacccccgatgtcgtgttcgcaagcatcctagcagccttctccaaagccacatgtaaagacttggttatgtttatctaatgttgggtccaagaaggaatttctttccatccctgtgaggcaatgggtgggaatgataggacaggcaaagagaagcttcctcaggctagcaaaaatatcatttgatgtattgattaaaaaagcacttgcttgatgtatctttggcgtgtgtgctactctcatctgtgtgtatgtgtgttgtgtgtgtgtgtgtgtgcatgcacatatgtgttcactctgctactttgtaagttttaggctaggttgctttaccagctgtttacttcttttttgttgttgttttgagacaaggtttcgctctgccaccctggctggagtgcagtggcgtgatcttggctcacggcaacctctgcctcctggggctcaagcaattatcccacctcagcctcctgagcagctgggactacaggtgcatgccacaacacctggctgatatttgtattttttgtagagacaggattttgccaagttgcccaggctggtcttgaactcctaggcttaagcaatccacccaccttggcctcctgaagtgccaggatcacagacgtgagccactacacccagcccagctgtttacttctttaaccatacttttgattttattttttgaccaaaatgaactaacccaggtaatcttccagggaccgcaattccagaacctcatagtatttcttccatttccagcagctgattagaagtccaggatcatgtgaagtcaggcagggtcacagttcctgatggcacattatggacagagaattccattttgttttctaacccatgatgaaaacccacgtgagtcagtgtgtgaacagggatcattaattttttccccctaggtggaaggaaaaaggcacttactttgcaggttacagaaattactgggagaggatatcgtcataaaaagagccaggccaaattggaatatttttgtgatctgcatcatgatgctgaaaatagcaattatttgggaattgggtttgaaaactgaattgttgccagagaattaaaccaggtgaaaggtccttttgaattcagattgtcttctgaacatccaggctgatcatctgagagcagtcaaatctacttccccaaaaagagaccagggtaggtttatttgcttttatttttaatgtttgcctgtgtttccaagtgtgaacaaaacagtgtgtgatctattcttggattcattttgatcagtatttattcaaacccagtctctctccaggacataaaactgaaatcagatatgttctttttaagcccaaaccctctcctttctagatccaaccttcacccctaattttatgatggctatagccatggacttccccaagaaaagatcacccagaaataagaccacctgtgacagttaccagcttttattcataaccttagcttcccaactattgagcattttctaaggtccctgctgtcttttggtctctggtttgatttgtggcaaacagatgaagtaacagactgctatgaaggaccacaaaaacggcagcctctggaaaaaccattagaaagtcagtggcagatccagtaaataatatcgccagcctcagcataatctgctgctgactcgattcagtggactctaaagtgcccagcctcctgacctgagctctcctgccatctgtgagactaccagaggtcttatctgctgtccacatggcaactgggcatgagtacctggccaccttgcttccctctttgcctggtccaagtgagtgtctgctgcctctgtcctgccttgttttcctggctctaaaccaactccacccactcttaatggaaactcagtctggctttgtgtgtttctgggaagcacatgacttctgggaatgggcaaggaagaggagtgaaacaaaaactgtcagctatgtgtgcctggtctgggatccttctctgggtgacagtggcatcatgaatcttagaatcagctcccctttaactagggacaattgtaagcacttggcctcaaagttgaggttcttgaatgtttgctaattttatgtgcatgatccttgcccaaatatttgtcatccgtccacatagattcacgtgtgcatacaacatgtacaagtaatatttgggctgcccataagaactggaagattcatagggaatgcatatacccttctcagtatggttaggattctgtttttgcttcatttaattccagagttcctcagcctcagcaggttctgcttttacctgtcacagaaatgtccagtgtttaatgcatttggttgctggggcttacatgccagcctcctctgatatgtacttggtttttaaaaacccattttgttctctcttgtttcctctctatttccctagtatcagaaggccaggcgagactgcaacactgctcatcaccccgcggcgtgatccctgctcttaggtgctgggcagaggggaagggtggtcagggtgaggatggtgagggagggctggtgaggggctcagaggaatacttggaacaacagcagtgttattgtagtgtggcagtttcttttatacataggtgagagtttttaaagtgtaagggaaaaattaattttttaaaaaacaccatgcttggagggtgggggtagaaatagacacaatattatttctaaggaatcgggttttcatttactctggactggtgaaaatattttttaaagccagtgctctaagacctcagcttttatctcagaaccccatgggttccagaccaagagtacaggaaatcaaattgttgtcctgtctgtctatagcttggaacagggagctttgattactgactccggttccacacactgtaagatcaaaaaaccatctccacatttgaaagagatgtaaggtgtattcatagggatggtggctcaacaaatcaagcaaatgtcctaagctatgtcatccaaagattgtcctttccattctcaaatcctgtgactgggatcactcaacagcactgtgatgtattattttcaatgaggtgcctttcttaactgaccaaatgctgccttgtttggcccctaaatcaataaaatatgttaaaatttg

SEQ ID NO: 458238 - DNA, 793 bp, Homo sapiens
  misc_feature (27)..(27): n is a, c, g, or t
  misc_feature (47)..(47): n is a, c, g, or t
  misc_feature (86)..(86): n is a, c, g, or t
  misc_feature (163)..(164): n is a, c, g, or t
taaaccgggtgtctttagtcctaaagntcttgactttggcacattcnccagttgagcagcagcctctatgttccacgttcagtaanaattccagtccttcatatcttttgtagctcaccctcaagctctcccgcttcaccatccaatagtttctcccatcacnnccagcaccactagtggtgttggtgagtgatgaaatggtagtggagctcattgagaagaatttggagacccccttgtgcaaaaatggttttcttctggatggcttccctcggactgtgaggcaggcagaaatgctcgatgacctcatggagaagaggaaagagaagcttgattctgtgattgaattcagcatcccagactctctgctgatccgaagaatcacaggaaggctgattcaccccaagagtggccgttcctaccacgaggagttcaaccctccaaaagagcccatgaaagatgacatgataatgaaaaggccttgaaaatccgcctgcaagcctaccacactcaaaccaccccactcatagagtactacaggaaacgggggatccactccgccatcgatgcatcccagacccccgatgtcgtgttcgcaagcatcctagcagccttctccaaagccacatgtaaagacttggttatgtttatctaatgttgggtccaagaaggaatttctttccatccctgtgaggcaatgggtgggaatgataggacaggcaaagagaagcttcctcaggctagcaaaaatatcatttgatgtattgattaaaaaagcacttgcttgatgtat

SEQ ID NO: 458239 - DNA, 746 bp, Homo sapiens
  misc_feature (27)..(27): n is a, c, g, or t
  misc_feature (47)..(47): n is a, c, g, or t
  misc_feature (86)..(86): n is a, c, g, or t
  misc_feature (163)..(164): n is a, c, g, or t
taaaccgggtgtctttagtcctaaagntcttgactttggcacattcnccagttgagcagcagcctctatgttccacgttcagtaanaattccagtccttcatatcttttgtagctcaccctcaagctctcccgcttcaccatccaatagtttctcccatcacnnccagcaccactagtggtgttggtgagtgatgaaatggtagtggagctcattgagaagaatttggagacccccttgtgcaaaaatggttttcttctggatggcttccctcggactgtgaggcaggcagaaatggctgattcaccccaagagtggccgttcctaccacgaggagttcaaccctccaaaagagcccatgaaagatgaccgtatgtaaactcaggacaaaaaatttccttttctttccttcccctttcttcactgtttttctttttcctttattctttccatcttccttttatttctaccaatattactaacttagtcatgaaaaataacactatcaagtaaatcacatggcctgtgtcagatctattcagtgtctcctcaggtggtttattgcttggcctcaaggttgcttccagtggtgctagctttttgcagtgcccagattgtacctgtcttctgtcaagagcagccccttttctggcatcatggccacctaagtgatcagctaatcaggagaagctttcttaaaagcctacaattggagagtgggaagagtgtggcactgaagagaagttt

SEQ ID NO: 458240 - DNA, 1765 bp, Homo sapiens
gagtccgtcgtgctcaggggcgggcggaacgggctgacggacgcggctatgggccagtgtgagcggcgagtgggacgtgcgtggcgtgcgtgcgttgacctgggaagcactggacctgtgaggcgtgcgaactggtggcagtgagagacttcggcggacatggctcccagcgtgccagcggcagaacccgagtatcctaaaggcatccgggccgtgctgctggggcctcccggggccggtaaagggacccaggcacccagattggctgaaaacttctgtgtctgccatttagctactggggacatgctgagggccatggtggcttctggctcagagctaggaaaaaagctgaaggcaactatggatgctgggaaactggtgagtgatgaaatggtagtggagctcattgagaagaatttggagacccccttgtgcaaaaatggttttcttctggatggcttccctcggactgtgaggcaggcagaaatgctcgatgacctcatggagaagaggaaagagaagcttgattctgtgattgaattcagcatcccagactctctgctgatccgaagaatcacaggaaggctgattcaccccaagagtggccgttcctaccacgaggagttcaaccctccaaaagagcccatgaaagatgacatcaccggggaacccttgatccgtcgatcagatgataatgaaaaggccttgaaaatccgcctgcaagcctaccacactcaaaccaccccactcatagagtactacaggaaacgggggatccactccgccatcgatgcatcccagacccccgatgtcgtgttcgcaagcatcctagcagccttctccaaagccacatcctagtatcagaaggccaggcgagactgcaacactgctcatcaccccgcggcgtgatccctgctcttaggtgctgggcagaggggaagggtggtcagggtgaggatggtgagggagggctggtgaggggctcagaggaatacttggaacaacagcagtgttattgtagtgtggcagtttcttttatacataggtgagagtttttaaagtgtaagggaaaaattaattttttaaaaaacaccatgcttggagggtgggggtagaaatagacacaatattatttctaaggaatcgggttttcatttactctggactggtgaaaatattttttaaagccagtgctctaagacctcagcttttatctcagaaccccatgggttccagaccaagagtacaggaaatcaaattgttgtcctgtctgtctatagcttggaacagggagctttgattactgactccggttccacacactgtaagatcaaaaaaccatctccacatttgaaagagatgtaaggtgtattcatagggatggtggctcaacaaatcaagcaaactggaatcaaggggagggggaagggaatgaaatggaaagggaggctgattcccttcccctgacttaccactaatttactaggctacctactttcatgagtaacctctcacagctacccagcacatgccacaatcctatgctcttgccttcttttatctgcactgtgtgaagggactcttttaaataaatgagcaagtgtcctaagctatgtcatccaaagattgtcctttccattctcaaatcctgtgactgggatcactcaacagcactgtgatgtattattttcaatgaggtgcctttcttaactgaccaaatgctgccttgtttggcccctaaatcaataaaatatgttaaaatttg

SEQ ID NO: 458241 - DNA, 3510 bp, Homo sapiens
  misc_feature (27)..(27): n is a, c, g, or t
  misc_feature (47)..(47): n is a, c, g, or t
  misc_feature (86)..(86): n is a, c, g, or t
  misc_feature (163)..(164): n is a, c, g, or t
taaaccgggtgtctttagtcctaaagntcttgactttggcacattcnccagttgagcagcagcctctatgttccacgttcagtaanaattccagtccttcatatcttttgtagctcaccctcaagctctcccgcttcaccatccaatagtttctcccatcacnnccagcaccactagtggtgttggtgagtgatgaaatggtagtggagctcattgagaagaatttggagacccccttgtgcaaaaatggttttcttctggatggcttccctcggactgtgaggcaggcagaaatgctcgatgacctcatggagaagaggaaagagaagcttgattctgtgattgaattcagcatcccagactctctgctgatccgaagaatcacaggaaggctgattcaccccaagagtggccgttcctaccacgaggagttcaaccctccaaaagagcccatgaaagatgacatcaccggggaacccttgatccgtcgatcagatgataatgaaaaggccttgaaaatccgcctgcaagcctaccacactcaaaccaccccactcatagagtactacaggaaacgggggatccactccgccatcgatgcatcccagacccccgatgtcgtgttcgcaagcatcctagcagccttctccaaagccacatcctagtatcagaaggccaggcgagactgcaacactgctcatcaccccgcggcgtgatccctgctcttaggtgctgggcagaggggaagggtggtcagggtgaggatggtgagggagggctggtgaggggctcagaggaatacttggaacaacagcagtgttattgtagtgtggcagtttcttttatacataggtgagagtttttaaagtgtaagggaaaaattaattttttaaaaaacaccatgcttggagggtgggggtagaaatagacacaatattatttctaaggaatcgggttttcatttactctggactggtgaaaatattttttaaagccagtgctctaagacctcagcttttatctcagaaccccatgggttccagaccaagagtacaggaaatcaaattgttgtcctgtctgtctatagcttggaacagggagctttgattactgactccggttccacacactgtaagatcaaaaaaccatctccacatttgaaagagatgtaaggtgtattcatagggatggtggctcaacaaatcaagcaaactggaatcaaggggagggggaagggaatgaaatggaaagggaggctgattcccttcccctgacttaccactaatttactaggctacctactttcatgagtaacctctcacagctacccagcacatgccacaatcctatgctcttgccttcttttatctgcactgtgtgaagggactcttttaaataaatgagcaagtgtcctaagctatgtcatccaaagattgtcctttccattctcaaatcctgtgactgggatcactcaacagcactgtgatgtattattttcaatgaggtgcctttcttaactgaccaaatgctgccttgtttggcccctaaatcaataaaatatgttaaaatttgtatcccctgttgtggcattttttttagataatctaagctagaaaaatgacattgaattctggacctggctggaaggaaaagaagccctttcttgtcgctggcagctgtgtggtagggaggtccaagtatgtgcatatgagataagcctgcaacctcttgaccttcagctcctatgcaggcttctcttgagcccagagacaaggcagcttggtctagtggagatagcactgtgcttggagttcaggggacctaggacaaatcccagccagttagttattcactgtgctcctgtttcctcagctgaaaaaggaagttggttatgccaccttcttggccttaatggcattaaatgaaatttataggaagaaggtttttgctcagtacctggcatgcaacagacattggataaatgttagttggatccagatatacacagaaagatatctgcttcctgccaggctggataactgttgaatggacacttgtccatagtctagaaagccagtgcttctaatccttaagccagatctttgactaccttttcagttgcttctttaacactctttgttgcttctctgtgtgtcctagtttaaattcatttcctctccagcaaaagtgagcttaaataatttctccaaactaaagctctcatgtttttggaagggctgcctttgcaagtgaggtttctgagaaatgactgttgttcccaaaacaagagggagctgggctggaagcaccactattcttctttaggcatcttgttacagagagaggcagggtcttcactgacatattaaatcctgttccctgaaccagcccctccctcttctgctccacttcctcacctgtgcagagtcattttcaggtgttagccttactgatttgcactgatctgtttgttccctgagctttttaaataccctgtgaaaattttctttcctcccttggtcatcatgcatctaattgtggggaaatgtttgtcaaaccaacctgcaaagcagcatggtgtagttgagaagaataaacagagaagactgggtgagctattgtttgtttgcttctttgggcctgggtttcctcatctaatctgcaaaccaagaatgcagactagtcctaccactcccggaagactgacgttgtgccaggtattatgcaaaggcttcatgtaaccctcgacttcacgtaaccctcacacagcaccctgtggagtcagaactgtccttcacttttataggtgaggaaaccagactcagagaggtgaagtggcattcctgaggtcatgcataagaggcagtcaggactgaaacacagtctctaacacttatccgtccccttgatcttgttgctgaagtgatttaattacttgcgtagctctgcacacaggaagggctgctctgaataagagctcttttccatggacactcagcgctgccggaactgattttgaagaagtcactgccggctctgagggcctagggtatgtgtcttaggatctcctgtgtgcacaaagtgtcactgacagaacacagcaggatggagagcagcctcctcagaagcctcacaagtctttcctcagatgaagacagagcaacgagtcagaagacagatttcaacagcgacttcaccatgcgaccttggacaagttatctcacctcatcagtagaataggaatgatccctacccctcaaaggtgctgatgacactagtgaccaagatactcatgtgggttggactgcccaggacacagcagatgcttagtaaacacagatggaattcagagggaaaatgtaggcattgaagaaagttgtcttactgaccatccggaaccaggctaaggatcccctagaaatcatagacctctgaaattatatgcagaattctttatgtgttttcataattaataatagtctaacatattaaattcttagctgtgtgaga

SEQ ID NO: 458242 - DNA, 3396 bp, Homo sapiens
  misc_feature (27)..(27): n is a, c, g, or t
  misc_feature (47)..(47): n is a, c, g, or t
  misc_feature (86)..(86): n is a, c, g, or t
  misc_feature (163)..(164): n is a, c, g, or t
taaaccgggtgtctttagtcctaaagntcttgactttggcacattcnccagttgagcagcagcctctatgttccacgttcagtaanaattccagtccttcatatcttttgtagctcaccctcaagctctcccgcttcaccatccaatagtttctcccatcacnnccagcaccactagtggtgttggtgagtgatgaaatggtagtggagctcattgagaagaatttggagacccccttgtgcaaaaatggttttcttctggatggcttccctcggactgtgaggcaggcagaaatgctcgatgacctcatggagaagaggaaagagaagcttgattctgtgattgaattcagcatcccagactctctgctgatccgaagaatcacaggaaggctgattcaccccaagagtggccgttcctaccacgaggagttcaaccctccaaaagagcccatgaaagatgacatcaccggggaacccttgatccgtcgatcagatgataatgaaaaggccttgaaaatccgcctgcaagcctaccacactcaaaccaccccactcatagagtactacaggaaacgggggatccactccgccatcgatgcatcccagacccccgatgtcgtgttcgcaagcatcctagcagccttctccaaagccacatcctagtatcagaaggccaggcgagactgcaacactgctcatcaccccgcggcgtgatccctgctcttaggtgctgggcagaggggaagggtggtcagggtgaggatggtgagggagggctggtgaggggctcagaggaatacttggaacaacagcagtgttattgtagtgtggcagtttcttttatacataggtgagagtttttaaagtgtaagggaaaaattaattttttaaaaaacaccatgcttggagggtgggggtagaaatagacacaatattatttctaaggaatcgggttttcatttactctggactggtgaaaatattttttaaagccagtgctctaagacctcagcttttatctcagaaccccatgggttccagaccaagagtacaggaaatcaaattgttgtcctgtctgtctatagcttggaacagggagctttgattactgactccggttccacacactgtaagatcaaaaaaccatctccacatttgaaagagatgtaaggtgtattcatagggatggtggctcaacaaatcaagcaaactggaatcaaggggagggggaagggaatgaaatggaaagggaggctgattcccttcccctgacttaccactaatttactaggctacctactttcatgagtaacctctcacagctacccagcacatgccacaatcctatgctcttgccttcttttatctgcactgtgtgaagggactcttttaaataaatgagcaagtgtcctaagctatgtcatccaaagattgtcctttccattctcaaatcctgtgactgggatcactcaacagcactgtgatgtattattttcaatgaggtgcctttcttaactgaccaaatgctgccttgtttggcccctaaatcaataaaatatgttaaaatttgtatcccctgttgtggcattttttttagataatctaagctagaaaaatgacattgaattctggacctggctggaaggaaaagaagccctttcttgtcgctggcagctgtgtggtagggaggtccaagtatgtgcatatgagataagcctgcaacctcttgaccttcagctcctatgcaggcttctcttgagcccagagacaaggcagcttggtctagtggagatagcactgtgcttggagttcaggggacctaggacaaatcccagccagttagttattcactgtgctcctgtttcctcagctgaaaaaggaagttggttatgccaccttcttggccttaatggcattaaatgaatgttgaatggacacttgtccatagtctagaaagccagtgcttctaatccttaagccagatctttgactaccttttcagttgcttctttaacactctttgttgcttctctgtgtgtcctagtttaaattcatttcctctccagcaaaagtgagcttaaataatttctccaaactaaagctctcatgtttttggaagggctgcctttgcaagtgaggtttctgagaaatgactgttgttcccaaaacaagagggagctgggctggaagcaccactattcttctttaggcatcttgttacagagagaggcagggtcttcactgacatattaaatcctgttccctgaaccagcccctccctcttctgctccacttcctcacctgtgcagagtcattttcaggtgttagccttactgatttgcactgatctgtttgttccctgagctttttaaataccctgtgaaaattttctttcctcccttggtcatcatgcatctaattgtggggaaatgtttgtcaaaccaacctgcaaagcagcatggtgtagttgagaagaataaacagagaagactgggtgagctattgtttgtttgcttctttgggcctgggtttcctcatctaatctgcaaaccaagaatgcagactagtcctaccactcccggaagactgacgttgtgccaggtattatgcaaaggcttcatgtaaccctcgacttcacgtaaccctcacacagcaccctgtggagtcagaactgtccttcacttttataggtgaggaaaccagactcagagaggtgaagtggcattcctgaggtcatgcataagaggcagtcaggactgaaacacagtctctaacacttatccgtccccttgatcttgttgctgaagtgatttaattacttgcgtagctctgcacacaggaagggctgctctgaataagagctcttttccatggacactcagcgctgccggaactgattttgaagaagtcactgccggctctgagggcctagggtatgtgtcttaggatctcctgtgtgcacaaagtgtcactgacagaacacagcaggatggagagcagcctcctcagaagcctcacaagtctttcctcagatgaagacagagcaacgagtcagaagacagatttcaacagcgacttcaccatgcgaccttggacaagttatctcacctcatcagtagaataggaatgatccctacccctcaaaggtgctgatgacactagtgaccaagatactcatgtgggttggactgcccaggacacagcagatgcttagtaaacacagatggaattcagagggaaaatgtaggcattgaagaaagttgtcttactgaccatccggaaccaggctaaggatcccctagaaatcatagacctctgaaattatatgcagaattctttatgtgttttcataattaataatagtctaacatattaaattcttagctgtgtgaga

SEQ ID NO: 458243 - DNA, 3182 bp, Homo sapiens
  misc_feature (27)..(27): n is a, c, g, or t
  misc_feature (47)..(47): n is a, c, g, or t
  misc_feature (86)..(86): n is a, c, g, or t
  misc_feature (163)..(164): n is a, c, g, or t
taaaccgggtgtctttagtcctaaagntcttgactttggcacattcnccagttgagcagcagcctctatgttccacgttcagtaanaattccagtccttcatatcttttgtagctcaccctcaagctctcccgcttcaccatccaatagtttctcccatcacnnccagcaccactagtggtgttggtgagtgatgaaatggtagtggagctcattgagaagaatttggagacccccttgtgcaaaaatggttttcttctggatggcttccctcggactgtgaggcaggcagaaatgctcgatgacctcatggagaagaggaaagagaagcttgattctgtgattgaattcagcatcccagactctctgctgatccgaagaatcacaggaaggctgattcaccccaagagtggccgttcctaccacgaggagttcaaccctccaaaagagcccatgaaagatgacatcaccggggaacccttgatccgtcgatcagatgataatgaaaaggccttgaaaatccgcctgcaagcctaccacactcaaaccaccccactcatagagtactacaggaaacgggggatccactccgccatcgatgcatcccagacccccgatgtcgtgttcgcaagcatcctagcagccttctccaaagccacatcctagtatcagaaggccaggcgagactgcaacactgctcatcaccccgcggcgtgatccctgctcttaggtgctgggcagaggggaagggtggtcagggtgaggatggtgagggagggctggtgaggggctcagaggaatacttggaacaacagcagtgttattgtagtgtggcagtttcttttatacataggtgagagtttttaaagtgtaagggaaaaattaattttttaaaaaacaccatgcttggagggtgggggtagaaatagacacaatattatttctaaggaatcgggttttcatttactctggactggtgaaaatattttttaaagccagtgctctaagacctcagcttttatctcagaaccccatgggttccagaccaagagtacaggaaatcaaattgttgtcctgtctgtctatagcttggaacagggagctttgattactgactccggttccacacactgtaagatcaaaaaaccatctccacatttgaaagagatgtaaggtgtattcatagggatggtggctcaacaaatcaagcaaactggaatcaaggggagggggaagggaatgaaatggaaagggaggctgattcccttcccctgacttaccactaatttactaggctacctactttcatgagtaacctctcacagctacccagcacatgccacaatcctatgctcttgccttcttttatctgcactgtgtgaagggactcttttaaataaatgagcaagtgtcctaagctatgtcatccaaagattgtcctttccattctcaaatcctgtgactgggatcactcaacagcactgtgatgtattattttcaatgaggtgcctttcttaactgaccaaatgctgccttgtttggcccctaaatcaataaaatatgttaaaatttgtatcccctgttgtggcattttttttagataatctaagctagaaaaatgacattgaattctggacctggctggaaggaaaagaagccctttcttgtcgctggcagctgtgtggtagggaggtccaagtatgtgcatatgagataagcctgcaacctcttgaccttcagctcctatgcaggcttctcttgagcccagagacaaggcagcttggtctagtggagatagcactgtgcttggagttcaggggacctaggacaaatcccagccagttagttattcactgtgctcctgtttcctcagctgaaaaaggaagttggttatgccaccttcttggccttaatggcattaaatgaaatttataggaagaaggtttttgctcagtacctggcatgcaacagacattggataaatgttagttggatccagatatacacagaaagatatctgcttcctgccaggctggataactgttgaatggacacttgtccatagtctagaaagccagtgcttctaatccttaagccagatctttgactaccttttcagttgcttctttaacactctttgttgcttccctgagctttttaaataccctgtgaaaattttctttcctcccttggtcatcatgcatctaattgtggggaaatgtttgtcaaaccaacctgcaaagcagcatggtgtagttgagaagaataaacagagaagactgggtgagctattgtttgtttgcttctttgggcctgggtttcctcatctaatctgcaaaccaagaatgcagactagtcctaccactcccggaagactgacgttgtgccaggtattatgcaaaggcttcatgtaaccctcgacttcacgtaaccctcacacagcaccctgtggagtcagaactgtccttcacttttataggtgaggaaaccagactcagagaggtgaagtggcattcctgaggtcatgcataagaggcagtcaggactgaaacacagtctctaacacttatccgtccccttgatcttgttgctgaagtgatttaattacttgcgtagctctgcacacaggaagggctgctctgaataagagctcttttccatggacactcagcgctgccggaactgattttgaagaagtcactgccggctctgagggcctagggtatgtgtcttaggatctcctgtgtgcacaaagtgtcactgacagaacacagcaggatggagagcagcctcctcagaagcctcacaagtctttcctcagatgaagacagagcaacgagtcagaagacagatttcaacagcgacttcaccatgcgaccttggacaagttatctcacctcatcagtagaataggaatgatccctacccctcaaaggtgctgatgacactagtgaccaagatactcatgtgggttggactgcccaggacacagcagatgcttagtaaacacagatggaattcagagggaaaatgtaggcattgaagaaagttgtcttactgaccatccggaaccaggctaaggatcccctagaaatcatagacctctgaaattatatgcagaattctttatgtgttttcataattaataatagtctaacatattaaattcttagctgtgtgaga

SEQ ID NO: 458244 - DNA, 2286 bp, Homo sapiens
  misc_feature (27)..(27): n is a, c, g, or t
  misc_feature (47)..(47): n is a, c, g, or t
  misc_feature (86)..(86): n is a, c, g, or t
  misc_feature (163)..(164): n is a, c, g, or t
taaaccgggtgtctttagtcctaaagntcttgactttggcacattcnccagttgagcagcagcctctatgttccacgttcagtaanaattccagtccttcatatcttttgtagctcaccctcaagctctcccgcttcaccatccaatagtttctcccatcacnnccagcaccactagtggtgttggtgagtgatgaaatggtagtggagctcattgagaagaatttggagacccccttgtgcaaaaatggttttcttctggatggcttccctcggactgtgaggcaggcagaaatgctcgatgacctcatggagaagaggaaagagaagcttgattctgtgattgaattcagcatcccagactctctgctgatccgaagaatcacaggaaggctgattcaccccaagagtggccgttcctaccacgaggagttcaaccctccaaaagagcccatgaaagatgacatcaccggggaacccttgatccgtcgatcagatgataatgaaaaggccttgaaaatccgcctgcaagcctaccacactcaaaccaccccactcatagagtactacaggaaacgggggatccactccgccatcgatgcatcccagacccccgatgtcgtgttcgcaagcatcctagcagccttctccaaagccacatcctagtatcagaaggccaggcgagactgcaacactgctcatcaccccgcggcgtgatccctgctcttaggtgctgggcagaggggaagggtggtcagggtgaggatggtgagggagggctggtgaggggctcagaggaatacttggaacaacagcagtgttattgtagtgtggcagtttcttttatacataggtgagagtttttaaagtgtaagggaaaaattaattttttaaaaaacaccatgcttggagggtgggggtagaaatagacacaatattatttctaaggaatcgggttttcatttactctggactggtgaaaatattttttaaagccagtgctctaagacctcagcttttatctcagaaccccatgggttccagaccaagagtacaggaaatcaaattgttgtcctgtctgtctatagcttggaacagggagctttgattactgactccggttccacacactgtaagatcaaaaaaccatctccacatttgaaagagatgtaaggtgtattcatagggatggtggctcaacaaatcaagcaaactggaatcaaggggagggggaagggaatgaaatggaaagggaggctgattcccttcccctgacttaccactaatttactaggctacctactttcatgagtaacctctcacagctacccagcacatgccacaatcctatgctcttgccttcttttatctgcactgtgtgaagggactcttttaaataaatgagcaagtgtcctaagctatgtcatccaaagattgtcctttccattctcaaatcctgtgactgggatcactcaacagcactgtgatgtattattttcaatgaggtgcctttcttaactgaccaaatgctgccttgtttggcccctaaatcaataaaatatgttaaaatttgtatcccctgttgtggcattttttttagataatctaagctagaaaaatgacattgaattctggacctggctggaaggaaaagaagccctttcttgtcgctggcagctgtgtggtagggaggtccaagtatgtgcatatgagataagcctgcaacctcttgaccttcagctcctatgcaggcttctcttgagcccagagacaaggcagcttggtctagtggagatagcactgtgcttggagttcaggggacctaggacaaatcccagccagttagttattcactgtgctcctgtttcctcagctgaaaaaggaagttggttatgccaccttcttggccttaatggcattaaatgaaatttataggaagaaggtttttgctcagtacctggcatgcaacagacattggataaatgttagttggatccagatatacacagaaagatatctgcttcctgccaggctggataactgttgaatggacacttgtccatagtctagaaagccagtgcttctaatccttaagccagatctttgactaccttttcagttgcttctttaacactctttgttgcttctctgtgtgtcctagtttaaattcatttcctctccagcaaaagtgagcttaaataatttctccaaactaaagctctcatgtccccgtacatcgttagaagcttgaattcgagcagtagtagtagtagtagtaggcggccgc

SEQ ID NO: 458245 - DNA, 824 bp, Homo sapiens
  misc_feature (27)..(27): n is a, c, g, or t
  misc_feature (47)..(47): n is a, c, g, or t
  misc_feature (86)..(86): n is a, c, g, or t
  misc_feature (163)..(164): n is a, c, g, or t
taaaccgggtgtctttagtcctaaagntcttgactttggcacattcnccagttgagcagcagcctctatgttccacgttcagtaanaattccagtccttcatatcttttgtagctcaccctcaagctctcccgcttcaccatccaatagtttctcccatcacnnccagcaccactagtggtgttggtgagtgatgaaatggtagtggagctcattgagaagaatttggagacccccttgtgcaaaaatggttttcttctggatggcttccctcggactgtgaggcaggcagaaatgctcgatgacctcatggagaagaggaaagagaagcttgattctgtgattgaattcagcatcccagactctctgctgatccgaagaatcacaggaaggctgattcaccccaagagtggccgttcctaccacgaggagttcaaccctccaaaagagcccatgaaagatgacatcaccggggaacccttgatccgtcgatcagatgataatgaaaaggccttgaaaatccgcctgcaagcctaccacactcaaaccaccccactcatagagtactacaggaaacgggggatccactccgccatcgatgcatcccagacccccgatgtcgtgttcgcaagcatcctagcagccttctccaaagccacatgtaaagacttggttatgtttatctaatgttgggtccaagaaggaatttctttccatccctgtgaggcaatgggtgggaatgataggacaggcaaagagaagcttcctcaggctagcaaaaatatcatttgatgtattgattaaaaaagcacttgcttgatgtat

SEQ ID NO: 458246 - DNA, 1788 bp, Homo sapiens
  misc_feature (27)..(27): n is a, c, g, or t
  misc_feature (47)..(47): n is a, c, g, or t
  misc_feature (86)..(86): n is a, c, g, or t
  misc_feature (163)..(164): n is a, c, g, or t
taaaccgggtgtctttagtcctaaagntcttgactttggcacattcnccagttgagcagcagcctctatgttccacgttcagtaanaattccagtccttcatatcttttgtagctcaccctcaagctctcccgcttcaccatccaatagtttctcccatcacnnccagcaccactagtggtgttggtgagtgatgaaatggtagtggagctcattgagaagaatttggagacccccttgtgcaaaaatggttttcttctggatggcttccctcggactgtgaggcaggcagaaatgctcgatgacctcatggagaagaggaaagagaagcttgattctgtgattgaattcagcatcccagactctctgctgatccgaagaatcacaggaaggctgattcaccccaagagtggccgttcctaccacgaggagttcaaccctccaaaagagcccatgaaagatgacatcaccggggaacccttgatccgtcgatcagatgataatgaaaaggccttgaaaatccgcctgcaagcctaccacactcaaaccaccccactcatagagtactacaggaaacgggggatccactccgccatcgatgcatcccagacccccgatgtcgtgttcgcaagcatcctagcagccttctccaaagccacatcctagtatcagaaggccaggcgagactgcaacactgctcatcaccccgcggcgtgatccctgctcttaggtgctgggcagaggggaagggtggtcagggtgaggatggtgagggagggctggtgaggggctcagaggaatacttggaacaacagcagtgttattgtagtgtggcagtttcttttatacataggtgagagtttttaaagtgtaagggaaaaattaattttttaaaaaacaccatgcttggagggtgggggtagaaatagacacaatattatttctaaggaatcgggttttcatttactctggactggtgaaaatattttttaaagccagtgctctaagacctcagcttttatctcagaaccccatgggttccagaccaagagtacaggaaatcaaattgttgtcctgtctgtctatagcttggaacagggagctttgattactgactccggttccacacactgtaagatcaaaaaaccatctccacatttgaaagagatgtaaggtgtattcatagggatggtggctcaacaaatcaagcaaactggaatcaaggggagggggaagggaatgaaatggaaagggaggctgattcccttcccctgacttaccactaatttactaggctacctactttcatgagtaacctctcacagctacccagcacatgccacaatcctatgctcttgccttcttttatctgcactgtgtgaagggactcttttaaataaatgagcaagtgtcctaagctatgtcatccaaagattgtcctttccattctcaaatcctgtgactgggatcactcaacagcactgtgatgtattattttcaatgaggtgcctttcttaactgaccaaatgctgccttgtttggcccctaaatcaataaaatatgttaaaatttgaaaaaaaaaaaaaagaaaaaaaacaaaaaaaaaaaaaagaaaaaaaaaataaaaacaaaaaggcacaagacaacgcaacaaaggaacaaagaagatgacagaccaagaaaagaacaaacagaaagacacagaacgagcacacaactcagagaaacagaacacaagcggcagagcgcagctgacatatcaacatgcgagaggagaaggagagagcag

SEQ ID NO: 458247 - DNA, 3738 bp, Homo sapiens
  misc_feature (27)..(27): n is a, c, g, or t
  misc_feature (47)..(47): n is a, c, g, or t
  misc_feature (86)..(86): n is a, c, g, or t
  misc_feature (163)..(164): n is a, c, g, or t
taaaccgggtgtctttagtcctaaagntcttgactttggcacattcnccagttgagcagcagcctctatgttccacgttcagtaanaattccagtccttcatatcttttgtagctcaccctcaagctctcccgcttcaccatccaatagtttctcccatcacnnccagcaccactagtggtgttggtgagtgatgaaatggtagtggagctcattgagaagaatttggagacccccttgtgcaaaaatggttttcttctggatggcttccctcggactgtgaggcaggcagaaatgctcgatgacctcatggagaagaggaaagagaagcttgattctgtgattgaattcagcatcccagactctctgctgatccgaagaatcacaggaaggctgattcaccccaagagtggccgttcctaccacgaggagttcaaccctccaaaagagcccatgaaagatgacatcaccggggaacccttgatccgtcgatcagatgataatgaaaaggccttgaaaatccgcctgcaagcctaccacactcaaaccaccccactcatagagtactacaggaaacgggggatccactccgccatcgatgcatcccagacccccgatgtcgtgttcgcaagcatcctagcagccttctccaaagccacatgtaaagacttggttatgtttatctaatgttgggtccaagaaggaatttctttccatccctgtgaggcaatgggtgggaatgataggacaggcaaagagaagcttcctcaggctagcaaaaatatcatttgatgtattgattaaaaaagcacttgcttgatgtatctttggcgtgtgtgctactctcatctgtgtgtatgtgtgttgtgtgtgtgtgtgtgtgcatgcacatatgtgttcactctgctactttgtaagttttaggctaggttgctttaccagctgtttacttcttttttgttgttgttttgagacaaggtttcgctctgccaccctggctggagtgcagtggcgtgatcttggctcacggcaacctctgcctcctggggctcaagcaattatcccacctcagcctcctgagcagctgggactacaggtgcatgccacaacacctggctgatatttgtattttttgtagagacaggattttgccaagttgcccaggctggtcttgaactcctaggcttaagcaatccacccaccttggcctcctgaagtgccaggatcacagacgtgagccactacacccagcccagctgtttacttctttaaccatacttttgattttattttttgaccaaaatgaactaacccaggtaatcttccagggaccgcaattccagaacctcatagtatttcttccatttccagcagctgattagaagtccaggatcatgtgaagtcaggcagggtcacagttcctgatggcacattatggacagagaattccattttgttttctaacccatgatgaaaacccacgtgagtcagtgtgtgaacagggatcattaattttttccccctaggtggaaggaaaaaggcacttactttgcaggttacagaaattactgggagaggatatcgtcataaaaagagccaggccaaattggaatatttttgtgatctgcatcatgatgctgaaaatagcaattatttgggaattgggtttgaaaactgaattgttgccagagaattaaaccaggtgaaaggtccttttgaattcagattgtcttctgaacatccaggctgatcatctgagagcagtcaaatctacttccccaaaaagagaccagggtaggtttatttgcttttatttttaatgtttgcctgtgtttccaagtgtgaacaaaacagtgtgtgatctattcttggattcattttgatcagtatttattcaaacccagtctctctccaggacataaaactgaaatcagatatgttctttttaagcccaaaccctctcctttctagatccaaccttcacccctaattttatgatggctatagccatggacttccccaagaaaagatcacccagaaataagaccacctgtgacagttaccagcttttattcataaccttagcttcccaactattgagcattttctaaggtccctgctgtcttttggtctctggtttgatttgtggcaaacagatgaagtaacagactgctatgaaggaccacaaaaacggcagcctctggaaaaaccattagaaagtcagtggcagatccagtaaataatatcgccagcctcagcataatctgctgctgactcgattcagtggactctaaagtgcccagcctcctgacctgagctctcctgccatctgtgagactaccagaggtcttatctgctgtccacatggcaactgggcatgagtacctggccaccttgcttccctctttgcctggtccaagtgagtgtctgctgcctctgtcctgccttgttttcctggctctaaaccaactccacccactcttaatggaaactcagtctggctttgtgtgtttctgggaagcacatgacttctgggaatgggcaaggaagaggagtgaaacaaaaactgtcagctatgtgtgcctggtctgggatccttctctgggtgacagtggcatcatgaatcttagaatcagctcccctttaactagggacaattgtaagcacttggcctcaaagttgaggttcttgaatgtttgctaattttatgtgcatgatccttgcccaaatatttgtcatccgtccacatagattcacgtgtgcatacaacatgtacaagtaatatttgggctgcccataagaactggaagattcatagggaatgcatatacccttctcagtatggttaggattctgtttttgcttcatttaattccagagttcctcagcctcagcaggttctgcttttacctgtcacagaaatgtccagtgtttaatgcatttggttgctggggcttacatgccagcctcctctgatatgtacttggtttttaaaaacccattttgttctctcttgtttcctctctatttccctagtatcagaaggccaggcgagactgcaacactgctcatcaccccgcggcgtgatccctgctcttaggtgctgggcagaggggaagggtggtcagggtgaggatggtgagggagggctggtgaggggctcagaggaatacttggaacaacagcagtgttattgtagtgtggcagtttcttttatacataggtgagagtttttaaagtgtaagggaaaaattaattttttaaaaaacaccatgcttggagggtgggggtagaaatagacacaatattatttctaaggaatcgggttttcatttactctggactggtgaaaatattttttaaagccagtgctctaagacctcagcttttatctcagaaccccatgggttccagaccaagagtacaggaaatcaaattgttgtcctgtctgtctatagcttggaacagggagctttgattactgactccggttccacacactgtaagatcaaaaaaccatctccacatctgctccacttcctcacctgtgcagagtcattttcaggtgttagccttactgatttgcactgatctgtttgttccctgagctttttaaataccctgtgaaaattttctttcctcccttggtcatcatgcatctaattgtggggaaatgtttgtcaaaccaacctgcaaagcagcatggtgtagttgagaagaataaacagagaagactggg

SEQ ID NO: 458248 - DNA, 401 bp, Homo sapiens
cacattttaatttacttttatctgtttttagtatcagactactgtcccctgtgctcagcctgatactgttactcattgcgctggagttggtcaacattcatgctgtttgtgggaagaatgcgcatgagtatcagcagtacctaaagtttgtaaagtcgatcttgcagtacacggagaacctggtggcttacaccagttacgaaaagaacaagtggaatgaaactatcaatcttacacatacagctttgttgaaaatgtggacttttagtgagaagaaacaaatgttaatacatttagccaagaaatccacaagtaaagtactcttatgaaaacttgtaagtcaggatgcttttaattttaacagattttaacagcgtgtaaattaaaaacccaaagacagg

SEQ ID NO: 458249 - DNA, 3815 bp, Homo sapiens
aataaacaatggctaccccatagacagagcagtttgcaaatattatgattgataattttaggtctttaagcctttatcatatttgagaacatttatgtaaattatctttaatatttaatcactatgttttaatcatacagctctcacgatatccagaaagcatgttaacagcaactatacctgagtgcattcagttcttaagagatgtgtctgaaatatataatactctatttttctttctgttaagcagtgccttttattttattttattttttaggtattaataggggaccctattaccacatgtctttctccctcagtgtatgatataatttgtaatcttgggtttcaactcagagaaaattgtgatatcaatagcattgtaactcagaatggtgaagtatgctggaaaacaatcacagactgtgtgagctacacagagtcagagcagggtctggattactggggaagcgtgaggctgctgggccctgtgtgtgaggctgtccattcacatttcttatctctgaccaaggggcaatttgaaattcgatatgcaccgtggttccagtggacaagttttccagagttatttcctgaaatatttgatgccttggaaagtctacaatctcctgctatttctcttagcttaatgaaactgacatcgtgtctagaacgagccttgggtgatgtatttttactgattgggaaggaatgcccctttcttttaagagatctgctttcatctgaggagcttgctcaagtcttcagtcagtctgtgatgaatgtgctaaaagtcttcgttggctctccgtgtggtctcaacctgcgtaacgtcttatggcatgggtttgcgtcacctgaagaaattcctccaaaatactgttcaatgatgatactgttgacggcaggattgggtcagttactgaagagttaccttcaaaacactaaacttacattggcacatcgctctttcatatctcttacaaacctcgaggatttgattgtttttcctgatgttacttatgaggtgctttcagtattagaagaagtgatgatgaaatctgcttttatattaaaaatcatgttaccatattgggaagttgcactggtcaagttcaagtcacacaggtttgctgactgcgccatattgttgctgacacaactggagactggacttaggaatgtttttgccacacttaacagatgtccaaaaagactcctgactgctgagtcaacagctctttataccacctttgatcaagtaagtaagtaaacttgtaaggtaacttgaaacaaacagaacgctgtcttcttttaaaatacaaattaaaatgcaaaattaaagatcagccataaatcatatacttacaggaaaatgtccatagtaatataaaccaaaaaaagctgataattgatatttccggttaattttggggcccagtgttaccaatctagctcccaaagctatccaaagctcaaagttggaaaataccaagggatctaacatgattagctataattatttagaggcttgcattttagatttaggggtgacatcttttttgtacaggaaatattccccgctactgttacaagtgtgtgggatacattgattcatttaatctgcatgttggcggtgtgaatagtagaaaactcacagttgaaaatgcctcttgtcagccacggagcgcacaggcatttgtgtgcgtaaccccgggtagcgttcatgtgcacctaaagtgtgacgacagcctatgggaaaccaagggaagggtcacctgtagaggtccggacattcggttttgcctttaagacaactattagatcctaagcgactgtgttgtggctgagttaaaaatgtgcctgtttacttgcagagcttcttccattaggtgaacaatctgttgtgattttaatgtgtaagacctttggtaatgtgaggaattgattagatagtgcagcccagtctctagaggatcagatctgtgggattggttggggtggttgggcaaagtccatggtgagttaagaaatgactttggaagtgactctaatgtgtacacaaacaacacacatgcacacaccacacatacatacacacacgaacacatacctccatgctgcatatacacacacaggcatacacacactctaatgtgtacacaaacacacatgcacataccacacatacacacacacacatgaacacatacctccatgccacacagacacacacaggcatacacatactctaatgtgtacacaacacacatgcacacaccacacacgaactcacacatccatgccacatatacacacacgggcatacacacatgcaggcacatacactacacacacacacacacacacacacaggcacagttgcatataaacacacaaatgtacacacccccacaccacatatgcacatacacatatacacaccacacatattcatagtcacatacacaaacacacatgtgtatacaattattaatatagtcttaaagtcattctgttggttaagaaaatatttcctgaacacctgtttgctgaattttaaagactgtccatttaatttgcttagaccttagataacaagttaggctaaaagtactatatccatcaactctgaaagttctgtatgtttatgtatggggaccagttaaccaatgtatttatttttgatgttttagatattggcaaaacacttgaatgatggtaaaatcaatcagcttcctcttttccttggagagcctgctatggaatttctctgggatttcctgaaccatcaggagggtccccgcataagagatcatttaagccacggggagatcaacttacatgaattttcaaaagaaacaactaatcagttgcttgcattttctcttgtactgctactcagattcgttgatgactgtctgctatcagtttttaaggaaaaatcagccgtagaattgttgattagtcttgcagaaggctatagttctcgctgtcatccggtttttcagcttaaaaaacaggtgctgagctgtgaggagagcatcagggtttgggctctgctgcctttccccgaagaactcactcggcaagccgtcagattagaagataattctgaaacaaatgcctgccactctttgattacaaaaatgacggatgagctgtatcaccatatgcctgagaatcgttgtgtgttaaaggacttggatcgtcttcctactgagacgtggccccagcttctccgtgagctctgcagcacacctgttcccaccctgttctgccccaggattgtgctggaagtgctggttgtgctccgaagcatcagcgaacagtgccgccgtgtgtccagccaggtcaccgttgcctcagagctgagacacaggcagtgggtggaaaggacgctgcggtctcgccagcggcagaactacctgcgtatgtggagtagtatcagactactgtcccctgtgctcagcctgatactgttactcattgcgctggagttggtcaacattcatgctgtttgtgggaagaatgcgcatgagtatcagcagtacctaaagtttgtaaagtcgatcttgcagtacacggagaacctggtggcttacaccagttacgaaaagaacaagtggaatgaaactatcaatcttacacatacagctttgttgaaaatgtggacttttagtgagaagaaacaaatgttaatacatttagccaagaaatccacaagtaaagtactcttatgaaaacttgtaagtcaggatgcttttaattttaacagattttaacagcgtgtaaattaaaaacccaaagacagg

SEQ ID NO: 458250 - DNA, 3035 bp, Homo sapiens
ggacagcacatgtctgtaggccgtgccgatgatgctgagaagcagcgtgcatgaaataaaataaaaacagacaaggctattcattggagaaaataggaagctgtgctcccttgtgcacaaataccagtcgtcaggagaagtattctgttgtatgagcagcgatttgtgagggcctgggattgtacattttagagataactgggctaaagctctgttgagagcagtgtcctaatgcggcttcatggccagctgcactgtgtttttgcgtcttttgtaatgtgtttattttgtcagtgacattcctctcatagtgtttctagatgaatgtttgttttaacaaaaaactttgggatgtgtggccatgtaccagaattttttcttattttgcatagtgttagtgtatttgtattttgctttaattgtttattttcatttctttccttttctgaagtcaacagctctttataccacctttgatcaagtaagtaagtaaacttgtaaggtaacttgaaacaaacagaacgctgtcttcttttaaaatacaaattaaaatgcaaaattaaagatcagccataaatcatatacttacaggaaaatgtccatagtaatataaaccaaaaaaagctgataattgatatttccggttaattttggggcccagtgttaccaatctagctcccaaagctatccaaagctcaaagttggaaaataccaagggatctaacatgattagctataattatttagaggcttgcattttagatttaggggtgacatcttttttgtacaggaaatattccccgctactgttacaagtgtgtgggatacattgattcatttaatctgcatgttggcggtgtgaatagtagaaaactcacagttgaaaatgcctcttgtcagccacggagcgcacaggcatttgtgtgcgtaaccccgggtagcgttcatgtgcacctaaagtgtgacgacagcctatgggaaaccaagggaagggtcacctgtagaggtccggacattcggttttgcctttaagacaactattagatcctaagcgactgtgttgtggctgagttaaaaatgtgcctgtttacttgcagagcttcttccattaggtgaacaatctgttgtgattttaatgtgtaagacctttggtaatgtgaggaattgattagatagtgcagcccagtctctagaggatcagatctgtgggattggttggggtggttgggcaaagtccatggtgagttaagaaatgactttggaagtgactctaatgtgtacacaaacaacacacatgcacacaccacacatacatacacacacgaacacatacctccatgctgcatatacacacacaggcatacacacactctaatgtgtacacaaacacacatgcacataccacacatacacacacacacatgaacacatacctccatgccacacagacacacacaggcatacacatactctaatgtgtacacaacacacatgcacacaccacacacgaactcacacatccatgccacatatacacacacgggcatacacacatgcaggcacatacactacacacacacacacacacacacacaggcacagttgcatataaacacacaaatgtacacacccccacaccacatatgcacatacacatatacacaccacacatattcatagtcacatacacaaacacacatgtgtatacaattattaatatagtcttaaagtcattctgttggttaagaaaatatttcctgaacacctgtttgctgaattttaaagactgtccatttaatttgcttagaccttagataacaagttaggctaaaagtactatatccatcaactctgaaagttctgtatgtttatgtatggggaccagttaaccaatgtatttatttttgatgttttagatattggcaaaacacttgaatgatggtaaaatcaatcagcttcctcttttccttggagagcctgctatggaatttctctgggatttcctgaaccatcaggagggtccccgcataagagatcatttaagccacggggagatcaacttacatgaattttcaaaagaaacaactaatcagttgcttgcattttctcttgtactgctactcagattcgttgatgactgtctgctatcagtttttaaggaaaaatcagccgtagaattgttgattagtcttgcagaaggctatagttctcgctgtcatccggtttttcagcttaaaaaacaggtgctgagctgtgaggagagcatcagggtttgggctctgctgcctttccccgaagaactcactcggcaagccgtcagattagaagataattctgaaacaaatgcctgccactctttgattacaaaaatgacggatgagctgtatcaccatatgcctgagaatcgttgtgtgttaaaggacttggatcgtcttcctactgagacgtggccccagcttctccgtgagctctgcagcacacctgttcccaccctgttctgccccaggattgtgctggaagtgctggttgtgctccgaagcatcagcgaacagtgccgccgtgtgtccagccaggtcaccgttgcctcagagctgagacacaggcagtgggtggaaaggacgctgcggtctcgccagcggcagaactacctgcgtatgtggagtagtatcagactactgtcccctgtgctcagcctgatactgttactcattgcgctggagttggtcaacattcatgctgtttgtgggaagaatgcgcatgagtatcagcagtacctaaagtttgtaaagtcgatcttgcagtacacggagaacctggtggcttacaccagttacgaaaagaacaagtggaatgaaactatcaatcttacacatacagctttgttgaaaatgtggacttttagtgagaagaaacaaatgttaatacatttagccaagaaatccacaagtaaagtactcttatgaaaacttgtaagtcaggatgcttttaattttaacagattttaacagcgtgtaaattaaaaacccaaagacagg

SEQ ID NO: 458251 - DNA, 2001 bp, Homo sapiens
attcacgcgcgccgcagcggggcaccggaagttatggaggtattaataggggaccctattaccacatgtctttctccctcagtgtatgatataatttgtaatcttgggtttcaactcagagaaaattgtgatatcaatagcattgtaactcagaatggtgaagtatgctggaaaacaatcacagactgtgtgagctacacagagtcagagcagggtctggattactggggaagcgtgaggctgctgggccctgtgtgtgaggctgtccattcacatttcttatctctgaccaaggggcaatttgaaattcgatatgcaccgtggttccagtggacaagttttccagagttatttcctgaaatatttgatgccttggaaagtctacaatctcctgctatttctcttagcttaatgaaactgacatcgtgtctagaacgagccttgggtgatgtatttttactgattgggaaggaatgcccctttcttttaagagatctgctttcatctgaggagcttgctcaagtcttcagtcagtctgtgatgaatgtgctaaaagtcttcgttggctctccgtgtggtctcaacctgcgtaacgtcttatggcatgggtttgcgtcacctgaagaaattcctccaaaatactgttcaatgatgatactgttgacggcaggattgggtcagttactgaagagttaccttcaaaacactaaacttacattggcacatcgctctttcatatctcttacaaacctcgaggatttgattgtttttcctgatgttacttatgaggtgctttcagtattagaagaagtgatgatgaaatctgcttttatattaaaaatcatgttaccatattgggaagttgcactggtcaagttcaagtcacacaggtttgctgactgcgccatattgttgctgacacaactggagactggacttaggaatgtttttgccacacttaacagatgtccaaaaagactcctgactgctgagtcaacagctctttataccacctttgatcaaatattggcaaaacacttgaatgatggtaaaatcaatcagcttcctcttttccttggagagcctgctatggaatttctctgggatttcctgaaccatcaggagggtccccgcataagagatcatttaagccacggggagatcaacttacatgaattttcaaaagaaacaactaatcagttgcttgcattttctcttgtactgctactcagattcgttgatgactgtctgctatcagtttttaaggaaaaatcagccgtagaattgttgattagtcttgcagaaggctatagttctcgctgtcatccggtttttcagcttaaaaaacaggtgctgagctgtgaggagagcatcagggtttgggctctgctgcctttccccgaagaactcactcggcaagccgtcagattagaagataattctgaaacaaatgcctgccactctttgattacaaaaatgacggatgagctgtatcaccatatgcctgagaatcgttgtgtgttaaaggacttggatcgtcttcctactgagacaccaaccagcgatacgccgctagccctggctcccagaaagccgcagccttgcaggtgcagaaggagagtgaggcccagtatcagactactgtcccctgtgctcagcctgatactgttactcattgcgctggagttggtcaacattcatgctgtttgtgggaagaatgcgcatgagtatcagcagtacctaaagtttgtaaagtcgatcttgcagtacacggagaacctggtggcttacaccagttacgaaaagaacaagtggaatgaaactatcaatcttacacatacagctttgttgaaaatgtggacttttagtgagaagaaacaaatgttaatacatttagccaagaaatccacaagtaaagtactcttatgaaaacttgtaagtcaggatgcttttaattttaacagattttaacagcgtgtaaattaaaaacccaaagacagg

SEQ ID NO: 458252 - DNA, 1138 bp, Homo sapiens
tcatctccagttttgtgcacagagggtgggtgtggcatttgtgatctattattgttaatggcctccatttaaaatcattttattggctgtcatttgcctgccatgtcaagcctattttaatgaagcacttgcttttctagctgcatagaattatttgaagaaagataatgagaaatggggactctaagtggcctacagttcaatagaagaaagctaaaagcccacccaaacatgatagtaaccactgttttctctgcactaggaaaaatcagccgtagaattgttgattagtcttgcagaaggctatagttctcgctgtcatccggtttttcagcttaaaaaacaggtgctgagctgtgaggagagcatcagggtttgggctctgctgcctttccccgaagaactcactcggcaagccgtcagattagaagataattctgaaacaaatgcctgccactctttgattacaaaaatgacggatgagctgtatcaccatatgcctgagaatcgttgtgtgttaaaggacttggatcgtcttcctactgagacgtggccccagcttctccgtgagctctgcagcacacctgttcccaccctgttctgccccaggattgtgctggaagtgctggttgtgctccgaagcatcagcgaacagtgccgccgtgtgtccagccaggtcaccgttgcctcagagctgagacacaggcagtgggtggaaaggacgctgcggtctcgccagcggcagaactacctgcgtatgtggagtagtatcagactactgtcccctgtgctcagcctgatactgttactcattgcgctggagttggtcaacattcatgctgtttgtgggaagaatgcgcatgagtatcagcagtacctaaagtttgtaaagtcgatcttgcagtacacggagaacctggtggcttacaccagttacgaaaagaacaagtggaatgaaactatcaatcttacacatacagctttgttgaaaatgtggacttttagtgagaagaaacaaatgttaatacatttagccaagaaatccacaagtaaagtactcttatgaaaacttgtaagtcaggatgcttttaattttaacagattttaacagcgtgtaaattaaaaacccaaagacagg

SEQ ID NO: 458253 - DNA, 1050 bp, Homo sapiens
attcacgcgcgccgcagcggggcaccggaagttatggaggtattaataggggaccctattaccacatgtctttctccctcagtgtatgatataatttgtaatcttgggtttcaactcagagaaaattgtgatatcaatagcattgtaactcagaatggtgaagtatgctggaaaacaatcacagactgtgtgagctacacagagtcagagcagggtctggattactggggaagcgtgaggctgctgggccctgtgtgtgaggctgtccattcacatttcttatctctgaccaaggggcaatttgaaattcgatatgcaccgtggttccagtggacaagttttccagagttatttcctgaaatatttgatgccttggaaagtctacaatctcctgctatttctcttagcttaatgaaactgacatcgtgtctagaacgagccttgggtgatgtatttttactgattgggaaggaatgcccctttcttttaagagatctgctttcatctgaggagcttgctcaagtcttcagtcagtctgtgatgaatgtgctaaaagtcttcgttggctctccgtgtggtctcaacctgcgtaacgtcttatggcatgggtttgcgtcacctgaagaaattcctccaaaatactgttcaatgatgatactgttgacggcaggattgggtcagttactgaagagttaccttcaaaacactaaacttacattggcacatcgctctttcatatctcttacaaacctcgaggatttgattgtttttcctgatgttacttatgaggtgctttcagtattagaagaagtgatgatgaaatctgcttttatattaaaaatcatgttaccatattgggaagttgcactggtcaagttcaagtcacacaggtttgctgactgcgccatattgttgctgacacaactggagactggacttaggaatgtttttggtaacgggctgcgactagtatgttgagtcctgtaagtaggagagtgatatttgatcaggagacgtagttactagcacagagagtttcccagcatacac

SEQ ID NO: 458254 - DNA, 262 bp, Homo sapiens
tgaagtgaagacatttaattcattgtttcattttataatggaatggataaagaaattaattttttttttacaggtttgtaaagtcgatcttgcagtacacggagaacctggtggcttacaccagttacgaaaagaacaagtggaatgaaactatcaatcttacacatacagctttgttgaaaatgtggacttttagtgagaagaaacaaatgttaatacatttagccaagaaatccacaagtaaagtactcttatgaaaact

SEQ ID NO: 458255 - DNA, 559 bp, Homo sapiens
tccccagcagagtcccacccagggcttcagaggacttgatggatgcactctttccttctattcagcaacaccaggcacgtctctctgctgcggatactaacaaaatattttctctgtttaatttctgaaaggaatttctctgggatttcctgaaccatcaggagggtccccgcataagagatcatttaagccacggggagatcaacttacatgaattttcaaaagaaacaactaatcagttgcttgcattttctcttgtactgctactcagattcgttgatgactgtctgctatcagtttttaaggtaatttatagggaagaaaatcattaattagattaactcattcagctatgaaaatatagtttatttttcaaatgtaattaactgttaatcatcttttaatatatctgagttacagtatcctccatcagaaaaaaaagtgaatggattacatgtatgtttatattctctatcacagatcaatcaatattaatctcagctaaaataatttaactcgtttcttaaaaacacatttgcttttgtatgtaacagcagct

SEQ ID NO: 458256 - DNA, 2142 bp, Homo sapiens
attcacgcgcgccgcagcggggcaccggaagttatggaggtattaataggggaccctattaccacatgtctttctccctcagtgtatgatataatttgtaatcttgggtttcaactcagagaaaattgtgatatcaatagcattgtaactcagaatggtgaagtatgctggaaaacaatcacagactgtgtgagctacacagagtcagagcagggtctggattactggggaagcgtgaggctgctgggccctgtgtgtgaggctgtccattcacatttcttatctctgaccaaggggcaatttgaaattcgatatgcaccgtggttccagtggacaagttttccagagttatttcctgaaatatttgatgccttggaaagtctacaatctcctgctatttctcttagcttaatgaaactgacatcgtgtctagaacgagccttgggtgatgtatttttactgattgggaaggaatgcccctttcttttaagagatctgctttcatctgaggagcttgctcaagtcttcagtcagtctgtgatgaatgtgctaaaagtcttcgttggctctccgtgtggtctcaacctgcgtaacgtcttatggcatgggtttgcgtcacctgaagaaattcctccaaaatactgttcaatgatgatactgttgacggcaggattgggtcagttactgaagagttaccttcaaaacactaaacttacattggcacatcgctctttcatatctcttacaaacctcgaggatttgattgtttttcctgatgttacttatgaggtgctttcagtattagaagaagtgatgatgaaatctgcttttatattaaaaatcatgttaccatattgggaagttgcactggtcaagttcaagtcacacaggtttgctgactgcgccatattgttgctgacacaactggagactggacttaggaatgtttttgccacacttaacagatgtccaaaaagactcctgactgctgagtcaacagctctttataccacctttgatcaaatattggcaaaacacttgaatgatggtaaaatcaatcagcttcctcttttccttggagagcctgctatggaatttctctgggatttcctgaaccatcaggagggtccccgcataagagatcatttaagccacggggagatcaacttacatgaattttcaaaagaaacaactaatcagttgcttgcattttctcttgtactgctactcagattcgttgatgactgtctgctatcagtttttaaggaaaaatcagccgtagaattgttgattagtcttgcagaaggctatagttctcgctgtcatccggtttttcagcttaaaaaacaggtgctgagctgtgaggagagcatcagggtttgggctctgctgcctttccccgaagaactcactcggcaagccgtcagattagaagataattctgaaacaaatgcctgccactctttgattacaaaaatgacggatgagctgtatcaccatatgcctgagaatcgttgtgtgttaaaggacttggatcgtcttcctactgagacgtggccccagcttctccgtgagctctgcagcacacctgttcccaccctgttctgccccaggattgtgctggaagtgctggttgtgctccgaagcatcagcgaacagtgccgccgtgtgtccagccaggtcaccgttgcctcagagctgagacacaggcagtgggtggaaaggacgctgcggtctcgccagcggcagaactacctgcgtatgtggagtagtatcagactactgtcccctgtgctcagcctgatactgttactcattgcgctggagttggtcaacattcatgctgtttgtgggaagaatgcgcatgagtatcagcagtacctaaagtttgtaaagtcgatcttgcagtacacggagaacctggtggcttacaccagttacgaaaagaacaagtggaatgaaactatcaatcttacacatacagctttgttgaaaatgtggacttttagtgagaagaaacaaatgttaatacatttagccaagaaatccacaagtaaagtactcttatgaaaacttgtaagtcaggatgcttttaattttaacagattttaacagcgtgtaaattaaaaacccaaagacagg

SEQ ID NO: 458257 - DNA, 3577 bp, Homo sapiens
attcacgcgcgccgcagcggggcaccggaagttatggaggtattaataggggaccctattaccacatgtctttctccctcagtgtatgatataatttgtaatcttgggtttcaactcagagaaaattgtgatatcaatagcattgtaactcagaatggtgaagtatgctggaaaacaatcacagactgtgtgagctacacagagtcagagcagggtctggattactggggaagcgtgaggctgctgggccctgtgtgtgaggctgtccattcacatttcttatctctgaccaaggggcaatttgaaattcgatatgcaccgtggttccagtggacaagttttccagagttatttcctgaaatatttgatgccttggaaagtctacaatctcctgctatttctcttagcttaatgaaactgacatcgtgtctagaacgagccttgggtgatgtatttttactgattgggaaggaatgcccctttcttttaagagatctgctttcatctgaggagcttgctcaagtcttcagtcagtctgtgatgaatgtgctaaaagtcttcgttggctctccgtgtggtctcaacctgcgtaacgtcttatggcatgggtttgcgtcacctgaagaaattcctccaaaatactgttcaatgatgatactgttgacggcaggattgggtcagttactgaagagttaccttcaaaacactaaacttacattggcacatcgctctttcatatctcttacaaacctcgaggatttgattgtttttcctgatgttacttatgaggtgctttcagtattagaagaagtgatgatgaaatctgcttttatattaaaaatcatgttaccatattgggaagttgcactggtcaagttcaagtcacacaggtttgctgactgcgccatattgttgctgacacaactggagactggacttaggaatgtttttgccacacttaacagatgtccaaaaagactcctgactgctgagtcaacagctctttataccacctttgatcaagtaagtaagtaaacttgtaaggtaacttgaaacaaacagaacgctgtcttcttttaaaatacaaattaaaatgcaaaattaaagatcagccataaatcatatacttacaggaaaatgtccatagtaatataaaccaaaaaaagctgataattgatatttccggttaattttggggcccagtgttaccaatctagctcccaaagctatccaaagctcaaagttggaaaataccaagggatctaacatgattagctataattatttagaggcttgcattttagatttaggggtgacatcttttttgtacaggaaatattccccgctactgttacaagtgtgtgggatacattgattcatttaatctgcatgttggcggtgtgaatagtagaaaactcacagttgaaaatgcctcttgtcagccacggagcgcacaggcatttgtgtgcgtaaccccgggtagcgttcatgtgcacctaaagtgtgacgacagcctatgggaaaccaagggaagggtcacctgtagaggtccggacattcggttttgcctttaagacaactattagatcctaagcgactgtgttgtggctgagttaaaaatgtgcctgtttacttgcagagcttcttccattaggtgaacaatctgttgtgattttaatgtgtaagacctttggtaatgtgaggaattgattagatagtgcagcccagtctctagaggatcagatctgtgggattggttggggtggttgggcaaagtccatggtgagttaagaaatgactttggaagtgactctaatgtgtacacaaacaacacacatgcacacaccacacatacatacacacacgaacacatacctccatgctgcatatacacacacaggcatacacacactctaatgtgtacacaaacacacatgcacataccacacatacacacacacacatgaacacatacctccatgccacacagacacacacaggcatacacatactctaatgtgtacacaacacacatgcacacaccacacacgaactcacacatccatgccacatatacacacacgggcatacacacatgcaggcacatacactacacacacacacacacacacacacaggcacagttgcatataaacacacaaatgtacacacccccacaccacatatgcacatacacatatacacaccacacatattcatagtcacatacacaaacacacatgtgtatacaattattaatatagtcttaaagtcattctgttggttaagaaaatatttcctgaacacctgtttgctgaattttaaagactgtccatttaatttgcttagaccttagataacaagttaggctaaaagtactatatccatcaactctgaaagttctgtatgtttatgtatggggaccagttaaccaatgtatttatttttgatgttttagatattggcaaaacacttgaatgatggtaaaatcaatcagcttcctcttttccttggagagcctgctatggaatttctctgggatttcctgaaccatcaggagggtccccgcataagagatcatttaagccacggggagatcaacttacatgaattttcaaaagaaacaactaatcagttgcttgcattttctcttgtactgctactcagattcgttgatgactgtctgctatcagtttttaaggaaaaatcagccgtagaattgttgattagtcttgcagaaggctatagttctcgctgtcatccggtttttcagcttaaaaaacaggtgctgagctgtgaggagagcatcagggtttgggctctgctgcctttccccgaagaactcactcggcaagccgtcagattagaagataattctgaaacaaatgcctgccactctttgattacaaaaatgacggatgagctgtatcaccatatgcctgagaatcgttgtgtgttaaaggacttggatcgtcttcctactgagacgtggccccagcttctccgtgagctctgcagcacacctgttcccaccctgttctgccccaggattgtgctggaagtgctggttgtgctccgaagcatcagcgaacagtgccgccgtgtgtccagccaggtcaccgttgcctcagagctgagacacaggcagtgggtggaaaggacgctgcggtctcgccagcggcagaactacctgcgtatgtggagtagtatcagactactgtcccctgtgctcagcctgatactgttactcattgcgctggagttggtcaacattcatgctgtttgtgggaagaatgcgcatgagtatcagcagtacctaaagtttgtaaagtcgatcttgcagtacacggagaacctggtggcttacaccagttacgaaaagaacaagtggaatgaaactatcaatcttacacatacagctttgttgaaaatgtggacttttagtgagaagaaacaaatgttaatacatttagccaagaaatccacaagtaaagtactcttatgaaaacttgtaagtcaggatgcttttaattttaacagattttaacagcgtgtaaattaaaaacccaaagacagg

SEQ ID NO: 458258 - DNA, 3523 bp, Homo sapiens
attcacgcgcgccgcagcggggcaccggaagttatggaggtattaataggggaccctattaccacatgtctttctccctcagtgtatgatataatttgtaatcttgggtttcaactcagagaaaattgtgatatcaatagcattgtaactcagaatggtgaagtatgctggaaaacaatcacagactgtgtgagctacacagagtcagagcagggtctggattactggggaagcgtgaggctgctgggccctgtgtgtgaggctgtccattcacatttcttatctctgaccaaggggcaatttgaaattcgatatgcaccgtggttccagtggacaagttttccagagttatttcctgaaatatttgatgccttggaaagtctacaatctcctgctatttctcttagcttaatgaaactgacatcgtgtctagaacgagccttgggtgatgtatttttactgattgggaaggaatgcccctttcttttaagagatctgctttcatctgaggagcttgctcaagtcttcagtcagtctgtgatgaatgtgctaaaagtcttcgttggctctccgtgtggtctcaacctgcgtaacgtcttatggcatgggtttgcgtcacctgaagaaattcctccaaaatactgttcaatgatgatactgttgacggcaggattgggtcagttactgaagagttaccttcaaaacactaaacttacattggcacatcgctctttcatatctcttacaaacctcgaggatttgattgtttttcctgatgttacttatgaggtgctttcagtattagaagaagtgatgatgaaatctgcttttatattaaaaatcatgttaccatattgggaagttgcactggtcaagttcaagtcacacaggtttgctgactgcgccatattgttgctgacacaactggagactggacttaggaatgtttttgccacacttaacagatgtccaaaaagactcctgactgctgagtcaacagctctttataccacctttgatcaagtaagtaagtaaacttgtaaggtaacttgaaacaaacagaacgctgtcttcttttaaaatacaaattaaaatgcaaaattaaagatcagccataaatcatatacttacaggaaaatgtccatagtaatataaaccaaaaaaagctgataattgatatttccggttaattttggggcccagtgttaccaatctagctcccaaagctatccaaagctcaaagttggaaaataccaagggatctaacatgattagctataattatttagaggcttgcattttagatttaggggtgacatcttttttgtacaggaaatattccccgctactgttacaagtgtgtgggatacattgattcatttaatctgcatgttggcggtgtgaatagtagaaaactcacagttgaaaatgcctcttgtcagccacggagcgcacaggcatttgtgtgcgtaaccccgggtagcgttcatgtgcacctaaagtgtgacgacagcctatgggaaaccaagggaagggtcacctgtagaggtccggacattcggttttgcctttaagacaactattagatcctaagcgactgtgttgtggctgagttaaaaatgtgcctgtttacttgcagagcttcttccattaggtgaacaatctgttgtgattttaatgtgtaagacctttggtaatgtgaggaattgattagatagtgcagcccagtctctagaggatcagatctgtgggattggttggggtggttgggcaaagtccatggtgagttaagaaatgactttggaagtgactctaatgtgtacacaaacaacacacatgcacacaccacacatacatacacacacgaacacatacctccatgctgcatatacacacacaggcatacacacactctaatgtgtacacaaacacacatgcacataccacacatacacacacacacatgaacacatacctccatgccacacagacacacacaggcatacacatactctaatgtgtacacaacacacatgcacacaccacacacgaactcacacatccatgccacatatacacacacgggcatacacacatgcaggcacatacactacacacacacacacacacacacacaggcacagttgcatataaacacacaaatgtacacacccccacaccacatatgcacatacacatatacacaccacacatattcatagtcacatacacaaacacacatgtgtatacaattattaatatagtcttaaagtcattctgttggttaagaaaatatttcctgaacacctgtttgctgaattttaaagactgtccatttaatttgcttagaccttagataacaagttaggctaaaagtactatatccatcaactctgaaagttctgtatgtttatgtatggggaccagttaaccaatgtatttatttttgatgttttagatattggcaaaacacttgaatgatggtaaaatcaatcagcttcctcttttccttggagagcctgctatggaatttctctgggatttcctgaaccatcaggagggtccccgcataagagatcatttaagccacggggagatcaacttacatgaattttcaaaagaaacaactaatcagttgcttgcattttctcttgtactgctactcagattcgttgatgactgtctgctatcagtttttaaggaaaaatcagccgtagaattgttgattagtcttgcagaaggctatagttctcgctgtcatccggtttttcagcttaaaaaacaggtgctgagctgtgaggagagcatcagggtttgggctctgctgcctttccccgaagaactcactcggcaagccgtcagattagaagataattctgaaacaaatgcctgccactctttgattacagacttggatcgtcttcctactgagacgtggccccagcttctccgtgagctctgcagcacacctgttcccaccctgttctgccccaggattgtgctggaagtgctggttgtgctccgaagcatcagcgaacagtgccgccgtgtgtccagccaggtcaccgttgcctcagagctgagacacaggcagtgggtggaaaggacgctgcggtctcgccagcggcagaactacctgcgtatgtggagtagtatcagactactgtcccctgtgctcagcctgatactgttactcattgcgctggagttggtcaacattcatgctgtttgtgggaagaatgcgcatgagtatcagcagtacctaaagtttgtaaagtcgatcttgcagtacacggagaacctggtggcttacaccagttacgaaaagaacaagtggaatgaaactatcaatcttacacatacagctttgttgaaaatgtggacttttagtgagaagaaacaaatgttaatacatttagccaagaaatccacaagtaaagtactcttatgaaaacttgtaagtcaggatgcttttaattttaacagattttaacagcgtgtaaattaaaaacccaaagacagg

SEQ ID NO: 458259 - DNA, 3436 bp, Homo sapiens
attcacgcgcgccgcagcggggcaccggaagttatggaggtattaataggggaccctattaccacatgtctttctccctcagtgtatgatataatttgtaatcttgggtttcaactcagagaaaattgtgatatcaatagcattgtaactcagaatggtgaagtatgctggaaaacaatcacagactgtgtgagctacacagagtcagagcagggtctggattactggggaagcgtgaggctgctgggccctgtgtgtgaggctgtccattcacatttcttatctctgaccaaggggcaatttgaaattcgatatgcaccgtggttccagtggacaagttttccagagttatttcctgaaatatttgatgccttggaaagtctacaatctcctgctatttctcttagcttaatgaaactgacatcgtgtctagaacgagccttgggtgatgtatttttactgattgggaaggaatgcccctttcttttaagagatctgctttcatctgaggagcttgctcaagtcttcagtcagtctgtgatgaatgtgctaaaagtcttcgttggctctccgtgtggtctcaacctgcgtaacgtcttatggcatgggtttgcgtcacctgaagaaattcctccaaaatactgttcaatgatgatactgttgacggcaggattgggtcagttactgaagagttaccttcaaaacactaaacttacattggcacatcgctctttcatatctcttacaaacctcgaggatttgattgtttttcctgatgttacttatgaggtgctttcagtattagaagaagtgatgatgaaatctgcttttatattaaaaatcatgttaccatattgggaagttgcactggtcaagttcaagtcacacaggtttgctgactgcgccatattgttgctgacacaactggagactggacttaggaatgtttttgccacacttaacagatgtccaaaaagactcctgactgctgagtcaacagctctttataccacctttgatcaagtaagtaagtaaacttgtaaggtaacttgaaacaaacagaacgctgtcttcttttaaaatacaaattaaaatgcaaaattaaagatcagccataaatcatatacttacaggaaaatgtccatagtaatataaaccaaaaaaagctgataattgatatttccggttaattttggggcccagtgttaccaatctagctcccaaagctatccaaagctcaaagttggaaaataccaagggatctaacatgattagctataattatttagaggcttgcattttagatttaggggtgacatcttttttgtacaggaaatattccccgctactgttacaagtgtgtgggatacattgattcatttaatctgcatgttggcggtgtgaatagtagaaaactcacagttgaaaatgcctcttgtcagccacggagcgcacaggcatttgtgtgcgtaaccccgggtagcgttcatgtgcacctaaagtgtgacgacagcctatgggaaaccaagggaagggtcacctgtagaggtccggacattcggttttgcctttaagacaactattagatcctaagcgactgtgttgtggctgagttaaaaatgtgcctgtttacttgcagagcttcttccattaggtgaacaatctgttgtgattttaatgtgtaagacctttggtaatgtgaggaattgattagatagtgcagcccagtctctagaggatcagatctgtgggattggttggggtggttgggcaaagtccatggtgagttaagaaatgactttggaagtgactctaatgtgtacacaaacaacacacatgcacacaccacacatacatacacacacgaacacatacctccatgctgcatatacacacacaggcatacacacactctaatgtgtacacaaacacacatgcacataccacacatacacacacacacatgaacacatacctccatgccacacagacacacacaggcatacacatactctaatgtgtacacaacacacatgcacacaccacacacgaactcacacatccatgccacatatacacacacgggcatacacacatgcaggcacatacactacacacacacacacacacacacacaggcacagttgcatataaacacacaaatgtacacacccccacaccacatatgcacatacacatatacacaccacacatattcatagtcacatacacaaacacacatgtgtatacaattattaatatagtcttaaagtcattctgttggttaagaaaatatttcctgaacacctgtttgctgaattttaaagactgtccatttaatttgcttagaccttagataacaagttaggctaaaagtactatatccatcaactctgaaagttctgtatgtttatgtatggggaccagttaaccaatgtatttatttttgatgttttagatattggcaaaacacttgaatgatggtaaaatcaatcagcttcctcttttccttggagagcctgctatggaatttctctgggatttcctgaaccatcaggagggtccccgcataagagatcatttaagccacggggagatcaacttacatgaattttcaaaagaaacaactaatcagttgcttgcattttctcttgtactgctactcagattcgttgatgactgtctgctatcagtttttaaggaaaaatcagccgtagaattgttgattagtcttgcagaaggctatagttctcgctgtcatccggtttttcagcttaaaaaacaggtgctgagctgtgaggagagcatcagggtttgggctctgctgcctttccccgaagaactcactcggcaagccgtcagattagaagataattctgaaacaaatgcctgccactctttgattacaaaaatgacggatgagctgtatcaccatatgcctgagaatcgttgtgtgttaaaggacttggatcgtcttcctactgagacgtggccccagcttctccgtgagctctgcagcacacctgttcccaccctgttctgccccaggattgtgctggaagtgctggttgtgctccgaagcatcagcgaacagtgccgccgtgtgtccagccaggtcaccgttgcctcagagctgagacacaggcagtgggtggaaaggacgctgcggtctcgccagcggcagaactacctgcgtatgtggagtagtatcagactactgtcccctgtgctcagcctgatactgttactcattgcgctggagttggtcaacattcatgctgtttgtgggaagaatgcgcatgagtatcagcagtacctaaagtttgtaaagtcgattctttgcagtacgcccgttttacgggcgtctgcataggtttggtcctggcctttctattagctcggagtaagattacacatgcaagcatcccacgttgct

SEQ ID NO: 458260 - DNA, 496 bp, Homo sapiens
agtactactgtgattgtcaattatgccttattatttattacattgtttctgtaggaaagtgaattctgcatttaaatttcagggaaccagtcagaagcatctggattaggcatttagtgatacaaggatccagaataacaaaaactatgtaccagccacattcacacaacaggtgatacccctataggttaattattctctagatattctaaattaagagacacagaatacttagtcttatgtgagtcaagagctctattctgtcttcactactgggtgtctactgttataaactggagaatatgtgtggttaaatgccatgtttttcatttttaattgatctttttcttattgctgtggttctttgcctttttaggatttcttgtaaaaacctcaaaatggttataaagagtatcacagatgtggtgttatggttagtgtgtactttgaaagtaatgaatgtttttatgtaattaaatatctttctgccaaaatt

SEQ ID NO: 458261 - DNA, 523 bp, Homo sapiens
agctgcagttggcggtcgggctagagaagagaggcgcctgcgcttgcgagctgggcttgtgagtggggctgccgagagggcaggcgtggggcgaggccaaaggactgaacccgcaggagcgtcacgggcgccggggcggctgccgacggcgggactgggttttctatcagatgttccacgtaataatgctggagttaagaagtttccattattttgctccaaaccagaagactctgttccctgtatatagaataggagtaatatttgaaaacaactggctgatgtttaaaactgaagattgtcatgattgtttatcctaatcccaatgctgaagtaagattgtcttggaaatactaagttgggtaagtattttttaaaggtttatgttgagtggtgagaaaatactaacagaaaaagatgggaaaatttttttgaggctaataattcaggaatttcagtaatttgtggctaattaagtttaggtttgaggcagttttcaaacaacagtgagttacatttgaaa

SEQ ID NO: 458262 - DNA, 2643 bp, Homo sapiens
tgcagtgagccgaccatcgtgccactgcactccagcctgggcgacagagcgagactccgtctcaaaaaaaaaaaaaaaaaaaaaaaaaaaaatcccaccacaccacctgtgtcttacatgatgttatctacgtcattggtggccactgtggctacagaggaagctgcacctatgacaaagttcagagctacaattccgatatcaacgaatggagcctcatcacctccagtccacatccagaatatggattgtgctcagttccgtttgaaaataagctctatctagtcggtggacaaactacaatcacagaatgctatgaccctgaacaaaatgaatggagagagatagctcccatgatggaaaggaggatggagtgcggtgccgtcatcatgaatggatgtatttatgtcactggaggatactcctactcaaagggaacgtatcttcagagcattgagaaatatgatccagatcttaataagtgggaaatagtgggtaatcttcccagtgccatgcggtctcatgggtgtgtttgtgtgtataatgtctaattgaatctgcagaaatgaccaagcaatcacttttttggagtatagttttataaaaaaagaatgcagggtttgaagttccttacctgataattgtgtctggcacatgataggggatcagtaaattgtaattcctaaccctactgtactcccaaacatggtgattcatggtcaagaaaaatcttatatatatgtatgtatacatatatgtgtatatatacgtatgtatgtatacatatatgtgtatatatacgtgtgtatgtatacatatatgtgtatatatacgtgtgtatgtatacatatatgtgtataatatatgtgtgtatatatatacacatatatacgtatatatgtatatatatatacacagttgaatcagtgggattaatacctataatctctggttttcaaaggtaatatggaatatttgacacttggtaaaaggtgaactacctttgtagtgaatcttttcctcttggtagcatcaacactggggataaatcagaaccattctgtggaatgaaatgtttctcaagagcctataatatagtagatagtgcatattaagatgtctggctgggcatggtggctcatgcctgtaatcccagcactttgggaggctgaggcgggaggatcacttgagcctagaagttggagactaacctggcgagaccctgtctcaaaaaaaaaaaaaaatcaatttagctagcaggaatttgacatttaaagagggaatcttctctacctctacaaaatcaacacttaacacttttttcaccttcagaattatttagaatgtggatttactttgtctagttttttcctttatagtgtaatttattgttactctctatttactgactaccagagatatacaaaatactgtgcaaaagattgttactgttcaaagagcttacaaactaaatttaaaagaatagcaagtctgaaaaatagaagatagtcaaatatttgtttatgctaagaactgtttttaattttcagctttgatgtaaattgctagcttaggtgtctttagttcaagcatgttaggaaatcctctttattcttaaatatagatacatgtctgcatatatgattgaattttagagccagaaagcatgtagagcagttgtgattagtagaaaatacactgacaagaagatatttgcatttatttcccaaagctgccagtaactagattttgtgacttaagtcatttaacctctccttgattagagcttcctgagccatgcacactggcactgcaaatcacagacaggcctagatacagatcccctcaccccttgctacatccaaaggtggcctgggtggctggagcctctgggccagaaccacctttgtccattttcctcagtgtgcctacagcatcgctttccatgtgtgccataacttgggaatagttgggatgtgttgcttaactcctttgcaccattagttatctgtgagaccatctattccacactcttcattttttaaaaagagacaataattatttttaactcactgaagtttaaaactacctagcatttctgattaaaaaaaatttagaaggaaaattttaatgcatttatttcagatggcgttttaaatagatacaaccctttggaaacacaatatggtactacatagcaagggctgtaaaaatgaccatatcctttgccccataaattctacttctatacttttaaccttaaaaataattcagaaaaaagataaatgcatgaagacatttatgtctgcattctttataataacaaaaattggggaaaaaaactccatgtcaagaaagtgggataagaaaaatagtgaagtattatactgccattaaaataattatttggaagactgtagaaacgtggacatgtttgatatggtaagtaaaatgagcacaatacaaaatagtatgcatactatgattgtgactttgtaaaatctttatgcatgtggaaggtaatctgcaaaacaaattcattgtgttagtgtagcgggatatggaatgactttatttatttaaatcttttctttaatattactttgtattttcaataaaaataaatcactgtacatagtaaga

SEQ ID NO: 458263 - DNA, 3008 bp, Homo sapiens
agctgcagttggcggtcgggctagagaagagaggcgcctgcgcttgcgagctgggcttgtgagtggggctgccgagagggcaggcgtggggcgaggccaaaggactgaacccgcaggagcgtcacgggcgccggggcggctgccgacggcgggactgggttttctatcagatgttccacgtaataatgctggagttaagaagtttccattattttgctccaaaccagaagactctgttccctgtatatagaataggagtaatatttgaaaacaactggctgatgtttaaaactgaagattgtcatgattgtttatcctaatcccaatgctgaagtaagattgtcttggaaatactaagttggggaaccagtcagaagcatctggattaggcatttagtgatacaaggatccagaataacaaaaactatgtaccagccacattcacacaacaggtgtgggaaatgctactgcctgtgtcttacatgatgttatctacgtcattggtggccactgtggctacagaggaagctgcacctatgacaaagttcagagctacaattccgatatcaacgaatggagcctcatcacctccagtccacatccagaatatggattgtgctcagttccgtttgaaaataagctctatctagtcggtggacaaactacaatcacagaatgctatgaccctgaacaaaatgaatggagagagatagctcccatgatggaaaggaggatggagtgcggtgccgtcatcatgaatggatgtatttatgtcactggaggatactcctactcaaagggaacgtatcttcagagcattgagaaatatgatccagatcttaataagtgggaaatagtgggtaatcttcccagtgccatgcggtctcatgggtgtgtttgtgtgtataatgtctaattgaatctgcagaaatgaccaagcaatcacttttttggagtatagttttataaaaaaagaatgcagggtttgaagttccttacctgataattgtgtctggcacatgataggggatcagtaaattgtaattcctaaccctactgtactcccaaacatggtgattcatggtcaagaaaaatcttatatatatgtatgtatacatatatgtgtatatatacgtatgtatgtatacatatatgtgtatatatacgtgtgtatgtatacatatatgtgtatatatacgtgtgtatgtatacatatatgtgtataatatatgtgtgtatatatatacacatatatacgtatatatgtatatatatatacacagttgaatcagtgggattaatacctataatctctggttttcaaaggtaatatggaatatttgacacttggtaaaaggtgaactacctttgtagtgaatcttttcctcttggtagcatcaacactggggataaatcagaaccattctgtggaatgaaatgtttctcaagagcctataatatagtagatagtgcatattaagatgtctggctgggcatggtggctcatgcctgtaatcccagcactttgggaggctgaggcgggaggatcacttgagcctagaagttggagactaacctggcgagaccctgtctcaaaaaaaaaaaaaaatcaatttagctagcaggaatttgacatttaaagagggaatcttctctacctctacaaaatcaacacttaacacttttttcaccttcagaattatttagaatgtggatttactttgtctagttttttcctttatagtgtaatttattgttactctctatttactgactaccagagatatacaaaatactgtgcaaaagattgttactgttcaaagagcttacaaactaaatttaaaagaatagcaagtctgaaaaatagaagatagtcaaatatttgtttatgctaagaactgtttttaattttcagctttgatgtaaattgctagcttaggtgtctttagttcaagcatgttaggaaatcctctttattcttaaatatagatacatgtctgcatatatgattgaattttagagccagaaagcatgtagagcagttgtgattagtagaaaatacactgacaagaagatatttgcatttatttcccaaagctgccagtaactagattttgtgacttaagtcatttaacctctccttgattagagcttcctgagccatgcacactggcactgcaaatcacagacaggcctagatacagatcccctcaccccttgctacatccaaaggtggcctgggtggctggagcctctgggccagaaccacctttgtccattttcctcagtgtgcctacagcatcgctttccatgtgtgccataacttgggaatagttgggatgtgttgcttaactcctttgcaccattagttatctgtgagaccatctattccacactcttcattttttaaaaagagacaataattatttttaactcactgaagtttaaaactacctagcatttctgattaaaaaaaatttagaaggaaaattttaatgcatttatttcagatggcgttttaaatagatacaaccctttggaaacacaatatggtactacatagcaagggctgtaaaaatgaccatatcctttgccccataaattctacttctatacttttaaccttaaaaataattcagaaaaaagataaatgcatgaagacatttatgtctgcattctttataataacaaaaattggggaaaaaaactccatgtcaagaaagtgggataagaaaaatagtgaagtattatactgccattaaaataattatttggaagactgtagaaacgtggacatgtttgatatggtaagtaaaatgagcacaatacaaaatagtatgcatactatgattgtgactttgtaaaatctttatgcatgtggaaggtaatctgcaaaacaaattcattgtgttagtgtagcgggatatggaatgactttatttatttaaatcttttctttaatattactttgtattttcaataaaaataaatcactgtacatagtaaga

SEQ ID NO: 458264 - DNA, 3127 bp, Homo sapiens
agctgcagttggcggtcgggctagagaagagaggcgcctgcgcttgcgagctgggcttgtgagtggggctgccgagagggcaggcgtggggcgaggccaaaggactgaacccgcaggagcgtcacgggcgccggggcggctgccgacggcgggactgggtcagtgagaagcccgtgggcccccgccctgcctgctactcccatccccacctgcgcgctccccatgggggacgacccccgattgggtccgatgcctaccctcggggtggagccggcaggttttctatcagatgttccacgtaataatgctggagttaagaagtttccattattttgctccaaaccagaagactctgttccctgtatatagaataggagtaatatttgaaaacaactggctgatgtttaaaactgaagattgtcatgattgtttatcctaatcccaatgctgaagtaagattgtcttggaaatactaagttggggaaccagtcagaagcatctggattaggcatttagtgatacaaggatccagaataacaaaaactatgtaccagccacattcacacaacaggtgtgggaaatgctactgcctgtgtcttacatgatgttatctacgtcattggtggccactgtggctacagaggaagctgcacctatgacaaagttcagagctacaattccgatatcaacgaatggagcctcatcacctccagtccacatccagaatatggattgtgctcagttccgtttgaaaataagctctatctagtcggtggacaaactacaatcacagaatgctatgaccctgaacaaaatgaatggagagagatagctcccatgatggaaaggaggatggagtgcggtgccgtcatcatgaatggatgtatttatgtcactggaggatactcctactcaaagggaacgtatcttcagagcattgagaaatatgatccagatcttaataagtgggaaatagtgggtaatcttcccagtgccatgcggtctcatgggtgtgtttgtgtgtataatgtctaattgaatctgcagaaatgaccaagcaatcacttttttggagtatagttttataaaaaaagaatgcagggtttgaagttccttacctgataattgtgtctggcacatgataggggatcagtaaattgtaattcctaaccctactgtactcccaaacatggtgattcatggtcaagaaaaatcttatatatatgtatgtatacatatatgtgtatatatacgtatgtatgtatacatatatgtgtatatatacgtgtgtatgtatacatatatgtgtatatatacgtgtgtatgtatacatatatgtgtataatatatgtgtgtatatatatacacatatatacgtatatatgtatatatatatacacagttgaatcagtgggattaatacctataatctctggttttcaaaggtaatatggaatatttgacacttggtaaaaggtgaactacctttgtagtgaatcttttcctcttggtagcatcaacactggggataaatcagaaccattctgtggaatgaaatgtttctcaagagcctataatatagtagatagtgcatattaagatgtctggctgggcatggtggctcatgcctgtaatcccagcactttgggaggctgaggcgggaggatcacttgagcctagaagttggagactaacctggcgagaccctgtctcaaaaaaaaaaaaaaatcaatttagctagcaggaatttgacatttaaagagggaatcttctctacctctacaaaatcaacacttaacacttttttcaccttcagaattatttagaatgtggatttactttgtctagttttttcctttatagtgtaatttattgttactctctatttactgactaccagagatatacaaaatactgtgcaaaagattgttactgttcaaagagcttacaaactaaatttaaaagaatagcaagtctgaaaaatagaagatagtcaaatatttgtttatgctaagaactgtttttaattttcagctttgatgtaaattgctagcttaggtgtctttagttcaagcatgttaggaaatcctctttattcttaaatatagatacatgtctgcatatatgattgaattttagagccagaaagcatgtagagcagttgtgattagtagaaaatacactgacaagaagatatttgcatttatttcccaaagctgccagtaactagattttgtgacttaagtcatttaacctctccttgattagagcttcctgagccatgcacactggcactgcaaatcacagacaggcctagatacagatcccctcaccccttgctacatccaaaggtggcctgggtggctggagcctctgggccagaaccacctttgtccattttcctcagtgtgcctacagcatcgctttccatgtgtgccataacttgggaatagttgggatgtgttgcttaactcctttgcaccattagttatctgtgagaccatctattccacactcttcattttttaaaaagagacaataattatttttaactcactgaagtttaaaactacctagcatttctgattaaaaaaaatttagaaggaaaattttaatgcatttatttcagatggcgttttaaatagatacaaccctttggaaacacaatatggtactacatagcaagggctgtaaaaatgaccatatcctttgccccataaattctacttctatacttttaaccttaaaaataattcagaaaaaagataaatgcatgaagacatttatgtctgcattctttataataacaaaaattggggaaaaaaactccatgtcaagaaagtgggataagaaaaatagtgaagtattatactgccattaaaataattatttggaagactgtagaaacgtggacatgtttgatatggtaagtaaaatgagcacaatacaaaatagtatgcatactatgattgtgactttgtaaaatctttatgcatgtggaaggtaatctgcaaaacaaattcattgtgttagtgtagcgggatatggaatgactttatttatttaaatcttttctttaatattactttgtattttcaataaaaataaatcactgtacatagtaaga

SEQ ID NO: 458265 - DNA, 1131 bp, Homo sapiens
agctgcagttggcggtcgggctagagaagagaggcgcctgcgcttgcgagctgggcttgtgagtggggctgccgagagggcaggcgtggggcgaggccaaaggactgaacccgcaggagcgtcacgggcgccggggcggctgccgacggcgggactgggttttctatcagatgttccacgtaataatgctggagttaagaagtttccattattttgctccaaaccagaagactctgttccctgtatatagaataggagtaatatttgaaaacaactggctgatgtttaaaactgaagattgtcatgattgtttatcctaatcccaatgctgaagtaagattgtcttggaaatactaagttggggtaatccaaatctatttctggaaccatgaaaattttgctagtttttgactttgacaatacaatcatagatgacaatagtgacacttggattgtacaatgtgctcccaacaaaaagcttcctattgaactacgtgattcttatcgaaaaggattttggacagaatttatgggcagagtctttaagtatttgggagataagggtgtaagagaacatgaaatgaaaagagcagtgacatcattgcctttcactccagggatggtggaactcttcaactttataagaaagaataaggataaatttgactgcattattatttcagattcaaattcggtcttcatagattgggttttagaagctgccagttttcatgacatatttgataaagtgtttacaaatccagcagcttttaatagcaatggtcatctcactgttgaaaattatcatactcattcttgcaatagatgcccaaagaatctttgcaaaaaggtagttttgatagaatttgtagataaacagttacaacagggagtgaattatacacaaattgtttatattggtgatggtggaaatgatgtctgtccagtcacctttttaaagaatgatgatgttgccatgccacggaaaggatataccttacagaaaactctttccagaatgtctcaaaatcttgagcctatggaatattctgttgtagtttggtcctcaggtgttgatataatttctcatttacaatttctaataaaggattaatatgtcagcaaaaaaaa

SEQ ID NO: 458266 - DNA, 1642 bp, Homo sapiens
gagctgcttgtggggtggagcggcactagctggcggcttccgagcgcctcttccaaagatggtcagaggggccggaggcgtccccgctcccgctcgctactagcccgcgggccagcgccgcgtcccgagccccggcgggagccatggctctaaaaggacaagaagattatatttatcttttcaaggattcaacacatccagtggattttctggatgcattcagaacattttacttggatggattatttactgatattactcttcagtgtccttcaggcataattttccattgtcaccgagccgttttagctgcttgcagcaattattttaaggcaatgttcacagctgacatgaaagaaaaatttaaaaataaaataaaactctctggcatccaccatgatattctggaaggccttgtaaattatgcatacacttcccaaattgaaataactaaaagaaatgttcaaagcctgcttgaggcagcggatctgctacagttcctttcagtaaagaaggcttgtgagcggttttggtaaggcacttggatattgataattgtattggaatgcactcctttgcagaatttcatgtgtgtccagaactagagaaggaatctcgaagaattctatgttcaaagtttaaggaaagtgtggcaacaagaagaatttctggaaatcagccttgaaaagttctctttatcttgtccagaaagaatctcagtgtttggaaagaagaagctatcatagagccagttattaagtggactgctcatgatgtagaaaatcgaattgaatgcctctataatctactgagctatatcaacattgatatagatccagtgtacttaaaaacagccttaggccttcaaagaagctgcctgctcaccgaaaataagatccgctccctaatatacaatgccttgaatcccatgcataaagagatttcccagaggtccacagccacaatgtatataattggaggctattactggcatcctttatcagaggttcacatatgggatcctttgacaaatgtttggattcagggagcagaaataccagattataccagggagagctatggtgttacatgtttaggacccaacatttatgtaactgggggctacaggacggataacatagaagctcttgacacagtgtggatctataacagtgaaagtgatgaatggacagaaggtttgccaatgctcaatgccaggtattaccactgtgcagtcaccttgggtggctgtgtctatgctttaggtggttacagaaaaggggctccagcagaagaggctgagttctatgatcctttaaaagagaaatggattcctattgcaaacatgattaaaggtgtgggaaatgctactgcctgtgtcttacatgatgttatctacgtcattggtggccactgtggctacagaggaagctgcacctatgacaaagttcagagctacaattccgatatcaacgaatggagcctcatcacctccagtccacatccaggatacatgaagaagatggccatctgcaaaccaggaagcaggtcatcatgagacaccagatctaacagcatcttgatcttggacttctcagccttcaaaactgcgagcaataaatttctgttgtttaagacaaaa

SEQ ID NO: 458267 - DNA, 691 bp, Homo sapiens
agctgcagttggcggtcgggctagagaagagaggcgcctgcgcttgcgagctgggcttgtgagtggggctgccgagagggcaggcgtggggcgaggccaaaggactgaacccgcaggagcgtcacgggcgccggggcggctgccgacggcgggactgggtcagtgagaagcccgtgggcccccgccctgcctgctactcccatccccacctgcgcgctccccatgggggacgacccccgattgggtccgatgcctaccctcggggtggagccggcaggttttctatcagatgttccacgtaataatgctggagttaagaagtttccattattttgctccaaaccagaagactctgttccctgtatatagaataggagtaatatttgaaaacaactggctgatgtttaaaactgaagattgtcatgattgtttatcctaatcccaatgctgaagtaagattgtcttggaaatactaagttggggaaccagtcagaagcatctggattaggcatttagtgatacaaggatccagaataacaaaaactatgtaccagccacattcacacaacaggatttcttgtaaaaacctcaaaatggttataaagagtatcacagatgtggtgttatggttagtgtgtactttgaaagtaatgaatgtttttatgtaattaaatatctttctgccaaaatt

SEQ ID NO: 458268 - DNA, 714 bp, Homo sapiens
ggctcactgcaacctctgcctcccgggttcaagcagttctcctgcctcagcctcctgagtagctgggattacaggcatgtgccaccacacctaggtgtgggaaatgctactgcctgtgtcttacatgatgttatctacgtcattggtggccactgtggctacagaggaagctgcacctatgacaaagttcagagctacaattccgatatcaacgaatggagcctcatcacctccagtccacatccagacggagtctcgctctcgcccaggctggagtgcagtggcgcgatctcgggtcactgcaagctccgcctcccaggttcacgccattctcctgcctcagcctcccgagtagctgggactacaggcgcccactaccatgcctggctagtttttttgtatttttagtagagactgggtttcaccgtgttagccaggatgatctgaatctcctgacctcgtgatccgcccgcctcggcctcccaaagtgctgggattacaggcgtgagccaccgcgcccggcctttctaaaacttttcaagtgtgcatttttattcaccaactttattttgtgtcttcactacgtagtttacttattgtaagcatgtacttattgtaagcatgtacttattttgtctcttcgctacgtagtttacttattgtaagcatgagcttttaatattaatattatatgtggcttagagtggaataatg

SEQ ID NO: 458269 - DNA, 3911 bp, Homo sapiens
gagctgcttgtggggtggagcggcactagctggcggcttccgagcgcctcttccaaagatggtcagaggggccggaggcgtccccgctcccgctcgctactagcccgcgggccagcgccgcgtcccgagccccggcgggagccatggctctaaaaggacaagaagattatatttatcttttcaaggattcaacacatccagtggattttctggatgcattcagaacattttacttggatggattatttactgatattactcttcagtgtccttcaggcataattttccattgtcaccgagccgttttagctgcttgcagcaattattttaaggcaatgttcacagctgacatgaaagaaaaatttaaaaataaaataaaactctctggcatccaccatgatattctggaaggccttgtaaattatgcatacacttcccaaattgaaataactaaaagaaatgttcaaagcctgcttgaggcagcggatctgctacagttcctttcagtaaagaaggcttgtgagcggttttggtaaggcacttggatattgataattgtattggaatgcactcctttgcagaatttcatgtgtgtccagaactagagaaggaatctcgaagaattctatgttcaaagtttaaggaaagtgtggcaacaagaagaatttctggaaatcagccttgaaaagttctctttatcttgtccagaaagaatctcagtgtttggaaagaagaagctatcatagagccagttattaagtggactgctcatgatgtagaaaatcgaattgaatgcctctataatctactgagctatatcaacattgatatagatccagtgtacttaaaaacagccttaggccttcaaagaagctgcctgctcaccgaaaataagatccgctccctaatatacaatgccttgaatcccatgcataaagagatttcccagaggtccacagccacaatgtatataattggaggctattactggcatcctttatcagaggttcacatatgggatcctttgacaaatgtttggattcagggagcagaaataccagattataccagggagagctatggtgttacatgtttaggacccaacatttatgtaactgggggctacaggacggataacatagaagctcttgacacagtgtggatctataacagtgaaagtgatgaatggacagaaggtttgccaatgctcaatgccaggtattaccactgtgcagtcaccttgggtggctgtgtctatgctttaggtggttacagaaaaggggctccagcagaagaggctgagttctatgatcctttaaaagagaaatggattcctattgcaaacatgattaaaggtgtgggaaatgctactgcctgtgtcttacatgatgttatctacgtcattggtggccactgtggctacagaggaagctgcacctatgacaaagttcagagctacaattccgatatcaacgaatggagcctcatcacctccagtccacatccagaatatggattgtgctcagttccgtttgaaaataagctctatctagtcggtggacaaactacaatcacagaatgctatgaccctgaacaaaatgaatggagagagatagctcccatgatggaaaggaggatggagtgcggtgccgtcatcatgaatggatgtatttatgtcactggaggatactcctactcaaagggaacgtatcttcagagcattgagaaatatgatccagatcttaataagtgggaaatagtgggtaatcttcccagtgccatgcggtctcatgggtgtgtttgtgtgtataatgtctaattgaatctgcagaaatgaccaagcaatcacttttttggagtatagttttataaaaaaagaatgcagggtttgaagttccttacctgataattgtgtctggcacatgataggggatcagtaaattgtaattcctaaccctactgtactcccaaacatggtgattcatggtcaagaaaaatcttatatatatgtatgtatacatatatgtgtatatatacgtatgtatgtatacatatatgtgtatatatacgtgtgtatgtatacatatatgtgtatatatacgtgtgtatgtatacatatatgtgtataatatatgtgtgtatatatatacacatatatacgtatatatgtatatatatatacacagttgaatcagtgggattaatacctataatctctggttttcaaaggtaatatggaatatttgacacttggtaaaaggtgaactacctttgtagtgaatcttttcctcttggtagcatcaacactggggataaatcagaaccattctgtggaatgaaatgtttctcaagagcctataatatagtagatagtgcatattaagatgtctggctgggcatggtggctcatgcctgtaatcccagcactttgggaggctgaggcgggaggatcacttgagcctagaagttggagactaacctggcgagaccctgtctcaaaaaaaaaaaaaaatcaatttagctagcaggaatttgacatttaaagagggaatcttctctacctctacaaaatcaacacttaacacttttttcaccttcagaattatttagaatgtggatttactttgtctagttttttcctttatagtgtaatttattgttactctctatttactgactaccagagatatacaaaatactgtgcaaaagattgttactgttcaaagagcttacaaactaaatttaaaagaatagcaagtctgaaaaatagaagatagtcaaatatttgtttatgctaagaactgtttttaattttcagctttgatgtaaattgctagcttaggtgtctttagttcaagcatgttaggaaatcctctttattcttaaatatagatacatgtctgcatatatgattgaattttagagccagaaagcatgtagagcagttgtgattagtagaaaatacactgacaagaagatatttgcatttatttcccaaagctgccagtaactagattttgtgacttaagtcatttaacctctccttgattagagcttcctgagccatgcacactggcactgcaaatcacagacaggcctagatacagatcccctcaccccttgctacatccaaaggtggcctgggtggctggagcctctgggccagaaccacctttgtccattttcctcagtgtgcctacagcatcgctttccatgtgtgccataacttgggaatagttgggatgtgttgcttaactcctttgcaccattagttatctgtgagaccatctattccacactcttcattttttaaaaagagacaataattatttttaactcactgaagtttaaaactacctagcatttctgattaaaaaaaatttagaaggaaaattttaatgcatttatttcagatggcgttttaaatagatacaaccctttggaaacacaatatggtactacatagcaagggctgtaaaaatgaccatatcctttgccccataaattctacttctatacttttaaccttaaaaataattcagaaaaaagataaatgcatgaagacatttatgtctgcattctttataataacaaaaattggggaaaaaaactccatgtcaagaaagtgggataagaaaaatagtgaagtattatactgccattaaaataattatttggaagactgtagaaacgtggacatgtttgatatggtaagtaaaatgagcacaatacaaaatagtatgcatactatgattgtgactttgtaaaatctttatgcatgtggaaggtaatctgcaaaacaaattcattgtgttagtgtagcgggatatggaatgactttatttatttaaatcttttctttaatattactttgtattttcaataaaaataaatcactgtacatagtaaga

SEQ ID NO: 458270 - DNA, 3858 bp, Homo sapiens
gagctgcttgtggggtggagcggcactagctggcggcttccgagcgcctcttccaaagatggtcagaggggccggaggcgtccccgctcccgctcgctactagcccgcgggccagcgccgcgtcccgagccccggcgggagccatggctctaaaaggacaagaagattatatttatcttttcaaggattcaacacatccagtggattttctggatgcattcagaacattttacttggatggattatttactgatattactcttcagtgtccttcaggcataattttccattgtcaccgagccgttttagctgcttgcagcaattattttaaggcaatgttcacagctgacatgaaagaaaaatttaaaaataaaataaaactctctggcatccaccatgatattctggaaggccttgtaaattatgcatacacttcccaaattgaaataactaaaagaaatgttcaaagcctgcttgaggcagcggatctgctacagttcctttcagtaaagaaggcttgtgagcggttttggtaaggcacttggatattgataattgtattggaatgcactcctttgcagaatttcatgtgtgtccagaactagagaaggaatctcgaagaattctatgttcaaagtttaaggaaagtgtggcaacaagaagaatttctggaaatcagccttgaaaagttctctttatcttgtccagaaagaatctcagtgtttggaaagaagaagctatcatagagccagttattaagtggactgctcatgatgtagaaaatcgaattgaatgcctctataatctactgagctatatcaacattgatatagatccagtgtacttaaaaacagccttaggccttcaaagaagctgcctgctcaccgaaaataagatccgctccctaatatacaatgccttgaatcccatgcataaagagatttcccagaggtccacagccacaatgtatataattggaggctattactggcatcctttatcagaggttcacatatgggatcctttgacaaatgtttggattcagggagcagaaataccagattataccagggagagctatggtgttacatgtttaggacccaacatttatgtaactgggggctacaggacggataacatagaagctcttgacacagtgtggatctataacagtgaaagtgatgaatggacagaaggtttgccaatgctcaatgccaggtattaccactgtgcagtcaccttgggtggctgtgtctatgctttaggtggttacagaaaaggggctccagcagaagaggctgagttctatgatcctttaaaagagaaatggattcctattgcaaacatgattaaaggtgtgggaaatgctactgcctgtgtcttacatgatgttatctacgtcattggtggccactgtggctacagaggaagctgcacctatgacaaagttcagagctacaattccgatatcaacgaatggagcctcatcacctccagtccacatccagaatatggattgtgctcagttccgtttgaaaataagctctatctagtcggtggacaaactacaatcacagaatgctatgaccctgaacaaaatgaatggagagagatagctcccatgatggaaaggaggatggagtgcggtgccgtcatcatgaatggatgtatttatgtcactggaggatactcctactcaaagggaacgtatcttcagagcattgagaaatatgatccagatcttaataagtgggaaatagtgggtaatcttcccagtgccatgcggtctcatgggtgtgtttgtgtgtataatgtctaattgaatctgcagaaatgaccaagcaatcacttttttggagtatagttttataaaaaaagaatgcagggtttgaagttccttacctgataattgtgtctggcacatgataggggatcagtaaattgtaattcctaaccctactgtactcccaaacatggtgattcatggtcaagaaaaatcttatatatatgtatgtatacatatatgtgtatatatacgtatgtatgtatacatatatgtgtatatatacgtgtgtatgtatacatatatgtgtatatatacgtgtgtatgtatacatatatgtgtataatatatgtgtgtatatatatacacatatatacgtatatatgtatatatatatacacagttgaatcagtgggattaatacctataatctctggttttcaaaggtaatatggaatatttgacacttggtaaaaggtgaactacctttgtagtgaatcttttcctcttggtagcatcaacactggggataaatcagaaccattctgtggaatgaaatgtttctcaagagcctataatatagtagatagtgcatattaagatgtctggctgggcatggtggctcatgcctgtaatcccagcactttgggaggctgaggcgggaggatcacttgagcctagaagttggagactaacctggcgagaccctgtctcaaaaaaaaaaaaaaatcaatttagctagcaggaatttgacatttaaagagggaatcttctctacctctacaaaatcaacacttaacacttttttcaccttcagaattatttagaatgtggatttactttgtctagttttttcctttatagtgtaatttattgttactctctatttactgactaccagagatatacaaaatactgtgcaaaagattgttactgttcaaagagcttacaaactaaatttaaaagaatagcaagtctgaaaaatagaagatagtcaaatatttgtttatgctaagaactgtttttaattttcagctttgatgtaaattgctagcttaggtgtctttagttcaagcatgttaggaaatcctctttattcttaaatatagatacatgtctgcatatatgattgaattttagagccagaaagcatgtagagcagttgtgattagtagtagattttgtgacttaagtcatttaacctctccttgattagagcttcctgagccatgcacactggcactgcaaatcacagacaggcctagatacagatcccctcaccccttgctacatccaaaggtggcctgggtggctggagcctctgggccagaaccacctttgtccattttcctcagtgtgcctacagcatcgctttccatgtgtgccataacttgggaatagttgggatgtgttgcttaactcctttgcaccattagttatctgtgagaccatctattccacactcttcattttttaaaaagagacaataattatttttaactcactgaagtttaaaactacctagcatttctgattaaaaaaaatttagaaggaaaattttaatgcatttatttcagatggcgttttaaatagatacaaccctttggaaacacaatatggtactacatagcaagggctgtaaaaatgaccatatcctttgccccataaattctacttctatacttttaaccttaaaaataattcagaaaaaagataaatgcatgaagacatttatgtctgcattctttataataacaaaaattggggaaaaaaactccatgtcaagaaagtgggataagaaaaatagtgaagtattatactgccattaaaataattatttggaagactgtagaaacgtggacatgtttgatatggtaagtaaaatgagcacaatacaaaatagtatgcatactatgattgtgactttgtaaaatctttatgcatgtggaaggtaatctgcaaaacaaattcattgtgttagtgtagcgggatatggaatgactttatttatttaaatcttttctttaatattactttgtattttcaataaaaataaatcactgtacatagtaaga

SEQ ID NO: 458271 - DNA, 1250 bp, Homo sapiens
agctgcagttggcggtcgggctagagaagagaggcgcctgcgcttgcgagctgggcttgtgagtggggctgccgagagggcaggcgtggggcgaggccaaaggactgaacccgcaggagcgtcacgggcgccggggcggctgccgacggcgggactgggtcagtgagaagcccgtgggcccccgccctgcctgctactcccatccccacctgcgcgctccccatgggggacgacccccgattgggtccgatgcctaccctcggggtggagccggcaggttttctatcagatgttccacgtaataatgctggagttaagaagtttccattattttgctccaaaccagaagactctgttccctgtatatagaataggagtaatatttgaaaacaactggctgatgtttaaaactgaagattgtcatgattgtttatcctaatcccaatgctgaagtaagattgtcttggaaatactaagttggggtaatccaaatctatttctggaaccatgaaaattttgctagtttttgactttgacaatacaatcatagatgacaatagtgacacttggattgtacaatgtgctcccaacaaaaagcttcctattgaactacgtgattcttatcgaaaaggattttggacagaatttatgggcagagtctttaagtatttgggagataagggtgtaagagaacatgaaatgaaaagagcagtgacatcattgcctttcactccagggatggtggaactcttcaactttataagaaagaataaggataaatttgactgcattattatttcagattcaaattcggtcttcatagattgggttttagaagctgccagttttcatgacatatttgataaagtgtttacaaatccagcagcttttaatagcaatggtcatctcactgttgaaaattatcatactcattcttgcaatagatgcccaaagaatctttgcaaaaaggtagttttgatagaatttgtagataaacagttacaacagggagtgaattatacacaaattgtttatattggtgatggtggaaatgatgtctgtccagtcacctttttaaagaatgatgatgttgccatgccacggaaaggatataccttacagaaaactctttccagaatgtctcaaaatcttgagcctatggaatattctgttgtagtttggtcctcaggtgttgatataatttctcatttacaatttctaataaaggattaatatgtcagcaaaaaaaa

SEQ ID NO: 458272 - DNA, 642 bp, Homo sapiens
aggcgtgagccacggcgccctgccggcatgaagttttgaacttgccattttgccgctctagtgctgcctaaggcactttgaaggcagtaattgcagaggcatttcgtgccttcaaagctcagtcccaacctaagttccttaccctctgagatgatcccaggagtggcctcctctgttgcatgacatttagatccagggctctctgaagcctatggacttagtaccattcatgtgagatggagtgatggcaggaaaagaattctgtgttgcaactgctgtgccctgaagttgagacctcagttgaaggtaatgataaaaaaagaaatgctaggtgcattattactgcttcatctctacttccttgggttagttaaaaggcatttaccagattagttaacactgaaaacaggatctgtcacgagccaagtatttcagtgtgtgttttgtgttttgctcaaaataaccctggtatccaacactcacattaaacaccacaggaagattttggttgaatgtgtactgaaggttgaggggtgcctgcaacgcaatctcatggacttacctttttttctgtactgactagaaactgattgcactatagccaaattacataccagcacaaagggaattcagcggcaggcc

SEQ ID NO: 458273 - DNA, 449 bp, Homo sapiens
aaatgaagtttcgctcttgttgcccaggctggagtgcaatggcatgatctcggctcaccgcaacctctgcctcctgggttgaagcaattctcctgcttcagcctctcgagtagctgggattacaggcatgtgccaccatgcctggctaattttgtatttttagtagggacggggtttctccatgttggtcaggctggtcccgaactcctgacctcaggtggtccgcccgcctcggcctcccaaagtgctgggattacaggcgtgagccacggcgccctgccggcatgaagttttgaacttgccattttgccgctctagtgctgcctaaggcactttgaaggcagtaattgcagaggcatttcgtgccttcaaagctcagtcccaacctaagttccttaccctctgagatgatcccaggagtggcctcctctgttgcatgacatttagat

SEQ ID NO: 458274 - DNA, 306 bp, Homo sapiens
aggcgtgagccacggcgccctgccggcatgaagttttgaacttgccattttgccgctctagtgctgcctaaggcactttgaaggcagtaattgcagaggcatttcgtgccttcaaagctcagtcccaacctaagttccttaccctctgagatgatcccaggagtggcctcctctgttgcatgacatttagatccagggctctctgaagcctatggacttagtaccattcatgtgagatggagtgatggcaggaaaagaattctgtgttgcaactgctgtgccctgaagttgagacctcagttgaag

SEQ ID NO: 458275 - DNA, 455 bp, Homo sapiens
accgttgcggtaacaacgccccgccccgtcgggcgggcgggctgcgcgaggctggctggcggcgggagccggaggaggagcggccgccgccgccaccgccgccgccatagagactgtagccgtggagactgttacttaccaacggggaccaacacgcagcagccgctgccgccgccgcgggagccgctgcccgaactcccggcccgaactccagctgtgctgagatctgttttacataccgtaaagctcacccatttgaagtgtatggttcagtgggtcttagtatactatcttcacagaacattttcatcactccgaaaagaagaagaaaccctgaacctgccatgaacagccacttgcccttcctcctcccagccccgggcaactgtgaatccactttctgtctctgtggatttgcctgttttgaacctttcatataaacagaatcacacact

SEQ ID NO: 458276 - DNA, 3993 bp, Homo sapiens
accgttgcggtaacaacgccccgccccgtcgggcgggcgggctgcgcgaggctggctggcggcgggagccggaggaggagcggccgccgccgccaccgccgccgccatagagactgtagccgtggagactgttacttaccaacggggaccaacacgcagcagccgctgccgccgccgcgggagccgctgcccgaactcccggcccgaactccagacctgagcatgcagaattccgagggtggagcggattcgccagcgtccgtggctctgcgtccctcggcggcagccccgcctgtgccagcctccccgcagagggtgttggtccaggcagccagctccaatcccaaaggggcccagatgcagccgatctccctccccagagttcagcaggtaccccagcaggtgcagccggtgcagcacgtgtatcctgcccaggtgcagtacgtggaagggggagacgccgtctacaccaatggagccatacgaacagcctacacctacaaccccgagcctcagatgtacgcccccagcagcacggcttcttacttcgaggccccaggcggtgcccaggtgaccgtggcagcctcgtccccgccagcggtcccctcccacagcatggtgggcatcaccatggatgtcggggggagccccatcgtctccagcgcgggagcctatctcatccacggggggatggacagcaccagacactccctggcccacacctcccgctcatcgcccgccacgctccagtggctgttggataattatgaaacagcggaaggtgtgagtctccccagaagttctctttacaaccactaccttcggcactgccaggagcacaagctagacccagtgaacgccgcctccttcgggaaactgatccgttctgtgtttatggggctgagaacgcggcggctgggcaccaggggcaactcgaagtaccattactatgggattcgtctgaagccggactcaccactgaaccggctgcaggaggacacgcagtacatggccatgcggcagcagcccatgcaccagaagcccaggtaccggccagcccagaagacggacagcctcggggacagcggctcccacagcggcctgcacagcactccggaacagaccatggccgtgcagagccagcaccaccagcagtacatagatgtctcccacgtcttccccgagttcccagcgcccgacctgggcagcttcctgctgcaggacggcgtcacactgcacgacgtcaaggccctgcagctggtgtacagacggcactgcgaggcaactgtagatgtggtgatgaacctccagttccactacatcgagaagctgtggctctccttctggaactctaaggcctcctccagcgacggccccacctctcttcctgccagtgacgaagaccccgagggcgccgtcctgcccaaggacaagcttatctccctgtgtcagtgcgaccccatcctcaggtggatgaggagctgcgaccacatcctctaccaggcgctggtggagattctcatccccgacgtgctgaggccggtccccagtaccttgacacaggccatccgtaactttgccaagagcttggaaggctggttgacaaatgccatgagtgacttcccacaacaggtcatccagaccaaggtgggcgtcgtcagtgccttcgcccagacgctgcggcgctacacgtccctcaaccacctggcgcaggcggcccgggcggtgctgcagaacacgtcccagatcaaccagatgctcagcgacctcaaccgcgtggactttgccaacgtgcaggagcaggcctcgtgggtgtgccagtgcgaggagagtgtggtgcagcggctggagcaggatttcaagctgaccctgcagcagcagagctccctggaccagtgggccagctggctggacagtgtggtcacccaggtcctgaagcagcatgccggcagccccagcttccccaaggccgcccggcagttcttgctgaaatggtccttttacagctccatggtgatccgggacctgaccctgcgcagcgctgccagcttcggctccttccacctcatccgcctgctctacgacgagtacatgttctacctggtggagcaccgcgtcgcggaggccaccggagagacgccgatcgctgtgatgggagagttcaacgatctcgcctctctgtcgctgacgctgctcgacaaagatgacatgggcgatgagcagcgtggcagcgaggcgggcccagacgcccgcagcctgggtgagcccctggtaaagcgggagcgcagtgaccccaaccactccctgcagggcatctagcagccccggccggcgcctcctcgaggttccaaaagatgccgcctggtcactctgggaacctggatttcaccggctccaccaaattagtgcctcttagatgatgtgatgtttactttgactcaagcgggggctcccggggtcagtgttcaagaaggaaagcagttgttgaagctacagaagcccaggccagggctcccactggctgtagctgtgctctgggtccccaggtccctgcgcagccaccagggccccaccagaccatgggttccttattctggacaaaccctcctctgctggaaccctggactttggccccagtccctttaagagctgaaagggctgtgctgagagcactggcctctgcactcaactggaaccaattttcaccatgattttaaaaattaaaaaaacctggcagagcccgactagaaagggacggcctctcccctcctacctgccaccgctggggaggcacagagctcgccagcgtccctggagtcccctcaggaatggaaagtggagtgcccttgtctggtagcaccatgtgggagggacccagctgggcgcagcgccctgtggccttttagatccagacctccctgccggatgccccgaggcgggaggccggctgtgctgcaggaacccatctccagatgccaaaggacttgaggggcagctgacaatcgctgtgtcccggcagatccgcagctcgaaaaagaacaagccacagaaacgggctcgctcgtgccaggacacagcagtgtctttcaaaaaatcaaaaccagaagttttatcagcagcaggaaggatgtgggactctgtccaagttcaccgtcaccatcaagccactggctgtggaaggagtttgtccaacagggtcagtgtcacagccacaacttcagaaagcagccatcccgcgtgtcgtccaaacagcagtgcctgcgtcccgctccacggagtcttccagaacacctccctctgaactaatcccggagcaccccacccccagcgagtcccacctggacctcttcaaagtcaaaactcttctctcgggacaaacaaatattcgggactttcgaagccctgaacttgagacaccaagtttgtctccatggaaacacgtagccgctgcagttggacagctgcgtgctggagttctgtccccaaaccaactgcagagaagaaagacgagcctcggcccaggacgcgatttctaacgaaatgcaatagttttctctttttggaaaaatgtttataccaatagttttgtgcgctaattgttattagaacgtttcttatgaatgtgtacattgcagtatattcagtcccaaatgttttgttctcattcacacagaaggtactaatgtcagctcacgtggcctttaaaaacctacttccccgcccgcaggagctcagagcatcgctgggcctgcgccagagtgaggggtgcaggaagacaaagacgcgtgctcactttagaaacgaaaagctgggaataatcacactgtttgtctggtcgtatagcccaaaccttagttgaaatcagacagaaagaatgtctttaaaatatacatctcctctccttggagacactgaagctcacagttaacggattgtaatgcccggcttttcctcactcctggtaaccaatacaagctggtttctgccttaaac

SEQ ID NO: 458277 - DNA, 3463 bp, Homo sapiens
accgttgcggtaacaacgccccgccccgtcgggcgggcgggctgcgcgaggctggctggcggcgggagccggaggaggagcggccgccgccgccaccgccgccgccatagagactgtagccgtggagactgttacttaccaacggggaccaacacgcagcagccgctgccgccgccgcgggagccgctgcccgaactcccggcccgaactccagctccagtggctgttggataattatgaaacagcggaaggtgtgagtctccccagaagttctctttacaaccactaccttcggcactgccaggagcacaagctagacccagtgaacgccgcctccttcgggaaactgatccgttctgtgtttatggggctgagaacgcggcggctgggcaccaggggcaactcgaagtaccattactatgggattcgtctgaagccggactcaccactgaaccggctgcaggaggacacgcagtacatggccatgcggcagcagcccatgcaccagaagcccaggtaccggccagcccagaagacggacagcctcggggacagcggctcccacagcggcctgcacagcactccggaacagaccatggccgtgcagagccagcaccaccagcagtacatagatgtctcccacgtcttccccgagttcccagcgcccgacctgggcagcttcctgctgcaggacggcgtcacactgcacgacgtcaaggccctgcagctggtgtacagacggcactgcgaggcaactgtagatgtggtgatgaacctccagttccactacatcgagaagctgtggctctccttctggaactctaaggcctcctccagcgacggccccacctctcttcctgccagtgacgaagaccccgagggcgccgtcctgcccaaggacaagcttatctccctgtgtcagtgcgaccccatcctcaggtggatgaggagctgcgaccacatcctctaccaggcgctggtggagattctcatccccgacgtgctgaggccggtccccagtaccttgacacaggccatccgtaactttgccaagagcttggaaggctggttgacaaatgccatgagtgacttcccacaacaggtcatccagaccaaggtgggcgtcgtcagtgccttcgcccagacgctgcggcgctacacgtccctcaaccacctggcgcaggcggcccgggcggtgctgcagaacacgtcccagatcaaccagatgctcagcgacctcaaccgcgtggactttgccaacgtgcaggagcaggcctcgtgggtgtgccagtgcgaggagagtgtggtgcagcggctggagcaggatttcaagctgaccctgcagcagcagagctccctggaccagtgggccagctggctggacagtgtggtcacccaggtcctgaagcagcatgccggcagccccagcttccccaaggccgcccggcagttcttgctgaaatggtccttttacagctccatggtgatccgggacctgaccctgcgcagcgctgccagcttcggctccttccacctcatccgcctgctctacgacgagtacatgttctacctggtggagcaccgcgtcgcggaggccaccggagagacgccgatcgctgtgatgggagagttcaacgatctcgcctctctgtcgctgacgctgctcgacaaagatgacatgggcgatgagcagcgtggcagcgaggcgggcccagacgcccgcagcctgggtgagcccctggtaaagcgggagcgcagtgaccccaaccactccctgcagggcatctagcagccccggccggcgcctcctcgaggttccaaaagatgccgcctggtcactctgggaacctggatttcaccggctccaccaaattagtgcctcttagatgatgtgatgtttactttgactcaagcgggggctcccggggtcagtgttcaagaaggaaagcagttgttgaagctacagaagcccaggccagggctcccactggctgtagctgtgctctgggtccccaggtccctgcgcagccaccagggccccaccagaccatgggttccttattctggacaaaccctcctctgctggaaccctggactttggccccagtccctttaagagctgaaagggctgtgctgagagcactggcctctgcactcaactggaaccaattttcaccatgattttaaaaattaaaaaaacctggcagagcccgactagaaagggacggcctctcccctcctacctgccaccgctggggaggcacagagctcgccagcgtccctggagtcccctcaggaatggaaagtggagtgcccttgtctggtagcaccatgtgggagggacccagctgggcgcagcgccctgtggccttttagatccagacctccctgccggatgccccgaggcgggaggccggctgtgctgcaggaacccatctccagatgccaaaggacttgaggggcagctgacaatcgctgtgtcccggcagatccgcagctcgaaaaagaacaagccacagaaacgggctcgctcgtgccaggacacagcagtgtctttcaaaaaatcaaaaccagaagttttatcagcagcaggaaggatgtgggactctgtccaagttcaccgtcaccatcaagccactggctgtggaaggagtttgtccaacagggtcagtgtcacagccacaacttcagaaagcagccatcccgcgtgtcgtccaaacagcagtgcctgcgtcccgctccacggagtcttccagaacacctccctctgaactaatcccggagcaccccacccccagcgagtcccacctggacctcttcaaagtcaaaactcttctctcgggacaaacaaatattcgggactttcgaagccctgaacttgagacaccaagtttgtctccatggaaacacgtagccgctgcagttggacagctgcgtgctggagttctgtccccaaaccaactgcagagaagaaagacgagcctcggcccaggacgcgatttctaacgaaatgcaatagttttctctttttggaaaaatgtttataccaatagttttgtgcgctaattgttattagaacgtttcttatgaatgtgtacattgcagtatattcagtcccaaatgttttgttctcattcacacagaaggtactaatgtcagctcacgtggcctttaaaaacctacttccccgcccgcaggagctcagagcatcgctgggcctgcgccagagtgaggggtgcaggaagacaaagacgcgtgctcactttagaaacgaaaagctgggaataatcacactgtttgtctggtcgtatagcccaaaccttagttgaaatcagacagaaagaatgtctttaaaatatacatctcctctccttggagacactgaagctcacagttaacggattgtaatgcccggcttttcctcactcctggtaaccaatacaagctggtttctgccttaaac

SEQ ID NO: 458278 - DNA, 2143 bp, Homo sapiens
accgttgcggtaacaacgccccgccccgtcgggcgggcgggctgcgcgaggctggctggcggcgggagccggaggaggagcggccgccgccgccaccgccgccgccatagagactgtagccgtggagactgttacttaccaacggggaccaacacgcagcagccgctgccgccgccgcgggagccgctgcccgaactcccggcccgaactccagacctgagcatgcagaattccgagggtggagcggattcgccagcgtccgtggctctgcgtccctcggcggcagccccgcctgtgccagcctccccgcagagggtgttggtccaggcagccagctccaatcccaaaggggcccagatgcagccgatctccctccccagagttcagcaggtaccccagcaggtgcagccggtgcagcacgtgtatcctgcccaggtgcagtacgtggaagggggagacgccgtctacaccaatggagccatacgaacagcctacacctacaaccccgagcctggtcactctgggaacctggatttcaccggctccaccaaattagtgcctcttagatgatgtgatgtttactttgactcaagcgggggctcccggggtcagtgttcaagaaggaaagcagttgttgaagctacagaagcccaggccagggctcccactggctgtagctgtgctctgggtccccaggtccctgcgcagccaccagggccccaccagaccatgggttccttattctggacaaaccctcctctgctggaaccctggactttggccccagtccctttaagagctgaaagggctgtgctgagagcactggcctctgcactcaactggaaccaattttcaccatgattttaaaaattaaaaaaacctggcagagcccgactagaaagggacggcctctcccctcctacctgccaccgctggggaggcacagagctcgccagcgtccctggagtcccctcaggaatggaaagtggagtgcccttgtctggtagcaccatgtgggagggacccagctgggcgcagcgccctgtggccttttagatccagacctccctgccggatgccccgaggcgggaggccggctgtgctgcaggaacccatctccagatgccaaaggacttgaggggcagctgacaatcgctgtgtcccggcagatccgcagctcgaaaaagaacaagccacagaaacgggctcgctcgtgccaggacacagcagtgtctttcaaaaaatcaaaaccagaagttttatcagcagcaggaaggatgtgggactctgtccaagttcaccgtcaccatcaagccactggctgtggaaggagtttgtccaacagggtcagtgtcacagccacaacttcagaaagcagccatcccgcgtgtcgtccaaacagcagtgcctgcgtcccgctccacggagtcttccagaacacctccctctgaactaatcccggagcaccccacccccagcgagtcccacctggacctcttcaaagtcaaaactcttctctcgggacaaacaaatattcgggactttcgaagccctgaacttgagacaccaagtttgtctccatggaaacacgtagccgctgcagttggacagctgcgtgctggagttctgtccccaaaccaactgcagagaagaaagacgagcctcggcccaggacgcgatttctaacgaaatgcaatagttttctctttttggaaaaatgtttataccaatagttttgtgcgctaattgttattagaacgtttcttatgaatgtgtacattgcagtatattcagtcccaaatgttttgttctcattcacacagaaggtactaatgtcagctcacgtggcctttaaaaacctacttccccgcccgcaggagctcagagcatcgctgggcctgcgccagagtgaggggtgcaggaagacaaagacgcgtgctcactttagaaacgaaaagctgggaataatcacactgtttgtctggtcgtatagcccaaaccttagttgaaatcagacagaaagaatgtctttaaaatatacatctcctctccttggagacactgaagctcacagttaacggattgtaatgcccggcttttcctcactcctggtaaccaatacaagctggtttctgccttaaac

SEQ ID NO: 458279 - DNA, 467 bp, Homo sapiens
gagaccctgtcgcaaaaaaacaaacaaacaaacaaaaaaaaaaaacagaaaccagggacagtcctgtgagccaaggctgggcctctgtccacaactctagtttccactgcactggaggagcgttgtcattctcctggtcccgcccccacgtatacagaggagccagggcgcacagacacgctagcagagctctggggatcagtcgcagctccctgaactgtgtgggcccgtttggaatatgtcgtctgtacattactgtctcctcagtgtctttctaggcgtgccgactgtgggcgggaacattgtcatttggtactaaatgttcataaaggcaatagaagacacgtctagcttgaataatctgcaggcaactcacgagggcgtgactggcggtaacgcagcgtatccgatgtttcaggtgcagccggtgcagcacgtgtatcctgcccaggtgcagtacgtggaag

SEQ ID NO: 458280 - DNA, 243 bp, Homo sapiens
cggccgccgccgccaccgccgccgccatagagactgtagccgtggagactgttacttaccaacggggaccaacacgcagcagccgctgccgccgccgcgggagccgctgcccgaactcccggcccgaactccaggtgaccgatgcgaccgccccgggcccagcccggccggggagtgtggggggcggcggggaccccgttcgggggccggggggcgggcagcacgtccccgccgctcacccca

SEQ ID NO: 458281 - DNA, 4068 bp, Homo sapiens
accgttgcggtaacaacgccccgccccgtcgggcgggcgggctgcgcgaggctggctggcggcgggagccggaggaggagcggccgccgccgccaccgccgccgccatagagactgtagccgtggagactgttacttaccaacggggaccaacacgcagcagccgctgccgccgccgcgggagccgctgcccgaactcccggcccgaactccagacctgagcatgcagaattccgagggtggagcggattcgccagcgtccgtggctctgcgtccctcggcggcagccccgcctgtgccagcctccccgcagagggtgttggtccaggcagccagctccaatcccaaaggggcccagatgcagccgatctccctccccagagttcagcaggtaccccagcaggtgcagccggtgcagcacgtgtatcctgcccaggtgcagtacgtggaagggggagacgccgtctacaccaatggagccatacgaacagcctacacctacaaccccgagcctcagatgtacgcccccagcagcacggcttcttacttcgaggccccaggcggtgcccaggtgaccgtggcagcctcgtccccgccagcggtcccctcccacagcatggtgggcatcaccatggatgtcggggggagccccatcgtctccagcgcgggagcctatctcatccacggggggatggacagcaccagacactccctggcccacacctcccgctcatcgcccgccacgcttgaaatggcgattgaaaacctccaaaaaagcgaaggaatcacatcacacaaaagcggtttactcaacagccatctccagtggctgttggataattatgaaacagcggaaggtgtgagtctccccagaagttctctttacaaccactaccttcggcactgccaggagcacaagctagacccagtgaacgccgcctccttcgggaaactgatccgttctgtgtttatggggctgagaacgcggcggctgggcaccaggggcaactcgaagtaccattactatgggattcgtctgaagccggactcaccactgaaccggctgcaggaggacacgcagtacatggccatgcggcagcagcccatgcaccagaagcccaggtaccggccagcccagaagacggacagcctcggggacagcggctcccacagcggcctgcacagcactccggaacagaccatggccgtgcagagccagcaccaccagcagtacatagatgtctcccacgtcttccccgagttcccagcgcccgacctgggcagcttcctgctgcaggacggcgtcacactgcacgacgtcaaggccctgcagctggtgtacagacggcactgcgaggcaactgtagatgtggtgatgaacctccagttccactacatcgagaagctgtggctctccttctggaactctaaggcctcctccagcgacggccccacctctcttcctgccagtgacgaagaccccgagggcgccgtcctgcccaaggacaagcttatctccctgtgtcagtgcgaccccatcctcaggtggatgaggagctgcgaccacatcctctaccaggcgctggtggagattctcatccccgacgtgctgaggccggtccccagtaccttgacacaggccatccgtaactttgccaagagcttggaaggctggttgacaaatgccatgagtgacttcccacaacaggtcatccagaccaaggtgggcgtcgtcagtgccttcgcccagacgctgcggcgctacacgtccctcaaccacctggcgcaggcggcccgggcggtgctgcagaacacgtcccagatcaaccagatgctcagcgacctcaaccgcgtggactttgccaacgtgcaggagcaggcctcgtgggtgtgccagtgcgaggagagtgtggtgcagcggctggagcaggatttcaagctgaccctgcagcagcagagctccctggaccagtgggccagctggctggacagtgtggtcacccaggtcctgaagcagcatgccggcagccccagcttccccaaggccgcccggcagttcttgctgaaatggtccttttacagctccatggtgatccgggacctgaccctgcgcagcgctgccagcttcggctccttccacctcatccgcctgctctacgacgagtacatgttctacctggtggagcaccgcgtcgcggaggccaccggagagacgccgatcgctgtgatgggagagttcaacgatctcgcctctctgtcgctgacgctgctcgacaaagatgacatgggcgatgagcagcgtggcagcgaggcgggcccagacgcccgcagcctgggtgagcccctggtaaagcgggagcgcagtgaccccaaccactccctgcagggcatctagcagccccggccggcgcctcctcgaggttccaaaagatgccgcctggtcactctgggaacctggatttcaccggctccaccaaattagtgcctcttagatgatgtgatgtttactttgactcaagcgggggctcccggggtcagtgttcaagaaggaaagcagttgttgaagctacagaagcccaggccagggctcccactggctgtagctgtgctctgggtccccaggtccctgcgcagccaccagggccccaccagaccatgggttccttattctggacaaaccctcctctgctggaaccctggactttggccccagtccctttaagagctgaaagggctgtgctgagagcactggcctctgcactcaactggaaccaattttcaccatgattttaaaaattaaaaaaacctggcagagcccgactagaaagggacggcctctcccctcctacctgccaccgctggggaggcacagagctcgccagcgtccctggagtcccctcaggaatggaaagtggagtgcccttgtctggtagcaccatgtgggagggacccagctgggcgcagcgccctgtggccttttagatccagacctccctgccggatgccccgaggcgggaggccggctgtgctgcaggaacccatctccagatgccaaaggacttgaggggcagctgacaatcgctgtgtcccggcagatccgcagctcgaaaaagaacaagccacagaaacgggctcgctcgtgccaggacacagcagtgtctttcaaaaaatcaaaaccagaagttttatcagcagcaggaaggatgtgggactctgtccaagttcaccgtcaccatcaagccactggctgtggaaggagtttgtccaacagggtcagtgtcacagccacaacttcagaaagcagccatcccgcgtgtcgtccaaacagcagtgcctgcgtcccgctccacggagtcttccagaacacctccctctgaactaatcccggagcaccccacccccagcgagtcccacctggacctcttcaaagtcaaaactcttctctcgggacaaacaaatattcgggactttcgaagccctgaacttgagacaccaagtttgtctccatggaaacacgtagccgctgcagttggacagctgcgtgctggagttctgtccccaaaccaactgcagagaagaaagacgagcctcggcccaggacgcgatttctaacgaaatgcaatagttttctctttttggaaaaatgtttataccaatagttttgtgcgctaattgttattagaacgtttcttatgaatgtgtacattgcagtatattcagtcccaaatgttttgttctcattcacacagaaggtactaatgtcagctcacgtggcctttaaaaacctacttccccgcccgcaggagctcagagcatcgctgggcctgcgccagagtgaggggtgcaggaagacaaagacgcgtgctcactttagaaacgaaaagctgggaataatcacactgtttgtctggtcgtatagcccaaaccttagttgaaatcagacagaaagaatgtctttaaaatatacatctcctctccttggagacactgaagctcacagttaacggattgtaatgcccggcttttcctcactcctggtaaccaatacaagctggtttctgccttaaac

SEQ ID NO: 458282 - DNA, 3895 bp, Homo sapiens
accgttgcggtaacaacgccccgccccgtcgggcgggcgggctgcgcgaggctggctggcggcgggagccggaggaggagcggccgccgccgccaccgccgccgccatagagactgtagccgtggagactgttacttaccaacggggaccaacacgcagcagccgctgccgccgccgcgggagccgctgcccgaactcccggcccgaactccagagggtgttggtccaggcagccagctccaatcccaaaggggcccagatgcagccgatctccctccccagagttcagcaggtaccccagcaggtgcagccggtgcagcacgtgtatcctgcccaggtgcagtacgtggaagggggagacgccgtctacaccaatggagccatacgaacagcctacacctacaaccccgagcctcagatgtacgcccccagcagcacggcttcttacttcgaggccccaggcggtgcccaggtgaccgtggcagcctcgtccccgccagcggtcccctcccacagcatggtgggcatcaccatggatgtcggggggagccccatcgtctccagcgcgggagcctatctcatccacggggggatggacagcaccagacactccctggcccacacctcccgctcatcgcccgccacgctccagtggctgttggataattatgaaacagcggaaggtgtgagtctccccagaagttctctttacaaccactaccttcggcactgccaggagcacaagctagacccagtgaacgccgcctccttcgggaaactgatccgttctgtgtttatggggctgagaacgcggcggctgggcaccaggggcaactcgaagtaccattactatgggattcgtctgaagccggactcaccactgaaccggctgcaggaggacacgcagtacatggccatgcggcagcagcccatgcaccagaagcccaggtaccggccagcccagaagacggacagcctcggggacagcggctcccacagcggcctgcacagcactccggaacagaccatggccgtgcagagccagcaccaccagcagtacatagatgtctcccacgtcttccccgagttcccagcgcccgacctgggcagcttcctgctgcaggacggcgtcacactgcacgacgtcaaggccctgcagctggtgtacagacggcactgcgaggcaactgtagatgtggtgatgaacctccagttccactacatcgagaagctgtggctctccttctggaactctaaggcctcctccagcgacggccccacctctcttcctgccagtgacgaagaccccgagggcgccgtcctgcccaaggacaagcttatctccctgtgtcagtgcgaccccatcctcaggtggatgaggagctgcgaccacatcctctaccaggcgctggtggagattctcatccccgacgtgctgaggccggtccccagtaccttgacacaggccatccgtaactttgccaagagcttggaaggctggttgacaaatgccatgagtgacttcccacaacaggtcatccagaccaaggtgggcgtcgtcagtgccttcgcccagacgctgcggcgctacacgtccctcaaccacctggcgcaggcggcccgggcggtgctgcagaacacgtcccagatcaaccagatgctcagcgacctcaaccgcgtggactttgccaacgtgcaggagcaggcctcgtgggtgtgccagtgcgaggagagtgtggtgcagcggctggagcaggatttcaagctgaccctgcagcagcagagctccctggaccagtgggccagctggctggacagtgtggtcacccaggtcctgaagcagcatgccggcagccccagcttccccaaggccgcccggcagttcttgctgaaatggtccttttacagctccatggtgatccgggacctgaccctgcgcagcgctgccagcttcggctccttccacctcatccgcctgctctacgacgagtacatgttctacctggtggagcaccgcgtcgcggaggccaccggagagacgccgatcgctgtgatgggagagttcaacgatctcgcctctctgtcgctgacgctgctcgacaaagatgacatgggcgatgagcagcgtggcagcgaggcgggcccagacgcccgcagcctgggtgagcccctggtaaagcgggagcgcagtgaccccaaccactccctgcagggcatctagcagccccggccggcgcctcctcgaggttccaaaagatgccgcctggtcactctgggaacctggatttcaccggctccaccaaattagtgcctcttagatgatgtgatgtttactttgactcaagcgggggctcccggggtcagtgttcaagaaggaaagcagttgttgaagctacagaagcccaggccagggctcccactggctgtagctgtgctctgggtccccaggtccctgcgcagccaccagggccccaccagaccatgggttccttattctggacaaaccctcctctgctggaaccctggactttggccccagtccctttaagagctgaaagggctgtgctgagagcactggcctctgcactcaactggaaccaattttcaccatgattttaaaaattaaaaaaacctggcagagcccgactagaaagggacggcctctcccctcctacctgccaccgctggggaggcacagagctcgccagcgtccctggagtcccctcaggaatggaaagtggagtgcccttgtctggtagcaccatgtgggagggacccagctgggcgcagcgccctgtggccttttagatccagacctccctgccggatgccccgaggcgggaggccggctgtgctgcaggaacccatctccagatgccaaaggacttgaggggcagctgacaatcgctgtgtcccggcagatccgcagctcgaaaaagaacaagccacagaaacgggctcgctcgtgccaggacacagcagtgtctttcaaaaaatcaaaaccagaagttttatcagcagcaggaaggatgtgggactctgtccaagttcaccgtcaccatcaagccactggctgtggaaggagtttgtccaacagggtcagtgtcacagccacaacttcagaaagcagccatcccgcgtgtcgtccaaacagcagtgcctgcgtcccgctccacggagtcttccagaacacctccctctgaactaatcccggagcaccccacccccagcgagtcccacctggacctcttcaaagtcaaaactcttctctcgggacaaacaaatattcgggactttcgaagccctgaacttgagacaccaagtttgtctccatggaaacacgtagccgctgcagttggacagctgcgtgctggagttctgtccccaaaccaactgcagagaagaaagacgagcctcggcccaggacgcgatttctaacgaaatgcaatagttttctctttttggaaaaatgtttataccaatagttttgtgcgctaattgttattagaacgtttcttatgaatgtgtacattgcagtatattcagtcccaaatgttttgttctcattcacacagaaggtactaatgtcagctcacgtggcctttaaaaacctacttccccgcccgcaggagctcagagcatcgctgggcctgcgccagagtgaggggtgcaggaagacaaagacgcgtgctcactttagaaacgaaaagctgggaataatcacactgtttgtctggtcgtatagcccaaaccttagttgaaatcagacagaaagaatgtctttaaaatatacatctcctctccttggagacactgaagctcacagttaacggattgtaatgcccggcttttcctcactcctggtaaccaatacaagctggtttctgccttaaac

SEQ ID NO: 458283 - DNA, 2919 bp, Homo sapiens
agccccgagccccccaacaagcatcctctctgaagcagcagcccctccgcatccatgtccatcgcctgctcctctcctctctgtggcctcccttgggattccagggcaccccgctgtagcccggatcacggctgctcacttgacgtgtgctgagtgcacgtgatgggcgcacgcacccgtctgtctcaccggtcccttcattcctaggcaactgtagatgtggtgatgaacctccagttccactacatcgagaagctgtggctctccttctggaactctaaggcctcctccagcgacggccccacctctcttcctgccagtgacgaagaccccgagggcgccgtcctgcccaaggacaagcttatctccctgtgtcagtgcgaccccatcctcaggtggatgaggagctgcgaccacatcctctaccaggcgctggtggagattctcatccccgacgtgctgaggccggtccccagtaccttgacacaggccatccgtaactttgccaagagcttggaaggctggttgacaaatgccatgagtgacttcccacaacaggtcatccagaccaaggtgggcgtcgtcagtgccttcgcccagacgctgcggcgctacacgtccctcaaccacctggcgcaggcggcccgggcggtgctgcagaacacgtcccagatcaaccagatgctcagcgacctcaaccgcgtggactttgccaacgtgcaggagcaggcctcgtgggtgtgccagtgcgaggagagtgtggtgcagcggctggagcaggatttcaagctgaccctgcagcagcagagctccctggaccagtgggccagctggctggacagtgtggtcacccaggtcctgaagcagcatgccggcagccccagcttccccaaggccgcccggcagttcttgctgaaatggtccttttacagctccatggtgatccgggacctgaccctgcgcagcgctgccagcttcggctccttccacctcatccgcctgctctacgacgagtacatgttctacctggtggagcaccgcgtcgcggaggccaccggagagacgccgatcgctgtgatgggagagttcaacgatctcgcctctctgtcgctgacgctgctcgacaaagatgacatgggcgatgagcagcgtggcagcgaggcgggcccagacgcccgcagcctgggtgagcccctggtaaagcgggagcgcagtgaccccaaccactccctgcagggcatctagcagccccggccggcgcctcctcgaggttccaaaagatgccgcctggtcactctgggaacctggatttcaccggctccaccaaattagtgcctcttagatgatgtgatgtttactttgactcaagcgggggctcccggggtcagtgttcaagaaggaaagcagttgttgaagctacagaagcccaggccagggctcccactggctgtagctgtgctctgggtccccaggtccctgcgcagccaccagggccccaccagaccatgggttccttattctggacaaaccctcctctgctggaaccctggactttggccccagtccctttaagagctgaaagggctgtgctgagagcactggcctctgcactcaactggaaccaattttcaccatgattttaaaaattaaaaaaacctggcagagcccgactagaaagggacggcctctcccctcctacctgccaccgctggggaggcacagagctcgccagcgtccctggagtcccctcaggaatggaaagtggagtgcccttgtctggtagcaccatgtgggagggacccagctgggcgcagcgccctgtggccttttagatccagacctccctgccggatgccccgaggcgggaggccggctgtgctgcaggaacccatctccagatgccaaaggacttgaggggcagctgacaatcgctgtgtcccggcagatccgcagctcgaaaaagaacaagccacagaaacgggctcgctcgtgccaggacacagcagtgtctttcaaaaaatcaaaaccagaagttttatcagcagcaggaaggatgtgggactctgtccaagttcaccgtcaccatcaagccactggctgtggaaggagtttgtccaacagggtcagtgtcacagccacaacttcagaaagcagccatcccgcgtgtcgtccaaacagcagtgcctgcgtcccgctccacggagtcttccagaacacctccctctgaactaatcccggagcaccccacccccagcgagtcccacctggacctcttcaaagtcaaaactcttctctcgggacaaacaaatattcgggactttcgaagccctgaacttgagacaccaagtttgtctccatggaaacacgtagccgctgcagttggacagctgcgtgctggagttctgtccccaaaccaactgcagagaagaaagacgagcctcggcccaggacgcgatttctaacgaaatgcaatagttttctctttttggaaaaatgtttataccaatagttttgtgcgctaattgttattagaacgtttcttatgaatgtgtacattgcagtatattcagtcccaaatgttttgttctcattcacacagaaggtactaatgtcagctcacgtggcctttaaaaacctacttccccgcccgcaggagctcagagcatcgctgggcctgcgccagagtgaggggtgcaggaagacaaagacgcgtgctcactttagaaacgaaaagctgggaataatcacactgtttgtctggtcgtatagcccaaaccttagttgaaatcagacagaaagaatgtctttaaaatatacatctcctctccttggagacactgaagctcacagttaacggattgtaatgcccggcttttcctcactcctggtaaccaatacaagctggtttctgccttaaac

SEQ ID NO: 458284 - DNA, 2282 bp, Homo sapiens
  misc_feature (1664)..(1664): n is a, c, g, or t
  misc_feature (1804)..(1804): n is a, c, g, or t
  misc_feature (2019)..(2019): n is a, c, g, or t
ggcacgaggagagagggagcgtggagagctggagcagccgccaccgccgccgccgagggagccccgggacggcagcccctgggcgcagggtgcgctgttctcggagtccgacccagggcgactcacgcccactggtgcgacccggacagcctgggactgacccgccggcccaggcgaggctgcagccagagggctgggaagggatcgcgctcgcggcatccagaggcggccaggcggaggcgagggagcaggttagagggacaaagagctttgcagacgtccccggcgtcctgcgagcgccagcggccgggacgaggcggccgggagcccgggaagagcccgtggatgttctgcgcgcggcctgggagccgccgccgccgccgcctcagcgagaggaggaatgcaccggccgcgccgccgcgggacgcgcccgccgctcctggcgctgctggccgcgctgctgctggccgcacgcggggctgctgcccaagaaacagagctgtcagtcagtgctgaattagtgcctacctcatcatggaacatctcaagtgaactcaacaaagattcttacctgacccttgatgaaccaatgaataacatcaccacgtctctgggccagacagcagaactgcactgcaaagtctctgggaatccacctcccaccatccgctggttcaaaaatgatgctcctgtggtccaggagccccggaggctctcctttcggtccaccatctatggctctcggctgcggattagaaacctcgacaccacagacacaggctacttccagtgcgtggcaacaaacggcaaggaggtggtttcttccactggagtcttgtttgtcaagtttggcccccctcccactgcaagtccaggatactcagatgagtatgaagaagatggattctgtcagccatacagagggattgcatgtgcaagatttattggcaaccgcaccgtctatatggagtctttgcacatgcaaggggaaatagaaaatcagatcacagctgccttcactatgattggcacttccagtcacttatctgataagtgttctcagttcgccattccttccctgtgccactatgccttcccgtactgcgatgaaacttcatccgtcccaaagccccgtgacttgtgtcgcgatgaatgtgaaatcctggagaatgtcctgtgtcaaacagagtacatttttgcaagatcaaatcccatgattctgatgaggctgaaactgccaaactgtgaagatctcccccagccagagagcccagaagctgcgaactgtatccggattggaattcccatggcagatcctataaataaaaatcacaagtgttataacagcacaggtgtggactaccgggggaccgtcagtgtgaccaaatcagggcgccagtgccagccatggaattcccagtatccccacacacacactttcaccgcccttcgtttcccagagctgaatggaggccattcctactgccgcaacccagggaatcaaaaggaagctccctggtgcttcaccttggatgaaaactttaagtctgatctgtgtgacatcccagcttgcggtaaatagaagtcattgcccctaatgtattcaatcatctttaaagatccctatcctacccctcttatttaggagaatcctataagggggncaaagaaaatggacagtatttgcttgatctcaatctggttttagggtaaaccttgccgtttctacataaaacacctcgtaaggtaccaaaacacgttctcaagaagtcaactgcctttatacctgcagccattgcactcntggatgtaacagggacccagcccttcagaggcacagttgagacagtttatcacattgatttttatagaaaaagatgttacccagaatggtctgcgtccaagtggaccttttcagcaaaaaaaggaatattggaagcaggaagaaattgttttctgtatgccttaagaacaccacaaggcaggatgaatctacaaccattactcggtcatccaggncaatctgtgggtaaactgtgtccttcgttatgtctgttaatactgcagaagaagcatataggtatctagtaagaaaatggaattcctgagtcagttaactgttcctttttctagaaaatgtttggagaaaataatgaaaatgggccaagcatggtggcttatacctgtaatcccaacactctaggaaggccgaggcaggaggatcatttgagcccaggggttcaagaccagcccaggcaacatagtgagactccatctctacc

SEQ ID NO: 458285 - DNA, 1215 bp, Homo sapiens
gcaccgcaagccggagcgtcttagttcgctgcgggaagctggggtccttgctgcgtctgagccggtacacaatgagagggaagagcccggctgagcctgtggagacaaccgattcattctttggagaaacagagctgtcagtcagtgctgaattagtgcctacctcatcatggaacatctcaagtgaactcaacaaagattcttacctgacccttgatgaaccaatgaataacatcaccacgtctctgggccagacagcagaactgcactgcaaagtctctgggaatccacctcccaccatccgctggttcaaaaatgatgctcctgtggtccaggagccccggaggctctcctttcggtccaccatctatggctctcggctgcggattagaaacctcgacaccacagacacaggctacttccagtgcgtggcaacaaacggcaaggaggtggtttcttccactggagtcttgtttgtcaagtttggcccccctcccactgcaagtccaggatactcagatgagtatgaagaagatggattctgtcagccatacagagggattgcatgtgcaagatttattggcaaccgcaccgtctatatggagtctttgcacatgcaaggggaaatagaaaatcagatcacagctgccttcactatgattggcacttccagtcacttatctgataagtgttctcagttcgccattccttccctgtgccactatgccttcccgtactgcgatgaaacttcatccgtcccaaagccccgtgacttgtgtcgcgatgaatgtgaaatcctggagaatgtcctgtgtcaaacagagtacatttttgcaagatcaaatcccatgattctgatgaggctgaaactgccaaactgtgaagatctcccccagccagagagcccagaagctgcgaactgtatccggattggaattcccatggcagatcctataaataaaaatcacaagtgttataacagcacaggtgtggactaccgggggaccgtcagtgtgaccaaatcagggcgccagtgccagccatggaattcccagtatccccacacacacactttcaccgcccttcgtttcccagagctgaatggaggccattcctactgccgcaacccagggaatcaaaaggaagctccctggtgttcctggtgaaattagttgacttgggaaccctggatccagtcccggagatacaggacct

SEQ ID NO: 458286 - DNA, 3444 bp, Homo sapiens
ggcacgaggagagagggagcgtggagagctggagcagccgccaccgccgccgccgagggagccccgggacggcagcccctgggcgcagggtgcgctgttctcggagtccgacccagggcgactcacgcccactggtgcgacccggacagcctgggactgacccgccggcccaggcgaggctgcagccagagggctgggaagggatcgcgctcgcggcatccagaggcggccaggcggaggcgagggagcaggttagagggacaaagagctttgcagacgtccccggcgtcctgcgagcgccagcggccgggacgaggcggccgggagcccgggaagagcccgtggatgttctgcgcgcggcctgggagccgccgccgccgccgcctcagcgagaggaggaatgcaccggccgcgccgccgcgggacgcgcccgccgctcctggcgctgctggccgcgctgctgctggccgcacgcggggctgctgcccaagaaacagagctgtcagtcagtgctgaattagtgcctacctcatcatggaacatctcaagtgaactcaacaaagattcttacctgacccttgatgaaccaatgaataacatcaccacgtctctgggccagacagcagaactgcactgcaaagtctctgggaatccacctcccaccatccgctggttcaaaaatgatgctcctgtggtccaggagccccggaggctctcctttcggtccaccatctatggctctcggctgcggattagaaacctcgacaccacagacacaggctacttccagtgcgtggcaacaaacggcaaggaggtggtttcttccactggagtcttgtttgtcaagtttggcccccctcccactgcaagtccaggatactcagatgagtatgaagaagatggattctgtcagccatacagagggattgcatgtgcaagatttattggcaaccgcaccgtctatatggagtctttgcacatgcaaggggaaatagaaaatcagatcacagctgccttcactatgattggcacttccagtcacttatctgataagtgttctcagttcgccattccttccctgtgccactatgccttcccgtactgcgatgaaacttcatccgtcccaaagccccgtgacttgtgtcgcgatgaatgtgaaatcctggagaatgtcctgtgtcaaacagagtacatttttgcaagatcaaatcccatgattctgatgaggctgaaactgccaaactgtgaagatctcccccagccagagagcccagaagctgcgaactgtatccggattggaattcccatggcagatcctataaataaaaatcacaagtgttataacagcacaggtgtggactaccgggggaccgtcagtgtgaccaaatcagggcgccagtgccagccatggaattcccagtatccccacacacacactttcaccgcccttcgtttcccagagctgaatggaggccattcctactgccgcaacccagggaatcaaaaggaagctccctggtgcttcaccttggatgaaaactttaagtctgatctgtgtgacatcccagcttgcgattcaaaggattccaaggagaagaataaaatggaaatcctgtacatactagtgccaagtgtggccattcccctggccattgctttactcttcttcttcatttgcgtctgtcggaataaccagaagtcatcgtcggcaccagtccagaggcaaccaaaacacgtcagaggtcaaaatgtggagatgtcaatgctgaatgcatataaacccaagagcaaggctaaagagctacctctttctgctgtacgctttatggaagaattgggtgagtgtgcctttggaaaaatctataaaggccatctctatctcccaggcatggaccatgctcagctggttgctatcaagaccttgaaagactataacaacccccagcaatggatggaatttcaacaagaagcctccctaatggcagaactgcaccaccccaatattgtctgccttctaggtgccgtcactcaggaacaacctgtgtgcatgctttttgagtatattaatcagggggatctccatgagttcctcatcatgagatccccacactctgatgttggctgcagcagtgatgaagatgggactgtgaaatccagcctggaccacggagattttctgcacattgcaattcagattgcagctggcatggaatacctgtctagtcacttctttgtccacaaggaccttgcagctcgcaatattttaatcggagagcaacttcatgtaaagatttcagacttggggctttccagagaaatttactccgctgattactacagggtccagagtaagtccttgctgcccattcgctggatgccccctgaagccatcatgtatggcaaattctcttctgattcagatatctggtcctttggggttgtcttgtgggagattttcagttttggactccagccatattatggattcagtaaccaggaagtgattgagatggtgagaaaacggcagctcttaccatgctctgaagactgcccacccagaatgtacagcctcatgacagagtgctggaatgagattccttctaggagaccaagatttaaagatattcacgtccggcttcggtcctgggagggactctcaagtcacacaagctctactactccttcagggggaaatgccaccacacagacaacctccctcagtgccagcccagtgagtaatctcagtaaccccagatatcctaattacatgttcccgagccagggtattacaccacagggccagattgctggtttcattggcccgccaatacctcagaaccagcgattcattcccatcaatggatacccaatacctcctggatatgcagcgtttccagctgcccactaccagccaacaggtcctcccagagtgattcagcactgcccacctcccaagagtcggtccccaagcagtgccagtgggtcgactagcactggccatgtgactagcttgccctcatcaggatccaatcaggaagcaaatattcctttactaccacacatgtcaattccaaatcatcctggtggaatgggtatcaccgtttttggcaacaaatctcaaaaaccctacaaaattgactcaaagcaagcatctttactaggagacgccaatattcatggacacaccgaatctatgatttctgcagaactgtaaaatgcacaacttttgtaaatgtggtatacaggacaaactagacggccgtagaaaagatttatattcaaatgtttttattaaagtaaggttctcatttagcagacatcgcaacaagtaccttctgtgaagtttcactgtgtcttaccaagcaggacagacactcggccagaaaaaaaaaaaaaaaaaaaaaacaagcaaacaaaaacattgtgggatgtgcactccattgg

SEQ ID NO: 458287 - DNA, 3079 bp, Homo sapiens
gcaccgcaagccggagcgtcttagttcgctgcgggaagctggggtccttgctgcgtctgagccggtacacaatgagagggaagagcccggctgagcctgtggagacaaccgattcattctttggagaaacagagctgtcagtcagtgctgaattagtgcctacctcatcatggaacatctcaagtgaactcaacaaagattcttacctgacccttgatgaaccaatgaataacatcaccacgtctctgggccagacagcagaactgcactgcaaagtctctgggaatccacctcccaccatccgctggttcaaaaatgatgctcctgtggtccaggagccccggaggctctcctttcggtccaccatctatggctctcggctgcggattagaaacctcgacaccacagacacaggctacttccagtgcgtggcaacaaacggcaaggaggtggtttcttccactggagtcttgtttgtcaagtttggcccccctcccactgcaagtccaggatactcagatgagtatgaagaagatggattctgtcagccatacagagggattgcatgtgcaagatttattggcaaccgcaccgtctatatggagtctttgcacatgcaaggggaaatagaaaatcagatcacagctgccttcactatgattggcacttccagtcacttatctgataagtgttctcagttcgccattccttccctgtgccactatgccttcccgtactgcgatgaaacttcatccgtcccaaagccccgtgacttgtgtcgcgatgaatgtgaaatcctggagaatgtcctgtgtcaaacagagtacatttttgcaagatcaaatcccatgattctgatgaggctgaaactgccaaactgtgaagatctcccccagccagagagcccagaagctgcgaactgtatccggattggaattcccatggcagatcctataaataaaaatcacaagtgttataacagcacaggtgtggactaccgggggaccgtcagtgtgaccaaatcagggcgccagtgccagccatggaattcccagtatccccacacacacactttcaccgcccttcgtttcccagagctgaatggaggccattcctactgccgcaacccagggaatcaaaaggaagctccctggtgcttcaccttggatgaaaactttaagtctgatctgtgtgacatcccagcttgcgattcaaaggattccaaggagaagaataaaatggaaatcctgtacatactagtgccaagtgtggccattcccctggccattgctttactcttcttcttcatttgcgtctgtcggaataaccagaagtcatcgtcggcaccagtccagaggcaaccaaaacacgtcagaggtcaaaatgtggagatgtcaatgctgaatgcatataaacccaagagcaaggctaaagagctacctctttctgctgtacgctttatggaagaattgggtgagtgtgcctttggaaaaatctataaaggccatctctatctcccaggcatggaccatgctcagctggttgctatcaagaccttgaaagactataacaacccccagcaatggatggaatttcaacaagaagcctccctaatggcagaactgcaccaccccaatattgtctgccttctaggtgccgtcactcaggaacaacctgtgtgcatgctttttgagtatattaatcagggggatctccatgagttcctcatcatgagatccccacactctgatgttggctgcagcagtgatgaagatgggactgtgaaatccagcctggaccacggagattttctgcacattgcaattcagattgcagctggcatggaatacctgtctagtcacttctttgtccacaaggaccttgcagctcgcaatattttaatcggagagcaacttcatgtaaagatttcagacttggggctttccagagaaatttactccgctgattactacagggtccagagtaagtccttgctgcccattcgctggatgccccctgaagccatcatgtatggcaaattctcttctgattcagatatctggtcctttggggttgtcttgtgggagattttcagttttggactccagccatattatggattcagtaaccaggaagtgattgagatggtgagaaaacggcagctcttaccatgctctgaagactgcccacccagaatgtacagcctcatgacagagtgctggaatgagattccttctaggagaccaagatttaaagatattcacgtccggcttcggtcctgggagggactctcaagtcacacaagctctactactccttcagggggaaatgccaccacacagacaacctccctcagtgccagcccagtgagtaatctcagtaaccccagatatcctaattacatgttcccgagccagggtattacaccacagggccagattgctggtttcattggcccgccaatacctcagaaccagcgattcattcccatcaatggatacccaatacctcctggatatgcagcgtttccagctgcccactaccagccaacaggtcctcccagagtgattcagcactgcccacctcccaagagtcggtccccaagcagtgccagtgggtcgactagcactggccatgtgactagcttgccctcatcaggatccaatcaggaagcaaatattcctttactaccacacatgtcaattccaaatcatcctggtggaatgggtatcaccgtttttggcaacaaatctcaaaaaccctacaaaattgactcaaagcaagcatctttactaggagacgccaatattcatggacacaccgaatctatgatttctgcagaactgtaaaatgcacaacttttgtaaatgtggtatacaggacaaactagacggccgtagaaaagatttatattcaaatgtttttattaaagtaaggttctcatttagcagacatcgcaacaagtaccttctgtgaagtttcactgtgtcttaccaagcaggacagacactcggccagaaaaaaaaaaaaaaaaaaaaaacaagcaaacaaaaacattgtgggatgtgcactccattgg

SEQ ID NO: 458288 - DNA, 650 bp, Homo sapiens
gcacgagaaatatctttataaagatatttttcttttccctgacaaagccaaaaagaaatctttggaaattaggagaaggaatttcaggtgggtttaagtcagagctagttccccaacagaaagatcatttgaaaccagtttttatcccttctctttccttccctttccctaaatcaaatcaatattaattgtgccttatttcacttaacatagacttgaattatttttagggaaagcccctataatgaattcagaaatcactacaagcagcattaagactgaagttggaatattctgttgaccataaaaccttgatatcattctgtgtatatagaatgtaaaaggaatattacagtgttaactgccatatatgtaatatacacaaactcaattagcattgtaatggccaaatgcattcccccatgcttttctgttttcaaaaaaattgaaaaacaaatcaactcttatccccaacagctgcctaattttaggagtctgaccctccacatctcactggtgtgggtgcatggggctgtggagtgggtgtcagtatggatgtgtctgaatgtgtgaggccttggaagggactctttctgcagatactgtaaatacaagtaccattttaataaagcatgtacaataaaccaaaa

SEQ ID NO: 458289 - DNA, 1901 bp, Homo sapiens
gcagaaagaaaaatgttacagattcaagttcagctgagtctttacataatacatgatgttctgttgattatttttatttttttgatgccactattaacagcaaccagtaaacattatttcccctcaagcagactggcttctaaacctaaccacttaagtttcttcttctccctcattacctcacagtcttcattttgaatattaagtttggggatatctgaagtaattgaaattgagggttttaagatctaagtgaaaagctttacttgggtcaaaaggcagatttccaacaaatttcttttcttattccatctagtatctgtacatgttttgaaattaagggtatatacaaatgtgaattatgaggggtttttttctttgttgtgttttttttttttttttttactttttcctttgagacattctaaaatattgttaggtgatctaaataatttattttcttttttccagcgggtccatatggaatatttgctggtagggatgcctccagaggactggccacattttgcctagataaagatgcacttagagatgaatatgatgatctctcagatttgaatgcagtacaaatggagagtgttcgagaatgggaaatgcagtttaaagaaaaatatgattatgtaggcagactcctaaaaccaggagaagaaccatcagaatatacagatgaagaagataccaaggatcacaataaacaggattgaactttgtaaacaaccaaagtcaggggccttcagaactgcaattcttactccctttcacagactgtccggagtctttgggtttgattcacctgctgcgaaaaacattcaacaaattgtgtacaagataaattaatctcactatgaagatttgaataactagacattatttatgctgccaaactcatttgttgcagttgtttgtaatgtctagtggggcttcatcatcctgaaaagaaggagacagggatttttttaaagagcaagaaagtcacaatattacttctttccttccttttttccttctttcctttcttctttctctttctttctttttaaaatatattgaagacaaccagatatgtatttgctactcaagtgtacagatctcctcaagaaacatcaagggactcctgtgtcacatactgtgtttttattttaacatgggtgagggaggcgacctgatcaggggaggtgggggtacacatcaatttgagttgttcaggctactgaaacattaaaatgtgaattcccaaacttttctttttggctttgtcagggaaaagaaaaatatctttataaagaaatctttggaaattaggagaaggaatttcaggtgggtttaagtcagagctagttccccaacagaaagatcatttgaaaccagtttttatcccttctctttccttccctttccctaaatcaaatcaatattaattgtgccttatttcacttaacatagacttgaattatttttagggaaagcccctataatgaattcagaaatcactacaagcagcattaagactgaagttggaatattctgttgaccataaaaccttgatatcattctgtgtatatagaatgtaaaaggaatattacagtgttaactgccatatatgtaatatacacaaactcaattagcattgtaatggccaaatgcattcccccatgcttttctgttttcaaaaaaattgaaaaacaaatcaactcttatccccaacagctgcctaattttaggagtctgaccctccacatctcactggtgtgggtgcatggggctgtggagtgggtgtcagtatggatgtgtctgaatgtgtgaggccttggaagggactctttctgcagatactgtaaatacaagtaccattttaataaagcatgtacaataaaccaaaa

SEQ ID NO: 458290 - DNA, 1598 bp, Homo sapiens
ctcccgcaggggttacgaacgaaaggcgagcgcgtggcgctcaggagcccgcgcacgcgctgtgttctcgtctccgaccatgagcgtccgcgcggccgtcgtagcatcttttcttcagacccgcccggctcgtctacttaacctagcggaggcttggagtgagagcagcgggtccatatggaatatttgctggtagggatgcctccagaggactggccacattttgcctagataaagatgcacttagagatgaatatgatgatctctcagatttgaatgcagtacaaatggagagtgttcgagaatgggaaatgcagtttaaagaaaaatatgattatgtaggcagactcctaaaaccaggagaagaaccatcagaatatacagatgaagaagataccaaggatcacaataaacaggattgaactttgtaaacaaccaaagtcaggggccttcagaactgcaattcttactccctttcacagactgtccggagtctttgggtttgattcacctgctgcgaaaaacattcaacaaattgtgtacaagataaattaatctcactatgaagatttgaataactagacattatttatgctgccaaactcatttgttgcagttgtttgtaatgtctagtggggcttcatcatcctgaaaagaaggagacagggatttttttaaagagcaagaaagtcacaatattacttctttccttccttttttccttctttcctttcttctttctctttctttctttttaaaatatattgaagacaaccagatatgtatttgctactcaagtgtacagatctcctcaagaaacatcaagggactcctgtgtcacatactgtgtttttattttaacatgggtgagggaggcgacctgatcaggggaggtgggggtacacatcaatttgagttgttcaggctactgaaacattaaaatgtgaattcccaaacttttctttttggctttgtcagggaaaagaaaaatatctttataaagaaatctttggaaattaggagaaggaatttcaggtgggtttaagtcagagctagttccccaacagaaagatcatttgaaaccagtttttatcccttctctttccttccctttccctaaatcaaatcaatattaattgtgccttatttcacttaacatagacttgaattatttttagggaaagcccctataatgaattcagaaatcactacaagcagcattaagactgaagttggaatattctgttgaccataaaaccttgatatcattctgtgtatatagaatgtaaaaggaatattacagtgttaactgccatatatgtaatatacacaaactcaattagcattgtaatggccaaatgcattcccccatgcttttctgttttcaaaaaaattgaaaaacaaatcaactcttatccccaacagctgcctaattttaggagtctgaccctccacatctcactggtgtgggtgcatggggctgtggagtgggtgtcagtatggatgtgtctgaatgtgtgaggccttggaagggactctttctgcagatactgtaaatacaagtaccattttaataaagcatgtacaataaaccaaaa

SEQ ID NO: 458291 - DNA, 1640 bp, Homo sapiens
gccactgatctccttttttccctcgctgtattactccgtaaggccacgtttaggggcatgtaaagtcccaaccctccagtctctgaagtccagacgtataagcaacacctcggactctctttaaaccagttttagttcggagttgctttccatgattaacaaggtatgtgggatgagaacagaccagaatgcagagcttattaaagactgcgggtccatatggaatatttgctggtagggatgcctccagaggactggccacattttgcctagataaagatgcacttagagatgaatatgatgatctctcagatttgaatgcagtacaaatggagagtgttcgagaatgggaaatgcagtttaaagaaaaatatgattatgtaggcagactcctaaaaccaggagaagaaccatcagaatatacagatgaagaagataccaaggatcacaataaacaggattgaactttgtaaacaaccaaagtcaggggccttcagaactgcaattcttactccctttcacagactgtccggagtctttgggtttgattcacctgctgcgaaaaacattcaacaaattgtgtacaagataaattaatctcactatgaagatttgaataactagacattatttatgctgccaaactcatttgttgcagttgtttgtaatgtctagtggggcttcatcatcctgaaaagaaggagacagggatttttttaaagagcaagaaagtcacaatattacttctttccttccttttttccttctttcctttcttctttctctttctttctttttaaaatatattgaagacaaccagatatgtatttgctactcaagtgtacagatctcctcaagaaacatcaagggactcctgtgtcacatactgtgtttttattttaacatgggtgagggaggcgacctgatcaggggaggtgggggtacacatcaatttgagttgttcaggctactgaaacattaaaatgtgaattcccaaacttttctttttggctttgtcagggaaaagaaaaatatctttataaagaaatctttggaaattaggagaaggaatttcaggtgggtttaagtcagagctagttccccaacagaaagatcatttgaaaccagtttttatcccttctctttccttccctttccctaaatcaaatcaatattaattgtgccttatttcacttaacatagacttgaattatttttagggaaagcccctataatgaattcagaaatcactacaagcagcattaagactgaagttggaatattctgttgaccataaaaccttgatatcattctgtgtatatagaatgtaaaaggaatattacagtgttaactgccatatatgtaatatacacaaactcaattagcattgtaatggccaaatgcattcccccatgcttttctgttttcaaaaaaattgaaaaacaaatcaactcttatccccaacagctgcctaattttaggagtctgaccctccacatctcactggtgtgggtgcatggggctgtggagtgggtgtcagtatggatgtgtctgaatgtgtgaggccttggaagggactctttctgcagatactgtaaatacaagtaccattttaataaagcatgtacaataaaccaaaa

SEQ ID NO: 458292 - DNA, 1593 bp, Homo sapiens
gccactgatctccttttttccctcgctgtattactccgtaaggccacgtttaggggcatgtaaagtcccaaccctccagtctctgaagtccagacgtataagcaacacctcggactctctttaaaccagttttagttcggagttgctttccatgattaacaagcgggtccatatggaatatttgctggtagggatgcctccagaggactggccacattttgcctagataaagatgcacttagagatgaatatgatgatctctcagatttgaatgcagtacaaatggagagtgttcgagaatgggaaatgcagtttaaagaaaaatatgattatgtaggcagactcctaaaaccaggagaagaaccatcagaatatacagatgaagaagataccaaggatcacaataaacaggattgaactttgtaaacaaccaaagtcaggggccttcagaactgcaattcttactccctttcacagactgtccggagtctttgggtttgattcacctgctgcgaaaaacattcaacaaattgtgtacaagataaattaatctcactatgaagatttgaataactagacattatttatgctgccaaactcatttgttgcagttgtttgtaatgtctagtggggcttcatcatcctgaaaagaaggagacagggatttttttaaagagcaagaaagtcacaatattacttctttccttccttttttccttctttcctttcttctttctctttctttctttttaaaatatattgaagacaaccagatatgtatttgctactcaagtgtacagatctcctcaagaaacatcaagggactcctgtgtcacatactgtgtttttattttaacatgggtgagggaggcgacctgatcaggggaggtgggggtacacatcaatttgagttgttcaggctactgaaacattaaaatgtgaattcccaaacttttctttttggctttgtcagggaaaagaaaaatatctttataaagaaatctttggaaattaggagaaggaatttcaggtgggtttaagtcagagctagttccccaacagaaagatcatttgaaaccagtttttatcccttctctttccttccctttccctaaatcaaatcaatattaattgtgccttatttcacttaacatagacttgaattatttttagggaaagcccctataatgaattcagaaatcactacaagcagcattaagactgaagttggaatattctgttgaccataaaaccttgatatcattctgtgtatatagaatgtaaaaggaatattacagtgttaactgccatatatgtaatatacacaaactcaattagcattgtaatggccaaatgcattcccccatgcttttctgttttcaaaaaaattgaaaaacaaatcaactcttatccccaacagctgcctaattttaggagtctgaccctccacatctcactggtgtgggtgcatggggctgtggagtgggtgtcagtatggatgtgtctgaatgtgtgaggccttggaagggactctttctgcagatactgtaaatacaagtaccattttaataaagcatgtacaataaaccaaaa

SEQ ID NO: 458293 - DNA, 3139 bp, Homo sapiens
ctcccgcaggggttacgaacgaaaggcgagcgcgtggcgctcaggagcccgcgcacgcgctgtgttctcgtctccgaccatgagcgtccgcgcggccgtcgtagcatcttttcttcagacccgcccggctcgtctacttaacctagcggaggcttggagtgagagcagggaagtgtggggcgaggtgggcggggcgttgcacgcgtgcgcggccagcgaaagaagggagggggcgggagatccgagacaacgttaccccgtcaacacccaatcaggagccggcctgaccccgccccctcttctcacgttattggctgagaggcccccagatgggcggggccggccgtggggttggggagggcagggggcggggaggaggaggaaggcgctggcgggcagtgatggcggctggtgatggggacgtgaagctaggcaccctggggagtggcagcgagagcagcaacgacggcggcagcgagagtccaggcgacgcgggagcggcagcggaagggggaggctgggcggcggcggcgttggcgcttctgacggggggcggggaaatgctgctgaacgtggcgctggtggctctggtgctgctgggggcctaccggctgtgggtgcgctgggggcggcggggtctgggggccggggccggggcgggcgaggagagccccgccacctctctgcctcgcatgaagaagcgggacttcagcttggagcagctgcgccagtacgacggctcccgcaacccgcgcatcctgctcgcggtcaatgggaaagtcttcgacgtgaccaaaggcagcaagttctacggcccggcgggtccatatggaatatttgctggtagggatgcctccagaggactggccacattttgcctagataaagatgcacttagagatgaatatgatgatctctcagatttgaatgcagtacaaatggagagtgttcgagaatgggaaatgcagtttaaagaaaaatatgattatgtaggcagactcctaaaaccaggagaagaaccatcagaatatacagatgaagaagataccaaggatcacaataaacaggattgaactttgtaaacaaccaaagtcaggggccttcagaactgcaattcttactccctttcacagactgtccggagtctttgggtttgattcacctgctgcgaaaaacattcaacaaattgtgtacaagataaattaatctcactatgaagatttgaataactagacattatttatgctgccaaactcatttgttgcagttgtttgtaatgtctagtggggcttcatcatcctgaaaagaaggagacagggatttttttaaagagcaagaaagtcacaatattacttctttccttccttttttccttctttcctttcttctttctctttctttctttttaaaatatattgaagacaaccagatatgtatttgctactcaagtgtacagatctcctcaagaaacatcaagggactcctgtgtcacatactgtgtttttattttaacatgggtgagggaggcgacctgatcaggggaggtgggggtacacatcaatttgagttgttcaggctactgaaacattaaaatgtgaattcccaaacttttctttttggctttgtcagggaaaagaaaaatatctttataaagaaatctttggaaattaggagaaggaatttcaggtgggtttaagtcagagctagttccccaacagaaagatcatttgaaaccagtttttatcccttctctttccttccctttccctaaatcaaatcaatattaattgtgccttatttcacttaacatagacttgaattatttttagggaaagcccctataatgaattcagaaatcactacaagcagcattaagactgaagttggaatattctgttgaccataaaaccttgatatcattctgtgtatatagaatgtaaaaggaatattacagtgttaactgccatatatgtaatatacacaaactcaattagcattgtaatggccaaatgcattcccccatgcttttctgttttcaaaaaaattgaaaaacaaatcaactcttatccccaacagctgcctaattttaggagtctgaccctccacatctcactggtgtgggtgcatggggctgtggagtgggtgtcagtatggatgtgtctgaatgtgtgaggccttggaagggactctttctgcagatactgtaaatacaagtaccattttaataaagcatgtacaataaaccaaaataagcttgagttggactttatatacagaactgtaagccagtgcattatgatacagttgtaagattgtgcatttgattcaagataaggaaaaatcttggaaatgaaaagcaggcactggttaaccaagttgtacacattgtaccacattcagcataactttaggaagaaattccactttgtggaacattctccagaaatccaagattattcaggtaagaattggtatattaaatgtacatctttttactttctattttgatgccaactgattatactagacaattagcactccaggtggttattgaacacaaaacagtaaaagaatattgcactgatagatactaaattattattttattaggttgaaaaagcccttactaaaagcccctcatatatcaattactttatttcattatgactacttaggttccgggctggggacaagttcacttaaaaaggcaatgttatttaacaggtcaccagttaagacttctgctttgtagatacatgcagaagccatcaaacaagggggagcttttaactgcaacaataagctaaagtatgtaaaatactacattctattcagtcttggagtgttttgtagaaagttatcttcagccaaatctttgctgaagactggttgtggagtgttggtaaatgctttgtgtttttatgtaaaatattttctaaacaaaaaatgttaaaagtacatgtcctctgtagtaaactgatatctatatatatgaatcattcaagcctaaagtctagtaataaactgtacttgtgaatagagaaaccctaaatattcatgcagtaaaaattatgcggtctgttaagaaaaatgagtaatttgtgttttggacttgaaataaacagtgttctgtagataa

SEQ ID NO: 458294 - DNA, 3296 bp, Homo sapiens
ctcccgcaggggttacgaacgaaaggcgagcgcgtggcgctcaggagcccgcgcacgcgctgtgttctcgtctccgaccatgagcgtccgcgcggccgtcgtagcatcttttcttcagacccgcccggctcgtctacttaacctagcggaggcttggagtgagagcagggaagtgtggggcgaggtgggcggggcgttgcacgcgtgcgcggccagcgaaagaagggagggggcgggagatccgagacaacgttaccccgtcaacacccaatcaggagccggcctgaccccgccccctcttctcacgttattggctgagaggcccccagatgggcggggccggccgtggggttggggagggcagggggcggggaggaggaggaaggcgctggcgggcagtgatggcggctggtgatggggacgtgaagctaggcaccctggggagtggcagcgagagcagcaacgacggcggcagcgagagtccaggcgacgcgggagcggcagcggaagggggaggctgggcggcggcggcgttggcgcttctgacggggggcggggaaatgctgctgaacgtggcgctggtggctctggtgctgctgggggcctaccggctgtgggtgcgctgggggcggcggggtctgggggccggggccggggcgggcgaggagagccccgccacctctctgcctcgcatgaagaagcgggacttcagcttggagcagctgcgccagtacgacggctcccgcaacccgcgcatcctgctcgcggtcaatgggaaagtcttcgacgtgaccaaaggcagcaagttctacggcccggcgggtccatatggaatatttgctggtagggatgcctccagaggactggccacattttgcctagataaagatgcacttagagatgaatatgatgatctctcagatttgaatgcagtacaaatggagagtgttcgagaatgggaaatgcagtttaaagaaaaatatgattatgtaggcagactcctaaaaccaggagaagaaccatcagaatatacagatgaagaagataccaaggatcacaataaacaggattgaactttgtaaacaaccaaagtcaggggccttcagaactgcaattcttactccctttcacagactgtccggagtctttgggtttgattcacctgctgcgaaaaacattcaacaaattgtgtacaagataaattaatctcactatgaagatttgaataactagacattatttatgctgccaaactcatttgttgcagttgtttgtaatgtctagtggggcttcatcatcctgaaaagaaggagacagggatttttttaaagagcaagaaagtcacaatattacttctttccttccttttttccttctttcctttcttctttctctttctttctttttaaaatatattgaagacaaccagatatgtatttgctactcaagtgtacagatctcctcaagaaacatcaagggactcctgtgtcacatactgtgtttttattttaacatgggtgagggaggcgacctgatcaggggaggtgggggtacacatcaatttgagttgttcaggctactgaaacattaaaatgtgaattcccaaacttttctttttggctttgtcagggaaaagaaaaatatctttataaagaaatctttggaaattaggagaaggaatttcaggtgggtttaagtcagagctagttccccaacagaaagatcatttgaaaccagtttttatcccttctctttccttccctttccctaaatcaaatcaatattaattgtgccttatttcacttaacatagacttgaattatttttagggaaagcccctataatgaattcagaaatcactacaagcagcattaagactgaagttggaatattctgttgaccataaaaccttgatatcattctgtgtatatagaatgtaaaaggaatattacagtgttaactgccatatatgtaatatacacaaactcaattagcattgtaatggccaaatgcattcccccatgcttttctgttttcaaaaaaattgaaaaacaaatcaactcttatccccaacagctgcctaattttaggagtctgaccctccacatctcactggtgtgggtgcatggggctgtggagtgggtgtcagtatggatgtgtctgaatgtgtgaggccttggaagggactctttctgcagatactgtaaatacaagtaccattttaataaagcatgtacaataaaccaaaataagcttgagttggactttatatacagaactgtaagccagtgcattatgatacagttgtaagattgtgcatttgattcaagataaggaaaaatcttggaaatgaaaagcaggcactggttaaccaagttgtacacattgtaccacattcagcataactttaggaagaaattccactttgtggaacattctccagaaatccaagattattcaggtaagaattggtatattaaatgtacatctttttactttctattttgatgccaactgattatactagacaattagcactccaggtggttattgaacacaaaacagtaaaagaatattgcactgatagatactaaattattattttattaggttgaaaaagcccttactaaaagcccctcatatatcaattactttatttcattatgactacttaggttccgggctggggacaagttcacttaaaaaggcaatgttatttaacaggtcaccagttaagacttctgctttgtagatacatgcagaagccatcaaacaagggggagcttttaactgcaacaataagctaaagtatgtaaaatactacattctattcagtcttggagtgttttgtagaaagttatcttcagccaaatctttgctgaagactggttgtggagtgttggtaaatgctttgtgtttttatgtaaaatattttctaaacaaaaaatgttaaaagtacatgtcctctgtagtaaactgatatctatatatatgaatcattcaagcctaaagtctagtaataaactgtacttgtgaatagagaaaccctaaatattcatgcagtaaaaattatgcggtctgttaagaaaaatgagtaatttgtgttttggacttgaaataaacagtgttctgtagataaaaaaaagaaaaaaaacaaaaaagaaaagaaaaaaaaaaaaagaaaaaacgaaaaaagtaaaagaccaagaaaaacgaacctctcaccccgcacactacatgacaatacgagccaccttaaactaacaattgtcacatacaccaacagccacacgcag

SEQ ID NO: 458295 - DNA, 2195 bp, Homo sapiens
ctcccgcaggggttacgaacgaaaggcgagcgcgtggcgctcaggagcccgcgcacgcgctgtgttctcgtctccgaccatgagcgtccgcgcggccgtcgtagcatcttttcttcagacccgcccggctcgtctacttaacctagcggaggcttggagtgagagcagggaagtgtggggcgaggtgggcggggcgttgcacgcgtgcgcggccagcgaaagaagggagggggcgggagatccgagacaacgttaccccgtcaacacccaatcaggagccggcctgaccccgccccctcttctcacgttattggctgagaggcccccagatgggcggggccggccgtggggttggggagggcagggggcggggaggaggaggaaggcgctggcgggcagtgatggcggctggtgatggggacgtgaagctaggcaccctggggagtggcagcgagagcagcaacgacggcggcagcgagagtccaggcgacgcgggagcggcagcggaagggggaggctgggcggcggcggcgttggcgcttctgacggggggcggggaaatgctgctgaacgtggcgctggtggctctggtgctgctgggggcctaccggctgtgggtgcgctgggggcggcggggtctgggggccggggccggggcgggcgaggagagccccgccacctctctgcctcgcatgaagaagcgggacttcagcttggagcagctgcgccagtacgacggctcccgcaacccgcgcatcctgctcgcggtcaatgggaaagtcttcgacgtgaccaaaggcagcaagttctacggcccggcgggtccatatggaatatttgctggtagggatgcctccagaggactggccacattttgcctagataaagatgcacttagagatgaatatgatgatctctcagatttgaatgcagtacaaatggagagtgttcgagaatgggaaatgcagtttaaagaaaaatatgattatgtaggcagactcctaaaaccaggagaagaaccatcagaatatacagatgaagaagataccaaggatcacaataaacaggattgaactttgtaaacaaccaaagtcaggggccttcagaactgcaattcttactccctttcacagactgtccggagtctttgggtttgattcacctgctgcgaaaaactagacattatttatgctgccaaactcatttgttgcagttgtttgtaatgtctagtggggcttcatcatcctgaaaagaaggagacagggatttttttaaagagcaagaaagtcacaatattacttctttccttccttttttccttctttcctttcttctttctctttctttctttttaaaatatattgaagacaaccagatatgtatttgctactcaagtgtacagatctcctcaagaaacatcaagggactcctgtgtcacatactgtgtttttattttaacatgggtgagggaggcgacctgatcaggggaggtgggggtacacatcaatttgagttgttcaggctactgaaacattaaaatgtgaattcccaaacttttctttttggctttgtcagggaaaagaaaaatatctttataaagaaatctttggaaattaggagaaggaatttcaggtgggtttaagtcagagctagttccccaacagaaagatcatttgaaaccagtttttatcccttctctttccttccctttccctaaatcaaatcaatattaattgtgccttatttcacttaacatagacttgaattatttttagggaaagcccctataatgaattcagaaatcactacaagcagcattaagactgaagttggaatattctgttgaccataaaaccttgatatcattctgtgtatatagaatgtaaaaggaatattacagtgttaactgccatatatgtaatatacacaaactcaattagcattgtaatggccaaatgcattcccccatgcttttctgttttcaaaaaaattgaaaaacaaatcaactcttatccccaacagctgcctaattttaggagtctgaccctccacatctcactggtgtgggtgcatggggctgtggagtgggtgtcagtatggatgtgtctgaatgtgtgaggccttggaagggactctttctgcagatactgtaaatacaagtaccattttaataaagcatgtacaataaaccaaaa

SEQ ID NO: 458296 - DNA, 1898 bp, Homo sapiens
ctcccgcaggggttacgaacgaaaggcgagcgcgtggcgctcaggagcccgcgcacgcgctgtgttctcgtctccgaccatgagcgtccgcgcggccgtcgtagcatcttttcttcagacccgcccggctcgtctacttaacctagcggaggcttggagtgagagcagggaagtgtggggcgaggtgggcggggcgttgcacgcgtgcgcggccagcgaaagaagggagggggcgggagatccgagacaacgttaccccgtcaacacccaatcaggagccggcctgaccccgccccctcttctcacgttattggctgagaggcccccagatgggcggggccggccgtggggttggggagggcagggggcggggaggaggaggaaggcgctggcgggcagtgatggcggctggtgatggggacgtgaagctaggcaccctggggagtggcagcgagagcagcaacgacggcggcagcgagagtccaggcgacgcgggagcggcagcggaagggggaggctgggcggcggcggcgttggcgcttctgacggggggcggggaaatgctgctgaacgtggcgctggtggctctggtgctgctgggggcctaccggctgtgggtgcgctgggggcggcggggtctgggggccggggccggggcgggcgaggagagccccgccacctctctgcctcgcatgaagaagcgggacttcagcttggagcagctgcgccagtacgacggctcccgcaacccgcgcatcctgctcgcggtcaatgggaaagtcttcgacgtgaccaaaggcagcaagttctacggcccggcgggtccatatggaatatttgctggtagggatgcctccagaggactggccacattttgcctagataaagatgcacttagagatgaatatgatgatctctcagatttgaatgcagtacaaatggagagtgttcgagaatgggaaatgcagtttaaagaaaaatatgattatgtaggcagactcctaaaaccaggagaagaaccatcagaatatacagatgaagaagataccaaggatcacaataaacaggattgaactttgtaaacaaccaaagtcaggggccttcagaactgcaattcttactccctttcacagactgtccggagtctttgggtttgattcacctgctgcgaaaaacattcaacaaattgtgtacaagataaattaatctcactatgaagatttgaataactagacattatttatgctgccaaactcatttgttgcagttgtttgtaatgtctagtggggcttcatcatcctgaaaagaaggagacagggatttttttaaagagcaagaaagtcacaatattacttctttccttccttttttccttctttcctttcttctttctctttctttctttttaaaatatattgaagacaaccagatatgtatttgctactcaagtgtacagatctcctcaagaaacatcaagggactcctgtgtcacatactgtgtttttattttaacatgggtgagggaggcgacctgatcaggggaggtgggggtacacatcaatttgagttgttcaggctactgaaacattaaaatgtgaattcccaaacttttctttttggctttgtcagggaaaagaaaaatatctttataaagaaatctttggaaattaggagaaggaatttcaggtgggtttaagtcagagctagttccccaacagaaagatcatttgaaaccagtttttatcccttctctttccttccctttccctaaatcaaatcaatattaattgtgccttatttcacttaacatagacttgaattatttttagggaaagcccctataatgaattcagaaatcaccaccaggatcaccaccagattcttccggtccggctcga

SEQ ID NO: 458297 - DNA, 567 bp, Homo sapiens
cgaagccctgctaagtcagcgcatttttcgcatcaaacaggtcattcgtgacctgtccatactcctcttctactcttccctttccctaaatcaaatcaatattaattgtgccttatttcacttaacatagacttgaattatttttagggaaagcccctataatgaattcagaaatcactacaagcagcattaagactgaagttggaatattctgttgaccataaaaccttgatatcattctgtgtatatagaatgtaaaaggaatattacagtgttaactgccatatatgtaatatacacaaactcaattagcattgtaatggccaaatgcattcccccatgcttttctgttttcaaaaaaattgaaaaacaaatcaactcttatccccaacagctgcctaattttaggagtctgaccctccacatctcactggtgtgggtgcatggggctgtggagtgggtgtcagtatggatgtgtctgaatgtgtgaggccttggaagggactctttctgcagatactgtaaatacaagtaccattttaataaagcatgtacaataaaccaaaa

SEQ ID NO: 458298 - DNA, 1783 bp, Homo sapiens
ggggggtgggaggcttgtggatggccaagtgtggctcgttgggagaggggtgcaaaaaggggggacaaagtgggattgaaagagtctaagcctgtgggggcgcatagataaagcgcaggttggtatgggatacagtcggcagttgtttcgcgaagcgcaggaatagtatgggcaccggaaatggctaagcatgtgggtgcggtgagtattgtaagcgcaatgttatgcttgaagtgtaaggtggctgaactgtcgcgtagacgatgtgtccgtcagtagtcgtgcttctggctgtagggtggctcagtggaatccagttttgttaacaccgacaattagttgtttcacagcccagtgtgtaagccagaagggcatgctctcgggtctgcccattcttggagataccagcttcaaattcaccaacaccagcagcaacaatcaggacagcacagtcagcctgagatgtccctgtaatcatgtttttgataaagtctctgtgtcctggggcatcaatgatagtcacaaagttggaatattctgttgaccataaaaccttgatatcattctgtgtatatagaatgtaaaaggaatattacagtgttaactgccatatatgtaatatacacaaactcaattagcattgtaatggccaaatgcattcccccatgcttttctgttttcaaaaaaattgaaaaacaaatcaactcttatccccaacagctgcctaattttaggagtctgaccctccacatctcactggtgtgggtgcatggggctgtggagtgggtgtcagtatggatgtgtctgaatgtgtgaggccttggaagggactctttctgcagatactgtaaatacaagtaccattttaataaagcatgtacaataaaccaaaataagcttgagttggactttatatacagaactgtaagccagtgcattatgatacagttgtaagattgtgcatttgattcaagataaggaaaaatcttggaaatgaaaagcaggcactggttaaccaagttgtacacattgtaccacattcagcataactttaggaagaaattccactttgtggaacattctccagaaatccaagattattcaggtaagaattggtatattaaatgtacatctttttactttctattttgatgccaactgattatactagacaattagcactccaggtggttattgaacacaaaacagtaaaagaatattgcactgatagatactaaattattattttattaggttgaaaaagcccttactaaaagcccctcatatatcaattactttatttcattatgactacttaggttccgggctggggacaagttcacttaaaaaggcaatgttatttaacaggtcaccagttaagacttctgctttgtagatacatgcagaagccatcaaacaagggggagcttttaactgcaacaataagctaaagtatgtaaaatactacattctattcagtcttggagtgttttgtagaaagttatcttcagccaaatctttgctgaagactggttgtggagtgttggtaaatgctttgtgtttttatgtaaaatattttctaaacaaaaaatgttaaaagtacatgtcctctgtagtaaactgatatctatatatatgaatcattcaagcctaaagtctagtaataaactgtacttgtgaatagagaaaccctaaatattcatgcagtaaaaattatgcggtctgttaagaaaaatgagtaatttgtgttttggacttgaaataaacagtgttctgtagataa

SEQ ID NO: 458299 - DNA, 1264 bp, Homo sapiens
ctcccgcaggggttacgaacgaaaggcgagcgcgtggcgctcaggagcccgcgcacgcgctgtgttctcgtctccgaccatgagcgtccgcgcggccgtcgtagcatcttttcttcagacccgcccggctcgtctacttaacctagcggaggcttggagtgagagcagggaagtgtggggcgaggtgggcggggcgttgcacgcgtgcgcggccagcgaaagaagggagggggcgggagatccgagacaacgttaccccgtcaacacccaatcaggagccggcctgaccccgccccctcttctcacgttattggctgagaggcccccagatgggcggggccggccgtggggttggggagggcagggggcggggaggaggaggaaggcgctggcgggcagtgatggcggctggtgatggggacgtgaagctaggcaccctggggagtggcagcgagagcagcaacgacggcggcagcgagagtccaggcgacgcgggagcggcagcggaagggggaggctgggcggcggcggcgttggcgcttctgacggggggcggggaaatgctgctgaacgtggcgctggtggctctggtgctgctgggggcctaccggctgtgggtgcgctgggggcggcggggtctgggggccggggccggggcgggcgaggagagccccgccacctctctgcctcgcatgaagaagcgggacttcagcttggagcagctgcgccagtacgacggctcccgcaacccgcgcatcctgctcgcggtcaatgggaaagtcttcgacgtgaccaaaggcagcaagttctacggcccgggtgaggagttggaaggggaggggaaggaccccctgcagctgaagcacaacccccttcggacagggaggcctctgggcaccgggttagtttgcccagccttctcgtctccgggacccccgcgcctcggccgccgcacctgggacggcccatcccgcccctacacacacaccgtccccccgcagctacgggcacctccagttcttcccccgaaaccagggtccccggtggcgccccagagaccagctctcagcattcatctttcttccatcccatttctcctcgcagccttttttttttgtttctttggctggatttttcaaaatcgttttagttgtcacaggtcaacgctggcccttaaccttttttgagtctcctgattcctgggatggatggggcaccagggaagggagatttctgaagttgggacctaaactaaagttttggg

SEQ ID NO: 458300 - DNA, 646 bp, Homo sapiens
gcctcaaaaattgtgatacttacagtcagcttcttcattaaggtttagttttttaaaaatacaggcttatatttaaaactgagttgattactgatttcaatactataatttattccaaaatgattttacagatcttaacactcgaaatgtagataaaaaatatctttcccctttcttatgccctcataacatcagtttttaccacttgtgtgatgctgtcccagctgtttatctgacccctgggtcccttggaacagctgttctggtttagctgggtactgagatgggtcctggacttactcatttttaaaaaagatctccaagtgattctgatgcagtatccaactaagaatcactggtacagaacaccctcttgcaaagaattcccaagccttataagttccctaatcctgttttcttttgttcaggctttacatgtgtataaagaccagccatggtgaagcaattttagaatatttagataatattctaataatcatattttatatgattctaaaacagacaaatgccttttctctgtataatggaatagtgaaacaaatttgatcaccactgattttcttttgatgtatctttcagaaaaatatgattatgtaggcagactcctaaaaccaggagaagaacc

SEQ ID NO: 458301 - DNA, 2249 bp, Homo sapiens
ctcccgcaggggttacgaacgaaaggcgagcgcgtggcgctcaggagcccgcgcacgcgctgtgttctcgtctccgaccatgagcgtccgcgcggccgtcgtagcatcttttcttcagacccgcccggctcgtctacttaacctagcggaggcttggagtgagagcagggaagtgtggggcgaggtgggcggggcgttgcacgcgtgcgcggccagcgaaagaagggagggggcgggagatccgagacaacgttaccccgtcaacacccaatcaggagccggcctgaccccgccccctcttctcacgttattggctgagaggcccccagatgggcggggccggccgtggggttggggagggcagggggcggggaggaggaggaaggcgctggcgggcagtgatggcggctggtgatggggacgtgaagctaggcaccctggggagtggcagcgagagcagcaacgacggcggcagcgagagtccaggcgacgcgggagcggcagcggaagggggaggctgggcggcggcggcgttggcgcttctgacggggggcggggaaatgctgctgaacgtggcgctggtggctctggtgctgctgggggcctaccggctgtgggtgcgctgggggcggcggggtctgggggccggggccggggcgggcgaggagagccccgccacctctctgcctcgcatgaagaagcgggacttcagcttggagcagctgcgccagtacgacggctcccgcaacccgcgcatcctgctcgcggtcaatgggaaagtcttcgacgtgaccaaaggcagcaagttctacggcccggcgggtccatatggaatatttgctggtagggatgcctccagaggactggccacattttgcctagataaagatgcacttagagatgaatatgatgatctctcagatttgaatgcagtacaaatggagagtgttcgagaatgggaaatgcagtttaaagaaaaatatgattatgtaggcagactcctaaaaccaggagaagaaccatcagaatatacagatgaagaagataccaaggatcacaataaacaggattgaactttgtaaacaaccaaagtcaggggccttcagaactgcaattcttactccctttcacagactgtccggagtctttgggtttgattcacctgctgcgaaaaacattcaacaaattgtgtacaagataaattaatctcactatgaagatttgaataactagacattatttatgctgccaaactcatttgttgcagttgtttgtaatgtctagtggggcttcatcatcctgaaaagaaggagacagggatttttttaaagagcaagaaagtcacaatattacttctttccttccttttttccttctttcctttcttctttctctttctttctttttaaaatatattgaagacaaccagatatgtatttgctactcaagtgtacagatctcctcaagaaacatcaagggactcctgtgtcacatactgtgtttttattttaacatgggtgagggaggcgacctgatcaggggaggtgggggtacacatcaatttgagttgttcaggctactgaaacattaaaatgtgaattcccaaacttttctttttggctttgtcagggaaaagaaaaatatctttataaagaaatctttggaaattaggagaaggaatttcaggtgggtttaagtcagagctagttccccaacagaaagatcatttgaaaccagtttttatcccttctctttccttccctttccctaaatcaaatcaatattaattgtgccttatttcacttaacatagacttgaattatttttagggaaagcccctataatgaattcagaaatcactacaagcagcattaagactgaagttggaatattctgttgaccataaaaccttgatatcattctgtgtatatagaatgtaaaaggaatattacagtgttaactgccatatatgtaatatacacaaactcaattagcattgtaatggccaaatgcattcccccatgcttttctgttttcaaaaaaattgaaaaacaaatcaactcttatccccaacagctgcctaattttaggagtctgaccctccacatctcactggtgtgggtgcatggggctgtggagtgggtgtcagtatggatgtgtctgaatgtgtgaggccttggaagggactctttctgcagatactgtaaatacaagtaccattttaataaagcatgtacaataaaccaaaa

SEQ ID NO: 458302 - DNA, 3241 bp, Homo sapiens
ctcccgcaggggttacgaacgaaaggcgagcgcgtggcgctcaggagcccgcgcacgcgctgtgttctcgtctccgaccatgagcgtccgcgcggccgtcgtagcatcttttcttcagacccgcccggctcgtctacttaacctagcggaggcttggagtgagagcagggaagtgtggggcgaggtgggcggggcgttgcacgcgtgcgcggccagcgaaagaagggagggggcgggagatccgagacaacgttaccccgtcaacacccaatcaggagccggcctgaccccgccccctcttctcacgttattggctgagaggcccccagatgggcggggccggccgtggggttggggagggcagggggcggggaggaggaggaaggcgctggcgggcagtgatggcggctggtgatggggacgtgaagctaggcaccctggggagtggcagcgagagcagcaacgacggcggcagcgagagtccaggcgacgcgggagcggcagcggaagggggaggctgggcggcggcggcgttggcgcttctgacggggggcggggaaatgctgctgaacgtggcgctggtggctctggtgctgctgggggcctaccggctgtgggtgcgctgggggcggcggggtctgggggccggggccggggcgggcgaggagagccccgccacctctctgcctcgcatgaagaagcgggacttcagcttggagcagctgcgccagtacgacggctcccgcaacccgcgcatcctgctcgcggtcaatgggaaagtcttcgacgtgaccaaaggcagcaagttctacggcccggcgggtccatatggaatatttgctggtagggatgcctccagaggactggccacattttgcctagataaagatgcacttagagatgaatatgatgatctctcagatttgaatgcagtacaaatggagagtgttcgagaatgggaaatgcagtttaaagaaaaatatgattatgtaggcagactcctaaaaccaggagaagaaccatcagaatatacagatgaagaagataccaaggatcacaataaacaggattgaactttgtaaacaaccaaagtcaggggccttcagaactgcaattcttactccctttcacagactgtccggagtctttgggtttgattcacctgctgcgaaaaacattcaacaaattgtgtacaagataaattaatctcactatgaagatttgaataactagacattatttatgctgccaaactcatttgttgcagttgtttgtaatgtctagtggggcttcatcatcctgaaaagaaggagacagggatttttttaaagagcaagaaagtcacaatattacttctttccttccttttttccttctttcctttcttctttctctttctttctttttaaaatatattgaagacaaccagatatgtatttgctactcaagtgtacagatctcctcaagaaacatcaagggactcctgtgtcacatactgtgtttttattttaacatgggtgagggaggcgacctgatcaggggaggtgggggtacacatcaatttgagttgttcaggctactgaaacattaaaatgtgaattcccaaacttttctttttggctttgtcagggaaaagaaaaatatctttataaagaaatctttggaaattaggagaaggaatttcaggtgggtttaagtcagagctagttccccaacagaaagatcatttgaaaccagtttttatcccttctctttccttccctttccctaaatcaaatcaatattaattgtgccttatttcacttaacatagacttgaattatttttagggaaagcccctataatgaattcagaaatcactacaagcagcattaagactgaagttggaatattctgttgaccataaaaccttgatatcattctgtgtatatagaatgtaaaaggaatattacagtgttaactgccatatatgtaatatacacaaactcaattagcattgtaatggccaaatgcattcccccatgcttttctgttttcaaaaaaattgaaaaacaaatcaactcttatccccaacagctgcctaattttaggagtctgaccctccacatctcactggtgtgggtgcatggggctgtggagtgggtgtcagtatggatgtgtctgaatgtgtgaggccttggaagggactctttctgcagatactgtaaatacaagtaccattttaataaagcatgtacaataaaccaaaataagcttgagttggactttatatacagaactgtaagccagtgcattatgatacagttgtaagattgtgcatttgattcaagataaggaaaaatcttggaaatgaaaagcaggcactggttaaccaagttgtacacattgtaccacattcagcataactttaggaagaaattccactttgtggaacattctccagaaatccaagattattcaggtaagaattggtatattaaatgtacatctttttactttctattttgatgccaactgattatactagacaattagcactccaggtggttattgaacacaaaacagtaaaagaatattgcactgatagatactaaattattattttattaggttgaaaaagcccttactaaaagcccctcatatatcaattactttatttcattatgactacttaggttccgggctggggacaagttcacttaaaaaggcaatgttatttaacaggtcaccagttaagacttctgctttgtagatacatgcagaagccatcaaacaagggggagcttttaactgcaacaataagctaaagtatgtaaaatactacattctattcagtcttggagtgttttgtagaaagttatcttcagccaaatctttgctgaagactggttgtggagtgttggtaaatgctttgtgtttttatgtaaaatattttctaaacaaaaaatgttaaaagtacatgtcctctgtagtaaactgatatctatatatatgaatcattcaagcctaaagtctagtaataaactgtacttgtgaatagagaaaccctaaatattcatgcagtaaaaattatgcggtctgttaagaaaaatgagtaatttgtgttttggacttgaaataaacagtgttctgtagataacaaaaaagaaaaaaaaagggggggggtaaaaaattcccgggggccaattacggacccttttttggaaggggcccagggaggtaaaaaaggagggggtaaagg

SEQ ID NO: 458303 - DNA, 2106 bp, Homo sapiens
ctcccgcaggggttacgaacgaaaggcgagcgcgtggcgctcaggagcccgcgcacgcgctgtgttctcgtctccgaccatgagcgtccgcgcggccgtcgtagcatcttttcttcagacccgcccggctcgtctacttaacctagcggaggcttggagtgagagcagggaagtgtggggcgaggtgggcggggcgttgcacgcgtgcgcggccagcgaaagaagggagggggcgggagatccgagacaacgttaccccgtcaacacccaatcaggagccggcctgaccccgccccctcttctcacgttattggctgagaggcccccagatgggcggggccggccgtggggttggggagggcagggggcggggaggaggaggaaggcgctggcgggcagtgatggcggctggtgatggggacgtgaagctaggcaccctggggagtggcagcgagagcagcaacgacggcggcagcgagagtccaggcgacgcgggagcggcagcggaagggggaggctgggcggcggcggcgttggcgcttctgacggggggcggggaaatgctgctgaacgtggcgctggtggctctggtgctgctgggggcctaccggctgtgggtgcgctgggggcggcggggtctgggggccggggccggggcgggcgaggagagccccgccacctctctgcctcgcatgaagaagcgggacttcagcttggagcagctgcgccagtacgacggctcccgcaacccgcgcatcctgctcgcggtcaatgggaaagtcttcgacgtgaccaaaggcagcaagttctacggcccggcgggtccatatggaatatttgctggtagggatgcctccagaggactggccacattttgcctagataaagatgcacttagagatgaatatgatgatctctcagatttgaatgcagtacaaatggagagtgttcgagaatgggaaatgcagtttaaagaaaaatatgattatgtaggcagactcctaaaaccaggagaagaaccatcagaatatacagatgaagaagataccaaggatcacaataaacaggattgaactttgtaaacaaccaaagtcaggggccttcagaactgcaattcttactccctttcacagactgtccggagtctttgggtttgattcacctgctgcgaaaaacattcaacaaattgtgtacaagataaattaatctcactatgaagatttgaataactagacattatttatgctgccaaactcatttgttgcagttgtttgtaatgtctagtggggcttcatcatcctgaaaagaaggagacagggatttttttaaagagcaagaaagtcacaatattacttctttccttccttttttccttctttcctttcttctttctctttctttctttttaaaatatattgaagacaaccagatatgtatttgctactcaagtgtacagatctcctcaagaaacatcaagggactcctgtgtcacatactgtgtttttattttaacatgggtgagggaggcgacctgatcaggggaggtgggggtacacatcaatttgagttgttcaggctactgaaacattaaaatgtgaattcccaaacttttctttttggctttgtcagggaaaagaaaaatatctttataaagaaatctttggaaattaggagaaggaatttcagggaaagcccctataatgaattcagaaatcactacaagcagcattaagactgaagttggaatattctgttgaccataaaaccttgatatcattctgtgtatatagaatgtaaaaggaatattacagtgttaactgccatatatgtaatatacacaaactcaattagcattgtaatggccaaatgcattcccccatgcttttctgttttcaaaaaaattgaaaaacaaatcaactcttatccccaacagctgcctaattttaggagtctgaccctccacatctcactggtgtgggtgcatggggctgtggagtgggtgtcagtatggatgtgtctgaatgtgtgaggccttggaagggactctttctgcagatactgtaaatacaagtaccattttaataaagcatgtacaataaaccaaaa

SEQ ID NO: 458304 - DNA, 2290 bp, Homo sapiens
ctcccgcaggggttacgaacgaaaggcgagcgcgtggcgctcaggagcccgcgcacgcgctgtgttctcgtctccgaccatgagcgtccgcgcggccgtcgtagcatcttttcttcagacccgcccggctcgtctacttaacctagcggaggcttggagtgagagcagggaagtgtggggcgaggtgggcggggcgttgcacgcgtgcgcggccagcgaaagaagggagggggcgggagatccgagacaacgttaccccgtcaacacccaatcaggagccggcctgaccccgccccctcttctcacgttattggctgagaggcccccagatgggcggggccggccgtggggttggggagggcagggggcggggaggaggaggaaggcgctggcgggcagtgatggcggctggtgatggggacgtgaagctaggcaccctggggagtggcagcgagagcagcaacgacggcggcagcgagagtccaggcgacgcgggagcggcagcggaagggggaggctgggcggcggcggcgttggcgcttctgacggggggcggggaaatgctgctgaacgtggcgctggtggctctggtgctgctgggggcctaccggctgtgggtgcgctgggggcggcggggtctgggggccggggccggggcgggcgaggagagccccgccacctctctgcctcgcatgaagaagcgggacttcagcttggagcagctgcgccagtacgacggctcccgcaacccgcgcatcctgctcgcggtcaatgggaaagtcttcgacgtgaccaaaggcagcaagttctacggcccggcgggtccatatggaatatttgctggtagggatgcctccagaggactggccacattttgcctagataaagatgcacttagagatgaatatgatgatctctcagatttgaatgcagtacaaatggagagtgttcgagaatgggaaatgcagtttaaagaaaaatatgattatgtaggcagactcctaaaaccaggagaagaaccatcagaatatacagatgaagaagataccaaggatcacaataaacaggattgaactttgtaaacaaccaaagtcaggggccttcagaactgcaattcttactccctttcacagactgtccggagtctttgggtttgattcacctgctgcgaaaaacattcaacaaattgtgtacaagataaattaatctcactatgaagatttgaataactagacattatttatgctgccaaactcatttgttgcagttgtttgtaatgtctagtggggcttcatcatcctgaaaagaaggagacagggatttttttaaagagcaagaaagtcacaatattacttctttccttccttttttccttctttcctttcttctttctctttctttctttttaaaatatattgaagacaaccagatatgtatttgctactcaagtgtacagatctcctcaagaaacatcaagggactcctgtgtcacatactgtgtttttattttaacatgggtgagggaggcgacctgatcaggggaggtgggggtacacatcaatttgagttgttcaggctactgaaacattaaaatgtgaattcccaaacttttctttttggctttgtcagggaaaagaaaaatatctttataaagaaatctttggaaattaggagaaggaatttcagggaaagcccctataatgaattcagaaatcactacaagcagcattaagactgaagttggaatattctgttgaccataaaaccttgatatcattctgtgtatatagaatgtaaaaggaatattacagtgttaactgccatatatgtaatatacacaaactcaattagcattgtaatggccaaatgcattcccccatgcttttctgttttcaaaaaaattgaaaaacaaatcaactcttatccccaacagctgcctaattttaggagtctgaccctccacatctcactggtgtgggtgcatggggctgtggagtgggtgtcagtatggatgtgtctgaatgtgtgaggccttggaagggactctttctgcagatactgtaaatacaagtaccattttaataaagcatgtacaataaaccaaaaaacaaaaaaaaaaaaaaaaaaaaaaaaaaaaaagaaaaaaaacaaaaaagaaaagaaaaaaaaaaaaagaaaaaacgaaaaaagtaaaagaccaagaaaaacgaacctctcaccccgcacactacatgacaatacgagccaccttaaactaacaattgtcacatacaccaacagccacacgcag

SEQ ID NO: 458305 - DNA, 1822 bp, Homo sapiens
ctacaaggaggcaggcaagacagcaaggcatagagacaacatagagctaagtaaagccagtggaaatgaagagtcttccaatcctactgttgctgtgcgtggcagtttgctcagcctatccattggatggagctgcaaggggtgaggacaccagcatgaaccttgttcagaaatatctagaaaactactacgacctcaaaaaagatgtgaaacagtttgttaggagaaaggacagtggtcctgttgttaaaaaaatccgagaaatgcagaagttccttggattggaggtgacggggaagctggactccgacactctggaggtgatgcgcaagcccaggtgtggagttcctgatgttggtcacttcagaacctttcctggcatcccgaagtggaggaaaacccaccttacatacaggattgtgaattatacaccagatttgccaaaagatgctgttgattctgctgttgagaaagctctgaaagtctgggaagaggtgactccactcacattctccaggctgtatgaaggagaggctgatataatgatctcttttgcagttagagaacatggagacttttacccttttgatggacctggaaatgttttggcccatgcctatgcccctgggccagggattaatggagatgcccactttgatgatgatgaacaatggacaaaggatacaacagggaccaatttatttctcgttgctgctcatgaaattggccactccctgggtctctttcactcagccaacactgaagctttgatgtacccactctatcactcactcacagacctgactcggttccgcctgtctcaagatgatataaatggcattcagtccctctatggacctccccctgactcccctgagacccccctggtacccacggaacctgtccctccagaacctgggacgccagccaactgtgatcctgctttgtcctttgatgctgtcagcactctgaggggagaaatcctgatctttaaagacaggcacttttggcgcaaatccctcaggaagcttgaacctgaattgcatttgatctcttcattttggccatctcttccttcaggcgtggatgccgcatatgaagttactagcaaggacctcgttttcatttttaaaggaaatcaattctgggccatcagaggaaatgaggtacgagctggatacccaagaggcatccacaccctaggtttccctccaaccgtgaggaaaatcgatgcagccatttctgataaggaaaagaacaaaacatatttctttgtagaggacaaatactggagatttgatgagaagagaaattccatggagccaggctttcccaagcaaatagctgaagactttccagggattgactcaaagattgatgctgtttttgaagaatttgggttcttttatttctttactggatcttcacagttggagtttgacccaaatgcaaagaaagtgacacacactttgaagagtaacagctggcttaattgttgaaagagatatgtagaaggcacaatatgggcactttaaatgaagctaataattcttcacctaagtctctgtgaattgaaatgttcgttttctcctgcctgtgctgtgactcgagtcacactcaagggaacttgagcgtgaatctgtatcttgccggtcatttttatgttattacagggcattcaaatgggctgctgctttaaccccatcggatagcggggggcaagaggtctcaccagacaaagacgcaatcgtgtgcaacaggcaagtgtctccatctgtctagagtagttgggtcaatcatcaggaaaacttccctcctacca

SEQ ID NO: 458306 - DNA, 538 bp, Homo sapiens
ttccagggattgactcaaagattgatgctgtttttgaagaatttggtaagaggatacttactgtgttggccatagagcacttgaaacattttatgatatcagagggaagaggagcattgaaactttttaataacaagtgtttcttagggccagttccctcctcaaaattttgattcgcctacatttgtactcattatagaactacttcacaaaataacttgtttggaaccataaagataattacacaaatctcgctactttatcttatacatgcatataaaatcaaagtgctccagtgtcacttacatctcgagctaacatgtggagtcaagctcgactttcagattaccatgttagcataaaaatcccatcaagtggtgtggccaggtttaatgttggttagctggccttctcctccaccctatcttattgctgctactaattcccagggagattttttgtctgtctttcctgagttgtcagtcattgcccatgccagtcatttgcaaatacttacctttccatgtgcccaaagttt

SEQ ID NO: 458307 - DNA, 1819 bp, Homo sapiens
ctacaaggaggcaggcaagacagcaaggcatagagacaacatagagctaagtaaagccagtggaaatgaagagtcttccaatcctactgttgctgtgcgtggcagtttgctcagcctatccattggatggagctgcaaggggtgaggacaccagcatgaaccttgttcagaaatatctagaaaactactacgacctcaaaaaagatgtgaaacagtttgttaggagaaaggacagtggtcctgttgttaaaaaaatccgagaaatgcagaagttccttggattggaggtgacggggaagctggactccgacactctggaggtgatgcgcaagcccaggtgtggagttcctgatgttggtcacttcagaacctttcctggcatcccgaagtggaggaaaacccaccttacatacaggattgtgaattatacaccagatttgccaaaagatgctgttgattctgctgttgagaaagctctgaaagtctgggaagaggtgactccactcacattctccaggctgtatgaaggagaggctgatataatgatctcttttgcagttagagaacatggagacttttacccttttgatggacctggaaatgttttggcccatgcctatgcccctgggccagggattaatggagatgcccactttgatgatgatgaacaatggacaaaggatacaacagggaccaatttatttctcgttgctgctcatgaaattggccactccctgggtctctttcactcagccaacactgaagctttgatgtacccactctatcactcactcacagacctgactcggttccgcctgtctcaagatgatataaatggcattcagtccctctatggacctccccctgactcccctgagacccccctggtacccacggaacctgtccctccagaacctgggacgccagccaactgtgatcctgctttgtcctttgatgctgtcagcactctgaggggagaaatcctgatctttaaagacaggcacttttggcgcaaatccctcaggaagcttgaacctgaattgcatttgatctcttcattttggccatctcttccttcaggcgtggatgccgcatatgaagttactagcaaggacctcgttttcatttttaaaggaaatcaattctgggccatcagaggaaatgaggtacgagctggatacccaagaggcatccacaccctaggtttccctccaaccgtgaggaaaatcgatgcagccatttctgataaggaaaagaacaaaacatatttctttgtagaggacaaatactggagatttgatgagaagagaaattccatggagccaggctttcccaagcaaatagctgaagactttccagggattgactcaaagattgatgctgtttttgaagaatttgggttcttttatttctttactggatcttcacagttggagtttgacccaaatgcaaagaaagtgacacacactttgaagagtaacagctggcttaattgttgaaagagatatgtagaaggcacaatatgggcactttaaatgaagctaataattcttcacctaagtctctgtgaattgaaatgttcgttttctcctgcctgtgctgtgactcgagtcacactcaagggaacttgagcgtgaatctgtatcttgccggtcatttttatgttattacagggcattcaaatgggctgctgcttagcttgcaccttgtcacatagagtgatctttcccaagagaaggggaagcactcgtgtgcaacagacaagtgactgtatctgtgtagactatttgcttatttaataaagacgatttgtcagtta

SEQ ID NO: 458308 - DNA, 1586 bp, Homo sapiens
  misc_feature (4)..(4): n is a, c, g, or t
tggnaccgccggaagtttctgccgcggctttgcggggacgggggagtggtagtgggggctgcagctgccggacccaggcactgacccttgacctccggtggctcccccatctctcaggcgcgatggctacgggcgcggatgtacgggacattctagaactcgggggtccagaaggggatgcagcctctgggaccatcagcaagaaggacattatcaacccggacaagaaaaaatccaagaagtcctctgagacactgactttcaagaggcccgagggcatgcaccgggaagtctatgccttgctctactctgacaagaaggatgcacccccactgctacccagtgacactggccagggataccgtacagtgaaggccaagttgggctccaagaaggtgcggccttggaagtggatgccattcaccaacccggcccgcaaggacggagcaatgttcttccactggcgacgtgcagcggaggagggcaaggactacccctttgccaggttcaataagactgtgcaggtgcctgtgtactcggagcaggagtaccagctttatctccacgatgatgcttggactaaggcagaaactgaccacctctttgacctcagccgccgctttgacctgcgttttgttgttatccatgaccggtatgaccaccagcagttcaagaagcgttctgtggaagacctgaaggagcggtactaccacatctgtgctaagcttgccaacgtgcgggctgtgccaggcacagaccttaagataccagtatttgatgctgggcacgaacgacggcggaaggaacagcttgagcgtctctacaaccggaccccagagcaggtggcagaggaggagtacctgctacaggagctgcgcaagattgaggcccggaagaaggagcgggagaaacgcagccaggacctgcagaagctgatcacagcggcagacaccactgcagagcagcggcgcacggaacgcaaggcccccaaaaagaagctaccccagaaaaaggaggctgagaagccggctgttcctgagactgcaggcatcaagtttccagacttcaagtctgcaggtgtcacgctgcggagccaacggatgaagctgccaagctctgtgggacagaagaagatcaaggccctggaacagatgctgctggagcttggtgtggagctgagcccgacacctacggaggagctggtgcacatgttcaatgagctgcgaagcgacctggtgctgctctacgagctcaagcaggcctgtgccaactgcgagtatgagctgcagatgctgcggcaccgtcatgaggcactggcccgggctggtgtgctagggggccctgccacaccagcatcaggcccaggcccggcctctgctgagccggcagtgactgaacccggacttggtcctgaccccaaggacaccatcattgatgtggtgggcgcacccctcacgcccaattcgagaaagcgacgggagtcggcctccagctcatcttccgtgaagaaagccaagaagccgtgagaggccccacggggtgtgggcgacgctgttatgtaaatagagctgctgagttggaccagg

SEQ ID NO: 458309 - DNA, 428 bp, Homo sapiens
aattttcaggaaagggtctaggttgtggttcctttctgtggtttccttcctcagaaaaaatccaagaagtcctctgagacactgactttcaagaggcccgagggcatgcaccgggaagttatgagctgcagatgctgcggcaccgtcatgaggcactggcccgggctggtgtgctagggggccctgccacaccagcatcaggcccaggcccggcctctgctgagccggcagtgactgaacccggacttggtcctgaccccaaggacaccatcattgatgtggtgggcgcacccctcacgcccaattcgagaaagcgacgggagtcggcctccagctcatcttccgtgaagaaagccaagaagccgtgagaggccccacggggtgtgggcgacgctgttatgtaaatagagctgctgagttggaccagg

SEQ ID NO: 458310 - DNA, 337 bp, Homo sapiens
gcggccgcctactactactattgctcgaattcaagcttctaacgatgtacggcgtcatgaggcactggcccgggctggtgtgctagggggccctgccacaccagcatcaggcccaggcccggcctctgctgagccggcagtgactgaacccggacttggtcctgaccccaaggacaccatcattgatgtggtgggcgcacccctcacgcccaattcgagaaagcgacgggagtcggcctccagctcatcttccgtgaagaaagccaagaagccgtgagaggccccacggggtgtgggcgacgctgttatgtaaatagagctgctgagttggaccagg

SEQ ID NO: 458311 - DNA, 878 bp, Homo sapiens
caatcctcgtggcaaatgcatgcagagtaggactctgtgggtcttttctgcccaagggatcctgttctttcccggacctgctctggtttttcatggcttttcttggtctttcaaatgttgctgttcctcagagctgtatcctaggtgctctagtcttcttgttctctactttcttagtatgaaccctgtggcttcagttaccctctctacaagtcaccaatccagagcagtgcttccttcgcatccagtcatttactaatatctctttctcaatgccccacaggtaccttacatcaggtaggtaccctgaacagagctcatcatcttccctctgtcagtcccaaatctgttccccatctcagtgaatggcactatcttccacccagttgcccaaaccagaaacttgggggatcgtccttgacttagtcttctcccttagtcctcacagtatttaaatcaacaacagaacaaagaaggtaggggaaaacaaacaacaaacatgtaaggaaataaattggagtctttcaaataagagccgtcagtaacacgaaaccaggatttgaatggatatgaaatgagataaagagtgaacttgtaggtgtaggggagtcctaccttaggttggtcagggagggtctgagaacgtggcatttgagctggatgccagtgatacatctatttattgagtcctgttgattctttttccataataaatcacatctctgactatattcttcatcactatgccagccccctagtccaagctgagttacctgtgtagctcagcagagcacggccttcccagactcacccattcagtgagaggcagagctagattgggctaggtttcctagtccattacttaagtcattgtacag

SEQ ID NO: 458312 - DNA, 512 bp, Homo sapiens
  misc_feature (13)..(14): n is a, c, g, or t
ctctagaggatcnncacactgggttcgattctagaactcgggggtccagaaggggatgcagcctctgggaccatcagcaagaaggacattatcaacccggacaagaaaaaatccaagaagtcctctgagacactgactttcaagaggcccgagggcatgcaccgggaagtctatgccttgctctactctgacaagaaggatgcacccccactgctacccagtgacactggccagggataccgtacagtgaaggccaagttgggctccaagaaggtgcggccttggaagtggatgccattcaccaacccggcccgcaaggacggagcaatgttcttccactggcgacgtgcagcggaggagggcaaggactacccctttgccaggttcaataagggtaagctaccttcattcggacacaggccaagattgccctcccactttgagccatttgtgcgagctctccagtctcctagggttggttctgggggcacgcttatgcccaactgtgatta

SEQ ID NO: 458313 - DNA, 1622 bp, Homo sapiens
  misc_feature (4)..(4): n is a, c, g, or t
tggnaccgccggaagtttctgccgcggctttgcggggacgggggagtggtagtgggggctgcagctgccggacccaggcactgacccttgacctccggtggctcccccatctctcaggcgcgatggctacgggcgcggatgtacgggacattctagaactcgggggtccagaaggggatgcagcctctgggaccatcagcaagaaggacattatcaacccggacaagaaaaaatccaagaagtcctctgagacactgactttcaagaggcccgagggcatgcaccgggaagtctatgccttgctctactctgacaagaaggatgcacccccactgctacccagtgacactggccagggataccgtacagtgaaggccaagttgggctccaagaaggtgcggccttggaagtggatgccattcaccaacccggcccgcaaggacggagcaatgttcttccactggcgacgtgcagcggaggagggcaaggactacccctttgccaggttcaataagactgtgcaggtgcctgtgtactcggagcaggagtaccagctttatctccacgatgatgcttggactaaggcagaaactgaccacctctttgacctcagccgccgctttgacctgcgttttgttgttatccatgaccggtatgaccaccagcagttcaagaagcgttctgtggaagacctgaaggagcggtactaccacatctgtgctaagcttgccaacgtgcgggctgtgccaggcacagaccttaagataccagtatttgatgctgggcacgaacgacggcggaaggaacagcttgagcgtctctacaaccggaccccagagcaggtggcagaggaggagtacctgctacaggagctgcgcaagattgaggcccggaagaaggagcgggagaaacgcagccaggacctgcagaagctgatcacagcggcagacaccactgcagagcagcggcgcacggaacgcaaggcccccaaaaagaagctaccccagaaaaaggaggctgagaagccggctgttcctgagactgcaggcatcaagtttccagacttcaagtctgcaggtgtcacgctgcggagccaacggatgaagctgccaagctctgtgggacagaagaagatcaaggccctggaacagatgctgctggagcttggtgtggagctgagcccgacacctacggaggagctggtgcacatgttcaatgagctgcgaagcgacctggtgctgctctacgagctcaagcaggcctgtgccaactgcgagtatgagctgcagatgctgcggcaccgtcatgaggcactggcccgggctggtgtgctagggggccctgccacaccagcatcaggcccaggcccggcctctgctgagccggcagtgactgaacccggacttggtcctgaccccaaggacaccatcattgatgtggtgggcgcacccctcacgcccaattcgagaaagcgacgggagtcggcctccagctcatcttccgtgaagaaagccaagaagccgtgagaggccccacggggtgtgggcgacgctgttatgtaaatagagctgctgagttggaccaggaaaaaaaaaaaggggcggggtataaggtttctcagg

SEQ ID NO: 458314 - DNA, 1753 bp, Homo sapiens
  misc_feature (4)..(4): n is a, c, g, or t
tggnaccgccggaagtttctgccgcggctttgcggggacgggggagtggtagtgggggctgcagctgccggacccaggcactgacccttgacctccggtggctcccccatctctcaggcgcgatggctacgggcgcggatgtacgggacattctagaactcgggggtccagaaggggatgcagcctctgggaccatcagcaagaaggacattatcaacccggacaagaaaaaatccaagaagtcctctgagacactgactttcaagaggcccgagggcatgcaccgggaagtctatgccttgctctactctgacaagaaggatgcacccccactgctacccagtgacactggccagggataccgtacagtgaaggccaagttgggctccaagaaggtgcggccttggaagtggatgccattcaccaacccggcccgcaaggacggagcaatgttcttccactggcgacgtgcagcggaggagggcaaggactacccctttgccaggttcaataagactgtgcaggtgcctgtgtactcggagcaggagtaccagctttatctccacgatgatgcttggactaaggcagaaactgaccacctctttgacctcagccgccgctttgacctgcgttttgttgttatccatgaccggtatgaccaccagcagttcaagaagcgttctgtggaagacctgaaggagcggtactaccacatctgtgctaagcttgccaacgtgcgggctgtgccaggcacagaccttaagataccagtatttgatgctgggcacgaacgacggcggaaggaacagcttgagcgtctctacaaccggaccccagagcaggtggcagaggaggagtacctgctacaggagctgcgcaagattgaggcccggaagaaggagcgggagaaacgcagccaggacctgcagaagctgatcacagcggcagacaccactgcagagcagcggcgcacggaacgcaaggcccccaaaaagaagctaccccagaaaaaggaggctgagaagccggctgttcctgagactgcaggcatcaagtttccagacttcaagtctgcaggtgtcacgctgcggagccaacggatgaagctgccaagctctgtgggacagaagaagatcaaggccctggaacagatgctgctggagcttggtgtggagctgagcccgacacctacggaggagctggtgcacatgttcaatgagctgcgaagcgacctggtgctgctctacgagctcaagcaggcctgtgccaactgcgagtatgagctgcagatgctgcggcaccgtcatgaggcactggcccgggctggtgtgctagggggccctgccacaccagcatcaggcccaggcccggcctctgctgagccggcagtgactgaacccggacttggtcctgaccccaaggacaccatcattgatgtggtgggcgcacccctcacgcccaattcgagaaagcgacgggagtcggcctccagctcatcttccgtgaagaaagccaagaagccgtgagaggccccacggggtgtgggcgacgctgttatgctcttgggaaggaggagactgaggcagtcctgagaaagaccagagttggggaccacaggacaaagaccacatccatgtccccacagccatggcaaccctagggcagagccccagccccatggaccactcacgcgactcccattagcactcctccccttgaatcattaaatatgtatatcttattacacgccttg

SEQ ID NO: 458315 - DNA, 1632 bp, Homo sapiens
  misc_feature (4)..(4): n is a, c, g, or t
tggnaccgccggaagtttctgccgcggctttgcggggacgggggagtggtagtgggggctgcagctgccggacccaggtctggattggccccgccccctgacctgagcctggtccttcttcaggcactgacccttgacctccggtggctcccccatctctcaggcgcgatggctacgggcgcggatgtacgggacattctagaactcgggggtccagaaggggatgcagcctctgggaccatcagcaagaaggacattatcaacccggacaagaaaaaatccaagaagtcctctgagacactgactttcaagaggcccgagggcatgcaccgggaagtctatgccttgctctactctgacaagaaggatgcacccccactgctacccagtgacactggccagggataccgtacagtgaaggccaagttgggctccaagaaggtgcggccttggaagtggatgccattcaccaacccggcccgcaaggacggagcaatgttcttccactggcgacgtgcagcggaggagggcaaggactacccctttgccaggttcaataagactgtgcaggtgcctgtgtactcggagcaggagtaccagctttatctccacgatgatgcttggactaaggcagaaactgaccacctctttgacctcagccgccgctttgacctgcgttttgttgttatccatgaccggtatgaccaccagcagttcaagaagcgttctgtggaagacctgaaggagcggtactaccacatctgtgctaagcttgccaacgtgcgggctgtgccaggcacagaccttaagataccagtatttgatgctgggcacgaacgacggcggaaggaacagcttgagcgtctctacaaccggaccccagagcaggtggcagaggaggagtacctgctacaggagctgcgcaagattgaggcccggaagaaggagcgggagaaacgcagccaggacctgcagaagctgatcacagcggcagacaccactgcagagcagcggcgcacggaacgcaaggcccccaaaaagaagctaccccagaaaaaggaggctgagaagccggctgttcctgagactgcaggcatcaagtttccagacttcaagtctgcaggtgtcacgctgcggagccaacggatgaagctgccaagctctgtgggacagaagaagatcaaggccctggaacagatgctgctggagcttggtgtggagctgagcccgacacctacggaggagctggtgcacatgttcaatgagctgcgaagcgacctggtgctgctctacgagctcaagcaggcctgtgccaactgcgagtatgagctgcagatgctgcggcaccgtcatgaggcactggcccgggctggtgtgctagggggccctgccacaccagcatcaggcccaggcccggcctctgctgagccggcagtgactgaacccggacttggtcctgaccccaaggacaccatcattgatgtggtgggcgcacccctcacgcccaattcgagaaagcgacgggagtcggcctccagctcatcttccgtgaagaaagccaagaagccgtgagaggccccacggggtgtgggcgacgctgttatgtaaatagagctgctgagttggaccagg

SEQ ID NO: 458316 - DNA, 1512 bp, Homo sapiens
  misc_feature (4)..(4): n is a, c, g, or t
tggnaccgccggaagtttctgccgcggctttgcggggacgggggagtggtagtgggggctgcagctgccggacccaggcactgacccttgacctccggtggctcccccatctctcaggcgcgatggctacgggcgcggatgtacgggacattctagaactcgggggtccagaaggggatgcagcctctgggaccatcagcaagaaggacattatcaacccggacaagaaaaaatccaagaagtcctctgagacactgactttcaagaggcccgagggcatgcaccgggaagtctatgccttgctctactctgacaagaaggatgcacccccactgctacccagtgacactggccagggataccgtacagtgaaggccaagttgggctccaagaaggtgcggccttggaagtggatgccattcaccaacccggcccgcaaggacggagcaatgttcttccactggcgacgtgcagcggaggagggcaaggactacccctttgccaggttcaataagactgtgcaggtgcctgtgtactcggagcaggagtaccagctttatctccacgatgatgcttggactaaggcagaaactgaccacctctttgacctcagccgccgctttgacctgcgttttgttgttatccatgaccggtatgaccaccagcagttcaagaagcgttctgtggaagacctgaaggagcggtactaccacatctgtgctaagcttgccaacgtgcgggctgtgccaggcacagaccttaagataccagtatttgatgctgggcacgaacgacggcggaaggaacagcttgagcgtctctacaaccggaccccagagcaggtggcagaggaggagtacctgctacaggagctgcgcaagattgaggcccggaagaaggagcgggagaaacgcagccaggacctgcagaagctgatcacagcggcagacaccagctgttcctgagactgcaggcatcaagtttccagacttcaagtctgcaggtgtcacgctgcggagccaacggatgaagctgccaagctctgtgggacagaagaagatcaaggccctggaacagatgctgctggagcttggtgtggagctgagcccgacacctacggaggagctggtgcacatgttcaatgagctgcgaagcgacctggtgctgctctacgagctcaagcaggcctgtgccaactgcgagtatgagctgcagatgctgcggcaccgtcatgaggcactggcccgggctggtgtgctagggggccctgccacaccagcatcaggcccaggcccggcctctgctgagccggcagtgactgaacccggacttggtcctgaccccaaggacaccatcattgatgtggtgggcgcacccctcacgcccaattcgagaaagcgacgggagtcggcctccagctcatcttccgtgaagaaagccaagaagccgtgagaggccccacggggtgtgggcgacgctgttatgtaaatagagctgctgagttggaccagg

SEQ ID NO: 458317 - DNA, 1681 bp, Homo sapiens
  misc_feature (4)..(4): n is a, c, g, or t
tggnaccgccggaagtttctgccgcggctttgcggggacgggggagtggtagtgggggctgcagctgccggacccaggtgcggaagtgcgagggcccaggtggctgaaggggccgttaggaacatccaagcggtggggcacaggcagatccccgacctgacctggaccacccttctcctcttggcccgccccttcaactcgcctccgcttaggcgcgatggctacgggcgcggatgtacgggacattctagaactcgggggtccagaaggggatgcagcctctgggaccatcagcaagaaggacattatcaacccggacaagaaaaaatccaagaagtcctctgagacactgactttcaagaggcccgagggcatgcaccgggaagtctatgccttgctctactctgacaagaaggatgcacccccactgctacccagtgacactggccagggataccgtacagtgaaggccaagttgggctccaagaaggtgcggccttggaagtggatgccattcaccaacccggcccgcaaggacggagcaatgttcttccactggcgacgtgcagcggaggagggcaaggactacccctttgccaggttcaataagactgtgcaggtgcctgtgtactcggagcaggagtaccagctttatctccacgatgatgcttggactaaggcagaaactgaccacctctttgacctcagccgccgctttgacctgcgttttgttgttatccatgaccggtatgaccaccagcagttcaagaagcgttctgtggaagacctgaaggagcggtactaccacatctgtgctaagcttgccaacgtgcgggctgtgccaggcacagaccttaagataccagtatttgatgctgggcacgaacgacggcggaaggaacagcttgagcgtctctacaaccggaccccagagcaggtggcagaggaggagtacctgctacaggagctgcgcaagattgaggcccggaagaaggagcgggagaaacgcagccaggacctgcagaagctgatcacagcggcagacaccactgcagagcagcggcgcacggaacgcaaggcccccaaaaagaagctaccccagaaaaaggaggctgagaagccggctgttcctgagactgcaggcatcaagtttccagacttcaagtctgcaggtgtcacgctgcggagccaacggatgaagctgccaagctctgtgggacagaagaagatcaaggccctggaacagatgctgctggagcttggtgtggagctgagcccgacacctacggaggagctggtgcacatgttcaatgagctgcgaagcgacctggtgctgctctacgagctcaagcaggcctgtgccaactgcgagtatgagctgcagatgctgcggcaccgtcatgaggcactggcccgggctggtgtgctagggggccctgccacaccagcatcaggcccaggcccggcctctgctgagccggcagtgactgaacccggacttggtcctgaccccaaggacaccatcattgatgtggtgggcgcacccctcacgcccaattcgagaaagcgacgggagtcggcctccagctcatcttccgtgaagaaagccaagaagccgtgagaggccccacggggtgtgggcgacgctgttatgtaaatagagctgctgagttggaccagg

SEQ ID NO: 458318 - DNA, 1835 bp, Homo sapiens
  misc_feature (4)..(4): n is a, c, g, or t
tggnaccgccggaagtttctgccgcggctttgcggggacgggggagtggtagtgggggctgcagctgccggacccaggcactgacccttgacctccggtggctcccccatctctcaggcgcgatggctacgggcgcggatgtacgggacattctagaactcgggggtccagaaggggatgcagcctctgggaccatcagcaagaaggacattatcaacccggacaagaaaaaatccaagaagtcctctgagacactgactttcaagaggcccgagggcatgcaccgggaagtctatgccttgctctactctgacaagaaggatgcacccccactgctacccagtgacactggccagggataccgtacagtgaaggccaagttgggctccaagaaggtgcggccttggaagtggatgccattcaccaacccggcccgcaaggacggagcaatgttcttccactggcgacgtgcagcggaggagggcaaggactacccctttgccaggttcaataagactgtgcaggtgcctgtgtactcggagcaggagtaccagctttatctccacgatgatgcttggactaaggcagaaactgaccacctctttgacctcagccgccgctttgacctgcgttttgttgttatccatgaccggtatgaccaccagcagttcaagaagcgttctgtggaagacctgaaggagcggtactaccacatctgtgctaagcttgccaacgtgcgggctgtgccaggcacagaccttaagataccagtatttgatgctgggcacgaacgacggcggaaggaacagcttgagcgtctctacaaccggaccccagagcaggtggcagaggaggagtacctgctacaggagctgcgcaagattgaggcccggaagaaggagcgggagaaacgcagccaggacctgcagaagctgatcacagcggcagacaccactgcagagcagcggcgcacggaacgcaaggcccccaaaaagaagctaccccagaaaaaggaggctgagaagccggctgttcctgagactgcaggcatcaagtttccagacttcaagtctgcaggtgtcacgctgcggagccaacggatgaagctgccaagctctgtgggacagaagaagatcaaggccctggaacagatgctgctggagcttggtgtggagctgagcccgacacctacggaggagctggtgcacatgttcaatgagctgcgaagcgacctggtgctgctctacgagctcaagcaggcctgtgccaactgcgagtatgagctgcagatgctgcggcaccgtcatgaggcactggcccgggctggtgtgctagggggccctgccacaccagcatcaggcccaggcccggcctctgctgagccggcagtgactgaacccggacttggtcctgaccccaaggacaccatcattgatgtggtgggcgcacccctcacgcccaattcggtaagagtctggacaggctgggaggcacgcctgggccctgcgagtgagcacatgcacatgggtgtaggggctcctctccctctagtgcctgcagcaggaacgatcatcacttctgtgcgagtctgagactgagggtaggagtgggttgaccagtgggcgtccttgtccctgagcgtgtgaagcacatgcactaagcctgactcaggccttggggggtcactgacctcaatgccttctgtgtatcctcagagaaagcgacgggagtcggcctccagctcatcttccgtgaagaaagccaagaagccgtgagaggccccacggggtgtgggcgacgctgttatgtaaatagagctgctgagttggaccagg

SEQ ID NO: 458319 - DNA, 1276 bp, Homo sapiens
  misc_feature (4)..(4): n is a, c, g, or t
tggnaccgccggaagtttctgccgcggctttgcggggacgggggagtggtagtgggggctgcagctgccggacccaggcactgacccttgacctccggtggctcccccatctctcaggcgcgatggctacgggcgcggatgtacgggacattctagaactcgggggtccagaaggggatgcagcctctgggaccatcagcaagaaggacattatcaacccggacaagaaaaaatccaagaagtcctctgagacactgactttcaagaggcccgagggcatgcaccgggaagtctatgccttgctctactctgacaagaaggatgcacccccactgctacccagtgacactggccagggataccgtacagtgaaggccaagttgggctccaagaaggtgcggccttggaagtggatgccattcaccaacccggcccgcaaggacggagcaatgttcttccactggcgacgtgcagcggaggagggcaaggactacccctttgccaggttcaataagactgtgcaggtgcctgtgtactcggagcaggagtaccagctttatctccacgatgatgcttggactaaggcagaaactgaccacctctttgacctcagccgccgctttgacctgcgttttgttgttatccatgaccggtatgaccaccagcagttcaagaagcgttctgtggaagacctgaaggagcggtactaccacatctgtgctaagcttgccaacgtgcgggctgtgccaggcacagaccttaagataccagtatttgatgctgggcacgaacgacggcggaaggaacagcttgagcgtctctacaaccggaccccagagcaggtggcagaggaggagtacctgctacaggagctgcgcaagattgaggcccggaagaaggagcgggagaaacgcagccaggacctgcagaagctgatcacagcggcagacaccagctgttcctgagactgcaggcatcaagtttccagacttcaagtctgcaggtgtcacgctgcggagccaacggatgaagctgccaagctctgtgggacagaagaagatcaaggccctggaacagatgctgctggagcttggtgtggttggtcctgaccccaaggacaccatcattgatgtggtgggcgcacccctcacgcccaattcgagaaagcgacgggagtcggcctccagctcatcttccgtgaagaaagccaagaagccgtgagaggtcccacaagtttttacaaagaaaatgaccgagcctatgtaaaaaaaaaaaa

SEQ ID NO: 458320 - DNA, 1464 bp, Homo sapiens
  misc_feature (13)..(14): n is a, c, g, or t
ctctagaggatcnncacactgggttcgattctagaactcgggggtccagaaggggatgcagcctctgggaccatcagcaagaaggacattatcaacccggacaagaaaaaatccaagaagtcctctgagacactgactttcaagaggcccgagggcatgcaccgggaagtctatgccttgctctactctgacaagaaggatgcacccccactgctacccagtgacactggccagggataccgtacagtgaaggccaagttgggctccaagaaggtgcggccttggaagtggatgccattcaccaacccggcccgcaaggacggagcaatgttcttccactggcgacgtgcagcggaggagggcaaggactacccctttgccaggttcaataagactgtgcaggtgcctgtgtactcggagcaggagtaccagctttatctccacgatgatgcttggactaaggcagaaactgaccacctctttgacctcagccgccgctttgacctgcgttttgttgttatccatgaccggtatgaccaccagcagttcaagaagcgttctgtggaagacctgaaggagcggtactaccacatctgtgctaagcttgccaacgtgcgggctgtgccaggcacagaccttaagataccagtatttgatgctgggcacgaacgacggcggaaggaacagcttgagcgtctctacaaccggaccccagagcaggtggcagaggaggagtacctgctacaggagctgcgcaagattgaggcccggaagaaggagcgggagaaacgcagccaggacctgcagaagctgatcacagcggcagacaccactgcagagcagcggcgcacggaacgcaaggcccccaaaaagaagctaccccagaaaaaggaggctgagaagccggctgttcctgagactgcaggcatcaagtttccagacttcaagtctgcaggtgtcacgctgcggagccaacggatgaagctgccaagctctgtgggacagaagaagatcaaggccctggaacagatgctgctggagcttggtgtggagctgagcccgacacctacggaggagctggtgcacatgttcaatgagctgcgaagcgacctggtgctgctctacgagctcaagcaggcctgtgccaactgcgagtatgagctgcagatgctgcggcaccgtcatgaggcactggcccgggctggtgtgctagggggccctgccacaccagcatcaggcccaggcccggcctctgctgagccggcagtgactgaacccggacttggtcctgaccccaaggacaccatcattgatgtggtgggcgcacccctcacgcccaattcgagaaagcgacgggagtcggcctccagctcatcttccgtgaagaaagccaagaagccgtgagaggccccacggggtgtgggcgacgctgttatgtaaatagagctgctgagttggaccagg

SEQ ID NO: 458321 - DNA, 2031 bp, Homo sapiens
  misc_feature (4)..(4): n is a, c, g, or t
tggnaccgccggaagtttctgccgcggctttgcggggacgggggagtggtagtgggggctgcagctgccggacccaggtctggattggccccgccccctgacctgagcctggtccttcttcaggcactgacccttgacctccggtggctcccccatctctcaggcgcgatggctacgggcgcggatgtacgggacattctagaactcgggggtccagaaggggatgcagcctctgggaccatcagcaagaaggacattatcaacccggacaagaaaaaatccaagaagtcctctgagacactgactttcaagaggcccgagggcatgcaccgggaagtctatgccttgctctactctgacaagaacaagggctcctgcttgcttagcaggatgcaggaggacctgaagtcttttgctccaggacatgactttcttgctataggggatgcacccccactgctacccagtgacactggccagggataccgtacagtgaaggccaagttgggctccaagaaggtgcggccttggaagtggatgccattcaccaacccggcccgcaaggacggagcaatgttcttccactggcgacgtgcagcggaggagggcaaggactacccctttgccaggttcaataagagttgacctttggactccacagaagcacttacatgtgggcccctcaccttaactatgggggcaggagtgtgtgtcccatgactgaggctctggagctggagacagtgaagttgatcctggaataaatcagaggcaggctacagtcccaaaccctgctaggacctctagtcaagcagacaagttctttcctcactccatgctgcaggggcacaggcccagggtctggcaacaaacaggagcagctgtggtcactggggcctggagcctgctggacatgacatcatgcgggcatgcccctactgtgtccctctgtgctagtagactgtgcaggtgcctgtgtactcggagcaggagtaccagctttatctccacgatgatgcttggactaaggcagaaactgaccacctctttgacctcagccgccgctttgacctgcgttttgttgttatccatgaccggtatgaccaccagcagttcaagaagcgttctgtggaagacctgaaggagcggtactaccacatctgtgctaagcttgccaacgtgcgggctgtgccaggcacagaccttaagataccagtatttgatgctgggcacgaacgacggcggaaggaacagcttgagcgtctctacaaccggaccccagagcaggtggcagaggaggagtacctgctacaggagctgcgcaagattgaggcccggaagaaggagcgggagaaacgcagccaggacctgcagaagctgatcacagcggcagacaccactgcagagcagcggcgcacggaacgcaaggcccccaaaaagaagctaccccagaaaaaggaggctgagaagccggctgttcctgagactgcaggcatcaagtttccagacttcaagtctgcaggtgtcacgctgcggagccaacggatgaagctgccaagctctgtgggacagaagaagatcaaggccctggaacagatgctgctggagcttggtgtggagctgagcccgacacctacggaggagctggtgcacatgttcaatgagctgcgaagcgacctggtgctgctctacgagctcaagcaggcctgtgccaactgcgagtatgagctgcagatgctgcggcaccgtcatgaggcactggcccgggctggtgtgctagggggccctgccacaccagcatcaggcccaggcccggcctctgctgagccggcagtgactgaacccggacttggtcctgaccccaaggacaccatcattgatgtggtgggcgcacccctcacgcccaattcgagaaagcgacgggagtcggcctccagctcatcttccgtgaagaaagccaagaagccgtgagaggccccacggggtgtgggcgacgctgttatgtaaatagagctgctgagttggaccagg

SEQ ID NO: 458322 - DNA, 2177 bp, Homo sapiens
tattgggattacaggcgtgagccaccgcacatggccctgagttgttggtttgtttgttttttagttaaattgaattaaaatgcataggagaaatatgtaaccaaacctgggaaaccagagagacttcccagaggagatgatgcctgagagctcgaaaggttgagaaagttacctaggtagaaggaatgtggaagtggaaggcatttcaggcaagagcagaggtcaagggggaagtctgctatgttctagaaactgctagtcatttggctgcagtttagggttcatgagggacagtggctgcaggaggaggccaggtcatttatttgtatgttcattaattgatttggtagacactgatacatacagtgtgctgagtcctaaaggtgcgagatgaactggacaacccttgctcttcaggagtttgtgaattatctagaagatgctttatcttagatggagagcttctgaggagtttaataagggatagttgggggtaatgataagatatatattctagaacactaggacagtgtgtctcaaatcatctgtggtgaaggacatttttctattttatttctaaaccatcagagactgataaagataataaaattataaagacaaaatacaagtccatgtttcttcatattagattcaacagcatacaattgctgtaaaattgttacgtaagtttttcagtgtgtactctcagtttccattctcatcatagaccaggggtaagtgtaaacagcactggtttgcagactatcctttaagtagcactgttcaaagagatcacgtcttagctgcagatggagaattgattggaagcggattgaatgtgggcagagatcagtagcgaggctatttctctgatccaggcatgtgacagtgggtaggccgacggagaagtggcaatggagacagaaattttggaggtaaaagccacagatttggtgaaggggaggagtcaaggggaaagataggaattaagatgcctcccaggtttctggcttgagcagctgggttgggtgatggtgatattgactgaaatctggactggagaagataatgtttgagagagggccatgagttcagtactgagctaagtttgaggttccttggggcctccagtaggagatgtccaaaaggcgaccagttttggagctggttgtggtctttaactgagaagagagacttccctgatgtagtctagcactgactccttccttgggtctctgacagactcagctcgtggtagtgctatttgtctctgggggaggtctgtggaagaagggaggaaggggcattggcagggctgcgtatgttggtagtaggattcaggcccagcttctgtagagatgcctgaccttggcaaactctgggggagtggcaagtcccactgtgcccactgggtggcagtagtgcttcagatgagttgtatggactaggggttgctgggcctttctccaggtaattagccatctgtcctactccagagttgacctttggactccacagaagcacttacatgtgggcccctcaccttaactatgggggcaggagtgtgtgtcccatgactgaggctctggagctggagacagtgaagttgatcctggaataaatcagaggcaggctacagtcccaaaccctgctaggacctctagtcaagcagacaagttctttcctcactccatgctgcaggggcacaggcccagggtctggcaacaaacaggagcagctgtggtcactggggcctggagcctgctggacatgacatcatgcgggcatgcccctactgtgtccctctgtgctagtagactgtgcaggtgcctgtgtactcggagcaggagtaccagctttatctccacgatgatgcttggactaaggcagaaactgaccacctctttgacctcagccgccgctttgacctgcgttttgttgttatccatgaccggtatgaccaccagcagttcaagaagcgttctgtggaagacctgaaggagcggtactaccacatctgtgctaagcttgccaacgtgcgggctgtgccaggcacagaccttaagataccagtatttgatgctgggcacgaacgacggcggaaggaacagcttgagcaggccccacggggtgtgggcgacgctgttatgtaaatagagctgctgagttggaccagg

SEQ ID NO: 458323 - DNA, 1110 bp, Homo sapiens
  misc_feature (4)..(4): n is a, c, g, or t
tggnaccgccggaagtttctgccgcggctttgcggggacgggggagtggtagtgggggctgcagctgccggacccaggcactgacccttgacctccggtggctcccccatctctcaggcgcgatggctacgggcgcggatgtacgggacattctagaactcgggggtccagaaggggatgcagcctctgggaccatcagcaagaaggacattatcaacccggacaagaaaaaatccaagaagtcctctgagacactgactttcaagaggcccgagggcatgcaccgggaagtctatgccttgctctactctgacaagaaggatgcacccccactgctacccagtgacactggccagggataccgtacagtgaaggccaagttgggctccaagaaggtgcggccttggaagtggatgccattcaccaacccggcccgcaaggacggagcaatgttcttccactggcgacgtgcagcggaggagggcaaggactacccctttgccaggttcaataaggtaccttacatcaggtaggtaccctgaacagagctcatcatcttccctctgtcagtcccaaatctgttccccatctcagtgaatggcactatcttccacccagttgcccaaaccagaaacttgggggatcgtccttgacttagtcttctcccttagtcctcacagtatttaaatcaacaacagaacaaagaaggtaggggaaaacaaacaacaaacatgtaaggaaataaattggagtctttcaaataagagccgtcagtaacacgaaaccaggatttgaatggatatgaaatgagataaagagtgaacttgtaggtgtaggggagtcctaccttaggttggtcagggagggtctgagaacgtggcatttgagctggatgccagtgatacatctatttattgagtcctgttgattctttttccataataaatcacatctctgactatattcttcatcactatgccagccccctagtccaagctgagttacctgtgtagctcagcagagcacggccttcccagactcacccattcagtgagaggcagagctagattgggctaggtttcctagtccattacttaagtcattgtacag

SEQ ID NO: 458324 - DNA, 212 bp, Homo sapiens
tgacgccaagaccgcgatcagtagatcgtaatgatcgcctagttacgccatattcgagaaagcgacgggagtcggcctccagctcatcttccgtgaagaaagccaagaagccgtgagaggccccacggggtgtgggcgacgctgttatgtaaatagagctgctgagttggaccaggaaaaaaaaaaaggggcggggtataaggtttctcagg

SEQ ID NO: 458325 - DNA, 181 bp, Homo sapiens
tacaccctttgggctgaagatgcttgggccctagctctggcctggccctaatgctgcctcttccttttcctacctctcccttcctcaggctcttgggaaggaggagactgaggcagtcctgagaaagaccagagttggggaccacaggacaaagaccacatccatgtccccacagccatgg

SEQ ID NO: 458326 - DNA, 444 bp, Homo sapiens
ggggtgctaggactaaccctgggccctctccctgtgacaccttggtctccataatgccttctcccccagggctgttcctgagactgcaggcatcaagtttccagacttcaagtctgcaggtgtcacgctgcggagccaacgggtacgtgagtcacctcctttagcaagtttgggtcctgggctctgctctgggctccatgtgtcccaaacgctgcaggcaggtggggatggagcagtaggagagattgctgcagacagaggtggccttggcaggatctcagtgatgtggccaggctaaggtcatagcagctttcactatattcagcttcctggctatttccttttctggcccatagttaacctccatgtgttaccgtctctcttccaccatctttccctctgccttttgtccccttcatcctaagcctcttgtggctgggacag

SEQ ID NO: 458327 - DNA, 1546 bp, Homo sapiens
  misc_feature (4)..(4): n is a, c, g, or t
tggnaccgccggaagtttctgccgcggctttgcggggacgggggagtggtagtgggggctgcagctgccggacccaggcgcgatggctacgggcgcggatgtacgggacattctagaactcgggggtccagaaggggatgcagcctctgggaccatcagcaagaaggacattatcaacccggacaagaaaaaatccaagaagtcctctgagacactgactttcaagaggcccgagggcatgcaccgggaagtctatgccttgctctactctgacaagaaggatgcacccccactgctacccagtgacactggccagggataccgtacagtgaaggccaagttgggctccaagaaggtgcggccttggaagtggatgccattcaccaacccggcccgcaaggacggagcaatgttcttccactggcgacgtgcagcggaggagggcaaggactacccctttgccaggttcaataagactgtgcaggtgcctgtgtactcggagcaggagtaccagctttatctccacgatgatgcttggactaaggcagaaactgaccacctctttgacctcagccgccgctttgacctgcgttttgttgttatccatgaccggtatgaccaccagcagttcaagaagcgttctgtggaagacctgaaggagcggtactaccacatctgtgctaagcttgccaacgtgcgggctgtgccaggcacagaccttaagataccagtatttgatgctgggcacgaacgacggcggaaggaacagcttgagcgtctctacaaccggaccccagagcaggtggcagaggaggagtacctgctacaggagctgcgcaagattgaggcccggaagaaggagcgggagaaacgcagccaggacctgcagaagctgatcacagcggcagacaccactgcagagcagcggcgcacggaacgcaaggcccccaaaaagaagctaccccagaaaaaggaggctgagaagccggctgttcctgagactgcaggcatcaagtttccagacttcaagtctgcaggtgtcacgctgcggagccaacggatgaagctgccaagctctgtgggacagaagaagatcaaggccctggaacagatgctgctggagcttggtgtggagctgagcccgacacctacggaggagctggtgcacatgttcaatgagctgcgaagcgacctggtgctgctctacgagctcaagcaggcctgtgccaactgcgagtatgagctgcagatgctgcggcaccgtcatgaggcactggcccgggctggtgtgctagggggccctgccacaccagcatcaggcccaggcccggcctctgctgagccggcagtgactgaacccggacttggtcctgaccccaaggacaccatcattgatgtggtgggcgcacccctcacgcccaattcgagaaagcgacgggagtcggcctccagctcatcttccgtgaagaaagccaagaagccgtgagaggccccacggggtgtgggcgacgctgttatgtaaatagagctgctgagttggaccagg

SEQ ID NO: 458328 - DNA, 943 bp, Homo sapiens
  misc_feature (572)..(572): n is a, c, g, or t
  misc_feature (622)..(622): n is a, c, g, or t
  misc_feature (664)..(664): n is a, c, g, or t
  misc_feature (671)..(671): n is a, c, g, or t
  misc_feature (697)..(697): n is a, c, g, or t
  misc_feature (716)..(716): n is a, c, g, or t
  misc_feature (721)..(721): n is a, c, g, or t
  misc_feature (726)..(726): n is a, c, g, or t
  misc_feature (728)..(728): n is a, c, g, or t
  misc_feature (733)..(733): n is a, c, g, or t
  misc_feature (738)..(739): n is a, c, g, or t
  misc_feature (748)..(748): n is a, c, g, or t
  misc_feature (779)..(779): n is a, c, g, or t
  misc_feature (793)..(793): n is a, c, g, or t
  misc_feature (802)..(802): n is a, c, g, or t
  misc_feature (810)..(810): n is a, c, g, or t
  misc_feature (852)..(852): n is a, c, g, or t
  misc_feature (877)..(877): n is a, c, g, or t
  misc_feature (916)..(916): n is a, c, g, or t
acgcgtccgcccacgcgtccgggtagtgggggctgcagctgccggacccaggcactgacccttgacctccggtggctcccccatctctcaggcgcgatggctacgggcgcggatgtacgggacattctagaactcgggggtccagaaggggatgcagcctctgggaccatcagcaagaaggacattatcaacccggacaagaaaaaatccaagaagtcctctgagacactgactttcaagaggcccgagggcatgcaccgggaagtctatgccttgctctactctgacaagaaggatgcacccccactgctacccagtgacactggccagggataccgtacagtgaaggccaagttgggctccaagaaggtgcggccttggaagtggatgccattcaccaacccggcccgcaaggacggagcaatgttcttccactggcgacgtgcagcggaggagggcaaggactacccctttgccaggttcaataagataaagacttgttgcaaggttgccttgttgttacttcgggaggcagggagttacacagctgtttattctcccacagattgatngctttgggacttaagggcaagaaaacttgacccaccttctttttgacctncagcccgcccgctttttgaccttgctgttttttgtttgttantccaatngaccgggtaattgaccacccaagcangttcaaaaaaagcggttcnttgtnggaananccttnaaggnngcgggtacntacccacaatcttgttgctaaagctttgccnaaccgttgcggggnttgtgccangcgcacangaccctttaaagataaccaagtattttgattgctggggcacngaacagacgggcgggaagggaacangctttgaggcgtctcctacaaacccgggacccccaagangcacggtgggcacgaaggaaggatgta

SEQ ID NO: 458329 - DNA, 1767 bp, Homo sapiens
  misc_feature (4)..(4): n is a, c, g, or t
tggnaccgccggaagtttctgccgcggctttgcggggacgggggagtggtagtgggggctgcagctgccggacccaggtgcggaagtgcgagggcccaggtggctgaaggggccgttaggaacatccaagcggtggggcacaggcagatccccgacctgacctggaccacccttctcctcttggcccgccccttcaactcgcctccgcttaggtctggattggccccgccccctgacctgagcctggtccttcttcaggcactgacccttgacctccggtggctcccccatctctcaggcgcgatggctacgggcgcggatgtacgggacattctagaactcgggggtccagaaggggatgcagcctctgggaccatcagcaagaaggacattatcaacccggacaagaaaaaatccaagaagtcctctgagacactgactttcaagaggcccgagggcatgcaccgggaagtctatgccttgctctactctgacaagaaggatgcacccccactgctacccagtgacactggccagggataccgtacagtgaaggccaagttgggctccaagaaggtgcggccttggaagtggatgccattcaccaacccggcccgcaaggacggagcaatgttcttccactggcgacgtgcagcggaggagggcaaggactacccctttgccaggttcaataagactgtgcaggtgcctgtgtactcggagcaggagtaccagctttatctccacgatgatgcttggactaaggcagaaactgaccacctctttgacctcagccgccgctttgacctgcgttttgttgttatccatgaccggtatgaccaccagcagttcaagaagcgttctgtggaagacctgaaggagcggtactaccacatctgtgctaagcttgccaacgtgcgggctgtgccaggcacagaccttaagataccagtatttgatgctgggcacgaacgacggcggaaggaacagcttgagcgtctctacaaccggaccccagagcaggtggcagaggaggagtacctgctacaggagctgcgcaagattgaggcccggaagaaggagcgggagaaacgcagccaggacctgcagaagctgatcacagcggcagacaccactgcagagcagcggcgcacggaacgcaaggcccccaaaaagaagctaccccagaaaaaggaggctgagaagccggctgttcctgagactgcaggcatcaagtttccagacttcaagtctgcaggtgtcacgctgcggagccaacggatgaagctgccaagctctgtgggacagaagaagatcaaggccctggaacagatgctgctggagcttggtgtggagctgagcccgacacctacggaggagctggtgcacatgttcaatgagctgcgaagcgacctggtgctgctctacgagctcaagcaggcctgtgccaactgcgagtatgagctgcagatgctgcggcaccgtcatgaggcactggcccgggctggtgtgctagggggccctgccacaccagcatcaggcccaggcccggcctctgctgagccggcagtgactgaacccggacttggtcctgaccccaaggacaccatcattgatgtggtgggcgcacccctcacgcccaattcgagaaagcgacgggagtcggcctccagctcatcttccgtgaagaaagccaagaagccgtgagaggccccacggggtgtgggcgacgctgttatgtaaatagagctgctgagttggaccagg

SEQ ID NO: 458330 - DNA, 1608 bp, Homo sapiens
  misc_feature (4)..(4): n is a, c, g, or t
tggnaccgccggaagtttctgccgcggctttgcggggacgggggagtggtagtgggggctgcagctgccggacccaggtgcggaagtgcgagggcccaggcactgacccttgacctccggtggctcccccatctctcaggcgcgatggctacgggcgcggatgtacgggacattctagaactcgggggtccagaaggggatgcagcctctgggaccatcagcaagaaggacattatcaacccggacaagaaaaaatccaagaagtcctctgagacactgactttcaagaggcccgagggcatgcaccgggaagtctatgccttgctctactctgacaagaaggatgcacccccactgctacccagtgacactggccagggataccgtacagtgaaggccaagttgggctccaagaaggtgcggccttggaagtggatgccattcaccaacccggcccgcaaggacggagcaatgttcttccactggcgacgtgcagcggaggagggcaaggactacccctttgccaggttcaataagactgtgcaggtgcctgtgtactcggagcaggagtaccagctttatctccacgatgatgcttggactaaggcagaaactgaccacctctttgacctcagccgccgctttgacctgcgttttgttgttatccatgaccggtatgaccaccagcagttcaagaagcgttctgtggaagacctgaaggagcggtactaccacatctgtgctaagcttgccaacgtgcgggctgtgccaggcacagaccttaagataccagtatttgatgctgggcacgaacgacggcggaaggaacagcttgagcgtctctacaaccggaccccagagcaggtggcagaggaggagtacctgctacaggagctgcgcaagattgaggcccggaagaaggagcgggagaaacgcagccaggacctgcagaagctgatcacagcggcagacaccactgcagagcagcggcgcacggaacgcaaggcccccaaaaagaagctaccccagaaaaaggaggctgagaagccggctgttcctgagactgcaggcatcaagtttccagacttcaagtctgcaggtgtcacgctgcggagccaacggatgaagctgccaagctctgtgggacagaagaagatcaaggccctggaacagatgctgctggagcttggtgtggagctgagcccgacacctacggaggagctggtgcacatgttcaatgagctgcgaagcgacctggtgctgctctacgagctcaagcaggcctgtgccaactgcgagtatgagctgcagatgctgcggcaccgtcatgaggcactggcccgggctggtgtgctagggggccctgccacaccagcatcaggcccaggcccggcctctgctgagccggcagtgactgaacccggacttggtcctgaccccaaggacaccatcattgatgtggtgggcgcacccctcacgcccaattcgagaaagcgacgggagtcggcctccagctcatcttccgtgaagaaagccaagaagccgtgagaggccccacggggtgtgggcgacgctgttatgtaaatagagctgctgagttggaccagg

SEQ ID NO: 458331 - DNA, 1612 bp, Homo sapiens
  misc_feature (4)..(4): n is a, c, g, or t
tggnaccgccggaagtttctgccgcggctttgcggggacgggggagtggtagtgggggctgcagctgccggacccaggcactgacccttgacctccggtggctcccccatctctcaggcgcgatggctacgggcgcggatgtacgggacattctagaactcgggggtccagaaggggatgcagcctctgggaccatcagcaagaaggacattatcaacccggacaagaaaaaatccaagaagtcctctgagacactgactttcaagaggcccgagggcatgcaccgggaagtctatgccttgctctactctgacaagaaggatgcacccccactgctacccagtgacactggccagggataccgtacagtgaaggccaagttgggctccaagaaggtgcggccttggaagtggatgccattcaccaacccggcccgcaaggacggagcaatgttcttccactggcgacgtgcagcggaggagggcaaggactacccctttgccaggttcaataagactgtgcaggtgcctgtgtactcggagcaggagtaccagctttatctccacgatgatgcttggactaaggcagaaactgaccacctctttgacctcagccgccgctttgacctgcgttttgttgttatccatgaccggtatgaccaccagcagttcaagaagcgttctgtggaagacctgaaggagcggtactaccacatctgtgctaagcttgccaacgtgcgggctgtgccaggcacagaccttaagataccagtatttgatgctgggcacgaacgacggcggaaggaacagcttgagcgtctctacaaccggaccccagagcaggtggcagaggaggagtacctgctacaggagctgcgcaagattgaggcccggaagaaggagcgggagaaacgcagccaggacctgcagaagctgatcacagcggcagacaccactgcagagcagcggcgcacggaacgcaaggcccccaaaaagaagctaccccagaaaaaggaggctgagaagccggctgttcctgagactgcaggcatcaagtttccagacttcaagtctgcaggtgtcacgctgcggagccaacgggcttagcttgccagctttcattgcagatgaagctgccaagctctgtgggacagaagaagatcaaggccctggaacagatgctgctggagcttggtgtggagctgagcccgacacctacggaggagctggtgcacatgttcaatgagctgcgaagcgacctggtgctgctctacgagctcaagcaggcctgtgccaactgcgagtatgagctgcagatgctgcggcaccgtcatgaggcactggcccgggctggtgtgctagggggccctgccacaccagcatcaggcccaggcccggcctctgctgagccggcagtgactgaacccggacttggtcctgaccccaaggacaccatcattgatgtggtgggcgcacccctcacgcccaattcgagaaagcgacgggagtcggcctccagctcatcttccgtgaagaaagccaagaagccgtgagaggccccacggggtgtgggcgacgctgttatgtaaatagagctgctgagttggaccagg

SEQ ID NO: 458332 - DNA, 1560 bp, Homo sapiens
acgcgtccgcccacgcgtccgggtagtgggggctgcagctgccggacccaggcactgacccttgacctccggtggctcccccatctctcaggcgcgatggctacgggcgcggatgtacgggacattctagaactcgggggtccagaaggggatgcagcctctgggaccatcagcaagaaggacattatcaacccggacaagaaaaaatccaagaagtcctctgagacactgactttcaagaggcccgagggcatgcaccgggaagtctatgccttgctctactctgacaagaaggatgcacccccactgctacccagtgacactggccagggataccgtacagtgaaggccaagttgggctccaagaaggtgcggccttggaagtggatgccattcaccaacccggcccgcaaggacggagcaatgttcttccactggcgacgtgcagcggaggagggcaaggactacccctttgccaggttcaataagactgtgcaggtgcctgtgtactcggagcaggagtaccagctttatctccacgatgatgcttggactaaggcagaaactgaccacctctttgacctcagccgccgctttgacctgcgttttgttgttatccatgaccggtatgaccaccagcagttcaagaagcgttctgtggaagacctgaaggagcggtactaccacatctgtgctaagcttgccaacgtgcgggctgtgccaggcacagaccttaagataccagtatttgatgctgggcacgaacgacggcggaaggaacagcttgagcgtctctacaaccggaccccagagcaggtggcagaggaggagtacctgctacaggagctgcgcaagattgaggcccggaagaaggagcgggagaaacgcagccaggacctgcagaagctgatcacagcggcagacaccactgcagagcagcggcgcacggaacgcaaggcccccaaaaagaagctaccccagaaaaaggaggctgagaagccggctgttcctgagactgcaggcatcaagtttccagacttcaagtctgcaggtgtcacgctgcggagccaacggatgaagctgccaagctctgtgggacagaagaagatcaaggccctggaacagatgctgctggagcttggtgtggagctgagcccgacacctacggaggagctggtgcacatgttcaatgagctgcgaagcgacctggtgctgctctacgagctcaagcaggcctgtgccaactgcgagtatgagctgcagatgctgcggcaccgtcatgaggcactggcccgggctggtgtgctagggggccctgccacaccagcatcaggcccaggcccggcctctgctgagccggcagtgactgaacccggacttggtcctgaccccaaggacaccatcattgatgtggtgggcgcacccctcacgcccaattcgagaaagcgacgggagtcggcctccagctcatcttccgtgaagaaagccaagaagccgtgagaggccccacggggtgtgggcgacgctgttatgtaaatagagctgctgagttggaccagg

SEQ ID NO: 458333 - DNA, 2888 bp, Homo sapiens
tattgggattacaggcgtgagccaccgcacatggccctgagttgttggtttgtttgttttttagttaaattgaattaaaatgcataggagaaatatgtaaccaaacctgggaaaccagagagacttcccagaggagatgatgcctgagagctcgaaaggttgagaaagttacctaggtagaaggaatgtggaagtggaaggcatttcaggcaagagcagaggtcaagggggaagtctgctatgttctagaaactgctagtcatttggctgcagtttagggttcatgagggacagtggctgcaggaggaggccaggtcatttatttgtatgttcattaattgatttggtagacactgatacatacagtgtgctgagtcctaaaggtgcgagatgaactggacaacccttgctcttcaggagtttgtgaattatctagaagatgctttatcttagatggagagcttctgaggagtttaataagggatagttgggggtaatgataagatatatattctagaacactaggacagtgtgtctcaaatcatctgtggtgaaggacatttttctattttatttctaaaccatcagagactgataaagataataaaattataaagacaaaatacaagtccatgtttcttcatattagattcaacagcatacaattgctgtaaaattgttacgtaagtttttcagtgtgtactctcagtttccattctcatcatagaccaggggtaagtgtaaacagcactggtttgcagactatcctttaagtagcactgttcaaagagatcacgtcttagctgcagatggagaattgattggaagcggattgaatgtgggcagagatcagtagcgaggctatttctctgatccaggcatgtgacagtgggtaggccgacggagaagtggcaatggagacagaaattttggaggtaaaagccacagatttggtgaaggggaggagtcaaggggaaagataggaattaagatgcctcccaggtttctggcttgagcagctgggttgggtgatggtgatattgactgaaatctggactggagaagataatgtttgagagagggccatgagttcagtactgagctaagtttgaggttccttggggcctccagtaggagatgtccaaaaggcgaccagttttggagctggttgtggtctttaactgagaagagagacttccctgatgtagtctagcactgactccttccttgggtctctgacagactcagctcgtggtagtgctatttgtctctgggggaggtctgtggaagaagggaggaaggggcattggcagggctgcgtatgttggtagtaggattcaggcccagcttctgtagagatgcctgaccttggcaaactctgggggagtggcaagtcccactgtgcccactgggtggcagtagtgcttcagatgagttgtatggactaggggttgctgggcctttctccaggtaattagccatctgtcctactccagagttgacctttggactccacagaagcacttacatgtgggcccctcaccttaactatgggggcaggagtgtgtgtcccatgactgaggctctggagctggagacagtgaagttgatcctggaataaatcagaggcaggctacagtcccaaaccctgctaggacctctagtcaagcagacaagttctttcctcactccatgctgcaggggcacaggcccagggtctggcaacaaacaggagcagctgtggtcactggggcctggagcctgctggacatgacatcatgcgggcatgcccctactgtgtccctctgtgctagtagactgtgcaggtgcctgtgtactcggagcaggagtaccagctttatctccacgatgatgcttggactaaggcagaaactgaccacctctttgacctcagccgccgctttgacctgcgttttgttgttatccatgaccggtatgaccaccagcagttcaagaagcgttctgtggaagacctgaaggagcggtactaccacatctgtgctaagcttgccaacgtgcgggctgtgccaggcacagaccttaagataccagtatttgatgctgggcacgaacgacggcggaaggaacagcttgagcgtctctacaaccggaccccagagcaggtggcagaggaggagtacctgctacaggagctgcgcaagattgaggcccggaagaaggagcgggagaaacgcagccaggacctgcagaagctgatcacagcggcagacaccactgcagagcagcggcgcacggaacgcaaggcccccaaaaagaagctaccccagaaaaaggaggctgagaagccggctgttcctgagactgcaggcatcaagtttccagacttcaagtctgcaggtgtcacgctgcggagccaacggatgaagctgccaagctctgtgggacagaagaagatcaaggccctggaacagatgctgctggagcttggtgtggagctgagcccgacacctacggaggagctggtgcacatgttcaatgagctgcgaagcgacctggtgctgctctacgagctcaagcaggcctgtgccaactgcgagtatgagctgcagatgctgcggcaccgtcatgaggcactggcccgggctggtgtgctagggggccctgccacaccagcatcaggcccaggcccggcctctgctgagccggcagtgactgaacccggacttggtcctgaccccaaggacaccatcattgatgtggtgggcgcacccctcacgcccaattcgagaaagcgacgggagtcggcctccagctcatcttccgtgaagaaagccaagaagccgtgagaggccccacggggtgtgggcgacgctgttatgtaaatagagctgctgagttggaccagg

SEQ ID NO: 458334 - DNA, 1985 bp, Homo sapiens
  misc_feature (4)..(4): n is a, c, g, or t
tggnaccgccggaagtttctgccgcggctttgcggggacgggggagtggtagtgggggctgcagctgccggacccaggcactgacccttgacctccggtggctcccccatctctcaggcgcgatggctacgggcgcggatgtacgggacattctagaactcgggggtccagaaggggatgcagcctctgggaccatcagcaagaaggacattatcaacccggacaagaaaaaatccaagaagtcctctgagacactgactttcaagaggcccgagggcatgcaccgggaagtctatgccttgctctactctgacaagaacaagggctcctgcttgcttagcaggatgcaggaggacctgaagtcttttgctccaggacatgactttcttgctataggggatgcacccccactgctacccagtgacactggccagggataccgtacagtgaaggccaagttgggctccaagaaggtgcggccttggaagtggatgccattcaccaacccggcccgcaaggacggagcaatgttcttccactggcgacgtgcagcggaggagggcaaggactacccctttgccaggttcaataagagttgacctttggactccacagaagcacttacatgtgggcccctcaccttaactatgggggcaggagtgtgtgtcccatgactgaggctctggagctggagacagtgaagttgatcctggaataaatcagaggcaggctacagtcccaaaccctgctaggacctctagtcaagcagacaagttctttcctcactccatgctgcaggggcacaggcccagggtctggcaacaaacaggagcagctgtggtcactggggcctggagcctgctggacatgacatcatgcgggcatgcccctactgtgtccctctgtgctagtagactgtgcaggtgcctgtgtactcggagcaggagtaccagctttatctccacgatgatgcttggactaaggcagaaactgaccacctctttgacctcagccgccgctttgacctgcgttttgttgttatccatgaccggtatgaccaccagcagttcaagaagcgttctgtggaagacctgaaggagcggtactaccacatctgtgctaagcttgccaacgtgcgggctgtgccaggcacagaccttaagataccagtatttgatgctgggcacgaacgacggcggaaggaacagcttgagcgtctctacaaccggaccccagagcaggtggcagaggaggagtacctgctacaggagctgcgcaagattgaggcccggaagaaggagcgggagaaacgcagccaggacctgcagaagctgatcacagcggcagacaccactgcagagcagcggcgcacggaacgcaaggcccccaaaaagaagctaccccagaaaaaggaggctgagaagccggctgttcctgagactgcaggcatcaagtttccagacttcaagtctgcaggtgtcacgctgcggagccaacggatgaagctgccaagctctgtgggacagaagaagatcaaggccctggaacagatgctgctggagcttggtgtggagctgagcccgacacctacggaggagctggtgcacatgttcaatgagctgcgaagcgacctggtgctgctctacgagctcaagcaggcctgtgccaactgcgagtatgagctgcagatgctgcggcaccgtcatgaggcactggcccgggctggtgtgctagggggccctgccacaccagcatcaggcccaggcccggcctctgctgagccggcagtgactgaacccggacttggtcctgaccccaaggacaccatcattgatgtggtgggcgcacccctcacgcccaattcgagaaagcgacgggagtcggcctccagctcatcttccgtgaagaaagccaagaagccgtgagaggccccacggggtgtgggcgacgctgttatgtaaatagagctgctgagttggaccagg

SEQ ID NO: 458335 - DNA, 1556 bp, Homo sapiens
  misc_feature (4)..(4): n is a, c, g, or t
tggnaccgccggaagtttctgccgcggctttgcggggacgggggagtggtagtgggggctgcagctgccggacccaggcactgacccttgacctccggtggctcccccatctctcaggcgcgatggctacgggcgcggatgtacgggacattctagaactcgggggtccagaaggggatgcagcctctgggaccatcagcaagaaggacattatcaacccggacaagaaaaaatccaagaagtcctctgagacactgactttcaagaggcccgagggcatgcaccgggaagtctatgccttgctctactctgacaagaaggatgcacccccactgctacccagtgacactggccagggataccgtacagtgaaggccaagttgggctccaagaaggtgcggccttggaagtggatgccattcaccaacccggcccgcaaggacggagcaatgttcttccactggcgacgtgcagcggaggagggcaaggactacccctttgccaggttcaataaggagtaccagctttatctccacgatgatgcttggactaaggcagaaactgaccacctctttgacctcagccgccgctttgacctgcgttttgttgttatccatgaccggtatgaccaccagcagttcaagaagcgttctgtggaagacctgaaggagcggtactaccacatctgtgctaagcttgccaacgtgcgggctgtgccaggcacagaccttaagataccagtatttgatgctgggcacgaacgacggcggaaggaacagcttgagcgtctctacaaccggaccccagagcaggtggcagaggaggagtacctgctacaggagctgcgcaagattgaggcccggaagaaggagcgggagaaacgcagccaggacctgcagaagctgatcacagcggcagacaccactgcagagcagcggcgcacggaacgcaaggcccccaaaaagaagctaccccagaaaaaggaggctgagaagccggctgttcctgagactgcaggcatcaagtttccagacttcaagtctgcaggtgtcacgctgcggagccaacggatgaagctgccaagctctgtgggacagaagaagatcaaggccctggaacagatgctgctggagcttggtgtggagctgagcccgacacctacggaggagctggtgcacatgttcaatgagctgcgaagcgacctggtgctgctctacgagctcaagcaggcctgtgccaactgcgagtatgagctgcagatgctgcggcaccgtcatgaggcactggcccgggctggtgtgctagggggccctgccacaccagcatcaggcccaggcccggcctctgctgagccggcagtgactgaacccggacttggtcctgaccccaaggacaccatcattgatgtggtgggcgcacccctcacgcccaattcgagaaagcgacgggagtcggcctccagctcatcttccgtgaagaaagccaagaagccgtgagaggccccacggggtgtgggcgacgctgttatgtaaatagagctgctgagttggaccagg

SEQ ID NO: 458336 - DNA, 634 bp, Homo sapiens
  misc_feature (4)..(4): n is a, c, g, or t
tggnaccgccggaagtttctgccgcggctttgcggggacgggggagtggtagtgggggctgcagctgccggacccaggcactgacccttgacctccggtggctcccccatctctcaggcgcgatggctacgggcgcggatgtacgggacattctagaactcgggggtccagaaggggatgcagcctctgggaccatcagcaagaaggacattatcaacccggacaagaaaaaatccaagaagtcctctgagacactgactttcaagaggcccgagggcatgcaccgggaagtctatgccttgctctactctgacaagaaggatgcacccccactgctacccagtgacactggccagggataccgtacagtgaaggccaagttgggctccaagaaggtgcggccttggaagtggatgccattcaccaacccggcccgcaaggacggagcaatgttcttccactggcgacgtgcagcggaggagggcaaggactacccctttgccaggttcaataagggtaagctaccttcattcggacacaggccaagattgccctcccactttgagccatttgtgcgagctctccagtctcctagggttggttctgggggcacgcttatgcccaactgtgatta

SEQ ID NO: 458337 - DNA, 1772 bp, Homo sapiens
ttcattcaaggcctgggggagctgcggttccgagaagcggcagacggcagccagaaggcttgggctgttgagtaagcagccccctctcagtcccggccctccccgcctcgcgccctgcgcctccagtgagtgactgagcccccgctgcggccccgcccccggggccctgccggagctggtgcgcggcgcggaggggagggccggccaggtaggaatgcgctgcgggcgggcggcgcaggaggcgagcggcggaacatgtaagggcacatcccgcgagctgccgcccagcgcgcagacagagcccaggggagcaagagaacgggcgggcggtggggctcacggcctagggaggcgcggaggcatctggcagaggcgggtcgggctgggccagctggggtagagcggaggagcgggtgccggctgaagcggggcggtgggcgcggagcgcgctgggggcaccgacaccacctcaccggcagccgggtgctgagggccgcggtgtgggtgcgcggagcagtcagggcgcaggtgggcagcgcgcacggcctgccagcccggggcgccagaatcctgcgctgcggggccgagaggggcgccgcgcccgccgcagcctggagctttccgcgaacctcggggcgcccatgacggcggcggcgacggctaccgtgctcaaggagggcgtgctggagaagcgcagcggcgggctgctgcagctgtggaagcggaagcgctgcgtcctcaccgaacgcgggctgcagctcttcgaggccaagggcacgggcggccggcccaaggagctcagcttcgcccgcatcaaggccgtggagtgcgtggagagcaccgggcgccacatctacttcacgctggtgaccgaagggggcggcgagatcgacttccgctgccccctggaagatcccggctggaacgcccagatcaccctaggcctggtcaagttcaagaaccagcaggccatccagacagtgcgggcccggcagagcctcgggaccgggaccctcgtgtcctaaaccaccgggcgcaccatctttccttcatgctacccaccacctcagtgctgaggtcaaggcagcttcgttgttccctctggcttgtgggggcacggctgtgctccatgtggcaaggtggaaggcatggacgtgtggaggaggcgctggagctgaaggaatggacgagccctgggaggagggcagaaggctacgcagggctgaggatgaagatgcagcccctggatggtcccagactctcaggacatgcccagctcaggggcttcgagccacaggcctggcctcatatggcatgagggggagctggcataggagccccctccctgctgtggtcctgccctctgtcctgcagactgctcttagccccctggctttgtgccaggcctggaggagggcagtcccccatggggtgccgagccaacgcctcaggaatcaggaggccagcctggtaccaaaaggagtacccagggcctggtacccaggcccactccagaatggcctctggactcaccttgagaagggggagctgctgggcctaaagcccactcctgggggtctcctgctgcttaggtccttttgggacccccacccatccaggccctttctttgcacacttcttcccccacctctatgcatcttccccccactgcggtgttcggcctgaaggtggtgggggtgagggggggtttggccattagcatttcatgtctttccccaaatgaagatgccctgcaaagggcagtaaccaca

SEQ ID NO: 458338 - DNA, 1866 bp, Homo sapiens
ttcattcaaggcctgggggagctgcggttccgagaagcggcagacggcagccagaaggcttgggctgttgagtaagcagccccctctcagtcccggccctccccgcctcgcgccctgcgcctccagtgagtgactgagcccccgctgcggccccgcccccggggccctgccggagctggtgcgcggcgcggaggggagggccggccaggtaggaatgcgctgcgggcgggcggcgcaggaggcgagcggcggaacatgtaagggcacatcccgcgagctgccgcccagcgcgcagacagagcccaggggagcaagagaacgggcgggcggtggggctcacggcctagggaggcgcggaggcatctggcagaggcgggtcgggctgggccagctggggtagagcggaggagcgggtgccggctgaagcggggcggtgggcgcggagcgcgctgggggcaccgacaccacctcaccggcagccgggtgctgagggccgcggtgtgggtgcgcggagcagtcagggcgcaggtgggcagcgcgcacggcctgccagcccggggcgccagaatcctgcgctgcggggccgagaggggcgccgcgcccgccgcagcctggagctttccgcgaacctcggggcgcccatgacggcggcggcgacggctaccgtgctcaaggagggcgtgctggagaagcgcagcggcgggctgctgcagctgtggaagcggaagcgctgcgtcctcaccgaacgcgggctgcagctcttcgaggccaagggcacgggcggccggcccaaggagctcagcttcgcccgcatcaaggccgtggagtgcgtggagagcaccgggcgccacatctacttcacgctggtgaccgaagggggcggcgagatcgacttccgctgccccctggaagatcccggctggaacgcccagatcaccctaggcctggtcaagttcaagaaccagcaggccatccagacagtgcgggcccggcagagcctcgggaccgggaccctcgtgtcctaaaccaccgggcgcaccatctttccttcatgctacccaccacctcagtgctgaggtcaaggcagcttcgttgttccctctggcttgtgggggcacggctgtgctccatgtggcaaggtggaaggcatggacgtgtggaggaggcgctggagctgaaggaatggacgagccctgggaggagggcagaaggctacgcagggctgaggatgaagatgcagcccctggatggtcccagactctcaggacatgcccagctcaggggcttcgagccacaggcctggcctcatatggcatgagggggagctggcataggagccccctccctgctgtggtcctgccctctgtcctgcagactgctcttagccccctggctttgtgccaggcctggaggagggcagtcccccatggggtgccgagccaacgcctcaggaatcaggaggccagcctggtaccaaaaggagtacccagggcctggtacccaggcccactccagaatggcctctggactcaccttgagaagggggagctgctgggcctaaagcccactcctgggggtctcctgctgcttaggtccttttgggacccccacccatccaggccctttctttgcacacttcttcccccacctctatgcatcttccccccactgcggtgttcggcctgaaggtggtgggggtgaggggttttttcctataatttcatttatttatattatttctttccgtaatatatgattttttgtatttttttaattattgtgtacgttatttatttatattttgttttaatattattgatttatatataaactcttatttagattgttgtatttttagattctttc

SEQ ID NO: 458339 - DNA, 1550 bp, Homo sapiens
ttcattcaaggcctgggggagctgcggttccgagaagcggcagacggcagccagaaggcttgggctgttgagtaagcagccccctctcagtcccggccctccccgcctcgcgccctgcgcctccagtgagtgactgagcccccgctgcggccccgcccccggggccctgccggagctggtgcgcggcgcggaggggagggccggccaggtaggaatgcgctgcgggcgggcggcgcaggaggcgagcggcggaacatccgggtgctgagggccgcggtgtgggtgcgcggagcagtcagggcgcaggtgggcagcgcgcacggcctgccagcccggggcgccagaatcctgcgctgcggggccgagaggggcgccgcgcccgccgcagcctggagctttccgcgaacctcggggcgcccatgacggcggcggcgacggctaccgtgctcaaggagggcgtgctggagaagcgcagcggcgggctgctgcagctgtggaagcggaagcgctgcgtcctcaccgaacgcgggctgcagctcttcgaggccaagggcacgggcggccggcccaaggagctcagcttcgcccgcatcaaggccgtggagtgcgtggagagcaccgggcgccacatctacttcacgctggtgaccgaagggggcggcgagatcgacttccgctgccccctggaagatcccggctggaacgcccagatcaccctaggcctggtcaagttcaagaaccagcaggccatccagacagtgcgggcccggcagagcctcgggaccgggaccctcgtgtcctaaaccaccgggcgcaccatctttccttcatgctacccaccacctcagtgctgaggtcaaggcagcttcgttgttccctctggcttgtgggggcacggctgtgctccatgtggcaaggtggaaggcatggacgtgtggaggaggcgctggagctgaaggaatggacgagccctgggaggagggcagaaggctacgcagggctgaggatgaagatgcagcccctggatggtcccagactctcaggacatgcccagctcaggggcttcgagccacaggcctggcctcatatggcatgagggggagctggcataggagccccctccctgctgtggtcctgccctctgtcctgcagactgctcttagccccctggctttgtgccaggcctggaggagggcagtcccccatggggtgccgagccaacgcctcaggaatcaggaggccagcctggtaccaaaaggagtacccagggcctggtacccaggcccactccagaatggcctctggactcaccttgagaagggggagctgctgggcctaaagcccactcctgggggtctcctgctgcttaggtccttttgggacccccacccatccaggccctttctttgcacacttcttcccccacctctatgcatcttccccccactgcggtgttcggcctgaaggtggtgggggtgagggggggtttggccattagcatttcatgtctttccccaaatgaagatgccctgcaaagggcagtaaccaca

SEQ ID NO: 458340 - DNA, 1616 bp, Homo sapiens
ttcattcaaggcctgggggagctgcggttccgagaagcggcagacggcagccagaaggcttgggctgttgagtaagcagccccctctcagtcccggccctccccgcctcgcgccctgcgcctccagtgagtgactgagcccccgctgcggccccgcccccggggccctgccggagctggtgcgcggcgcggaggggagggccggccaggtaggaatgcgctgcgggcgggcggcgcaggaggcgagcggcggaacatgtaagggcacatcccgcgagctgccgcccagcgcgcagacagagcccaggggagcaagagaacgggcgggcggtggggctcacggcctagggaggcgcggaggcatctggcagaggcgggtcgggctgggccagctgggtgcgcggagcagtcagggcgcaggtgggcagcgcgcacggcctgccagcccgccgcagcctggagctttccgcgaacctcggggcgcccatgacggcggcggcgacggctaccgtgctcaaggagggcgtgctggagaagcgcagcggcgggctgctgcagctgtggaagcggaagcgctgcgtcctcaccgaacgcgggctgcagctcttcgaggccaagggcacgggcggccggcccaaggagctcagcttcgcccgcatcaaggccgtggagtgcgtggagagcaccgggcgccacatctacttcacgctggtgaccgaagggggcggcgagatcgacttccgctgccccctggaagatcccggctggaacgcccagatcaccctaggcctggtcaagttcaagaaccagcaggccatccagacagtgcgggcccggcagagcctcgggaccgggaccctcgtgtcctaaaccaccgggcgcaccatctttccttcatgctacccaccacctcagtgctgaggtcaaggcagcttcgttgttccctctggcttgtgggggcacggctgtgctccatgtggcaaggtggaaggcatggacgtgtggaggaggcgctggagctgaaggaatggacgagccctgggaggagggcagaaggctacgcagggctgaggatgaagatgcagcccctggatggtcccagactctcaggacatgcccagctcaggggcttcgagccacaggcctggcctcatatggcatgagggggagctggcataggagccccctccctgctgtggtcctgccctctgtcctgcagactgctcttagccccctggctttgtgccaggcctggaggagggcagtcccccatggggtgccgagccaacgcctcaggaatcaggaggccagcctggtaccaaaaggagtacccagggcctggtacccaggcccactccagaatggcctctggactcaccttgagaagggggagctgctgggcctaaagcccactcctgggggtctcctgctgcttaggtccttttgggacccccacccatccaggccctttctttgcacacttcttcccccacctctatgcatcttccccccactgcggtgttcggcctgaaggtggtgggggtgagggggggtttggccattagcatttcatgtctttccccaaatgaagatgccctgcaaagggcagtaaccaca

SEQ ID NO: 458341 - DNA, 1738 bp, Homo sapiens
ttcattcaaggcctgggggagctgcggttccgagaagcggcagacggcagccagaaggcttgggctgttgagtaagcagccccctctcagtcccggccctccccgcctcgcgccctgcgcctccagtgagtgactgagcccccgctgcggccccgcccccggggccctgccggagctggtgcgcggcgcggaggggagggccggccaggtaggaatgcgctgcgggcgggcggcgcaggaggcgagcggcggaacatgtaagggcacatcccgcgagctgccgcccagcgcgcagacagagcccaggggagcaagagaacgggcgggcggtggggctcacggcctagggaggcgcggaggcatctggcagaggcgggtcgggctgggccagctggggtagagcggaggagcgggtgccggctgaagcggggcggtgggcgcggagcgcgctgggggcaccgacaccacctcaccggcagccgggtgctgagggccgcggtgtgggtgcgcggagcagtcagggcgcaggtgggcagcgcgcacggcctgccagcccggggcgccagaatcctgcgctgcggggccgagaggggcgccgcgcccgccgcagcctggagctttccgcgaacctcggggcgcccatgacggcggcggcgacggctaccgtgctcaaggagggcgtgctggagaagcgcagcggcgggctgctgcagctgtggaagcggaagcgctgcgtcctcaccgaacgcgggctgcagctcttcgaggccaagggcacgggcggccggcccaaggagctcagcttcgcccgcatcaaggccgtggagtgcgtggagagcaccgggcgccacatctacttcacgctggtgaccgaagggggcggcgagatcgacttccgctgccccctggaagatcccggctggaacgcccagatcaccctaggcctggtcaagttcaagaaccagcaggccatccagacagtgcgggcccggcagagcctcgggaccgggaccctcgtgtcctaaaccaccgggcgcaccatctttccttcatgctacccaccacctcagtgctgaggtcaaggcagcttcgttgttccctctggcttgtgggggcacggctgtgctccatgtggcaaggtggaaggcatggacgagccctgggaggagggcagaaggctacgcagggctgaggatgaagatgcagcccctggatggtcccagactctcaggacatgcccagctcaggggcttcgagccacaggcctggcctcatatggcatgagggggagctggcataggagccccctccctgctgtggtcctgccctctgtcctgcagactgctcttagccccctggctttgtgccaggcctggaggagggcagtcccccatggggtgccgagccaacgcctcaggaatcaggaggccagcctggtaccaaaaggagtacccagggcctggtacccaggcccactccagaatggcctctggactcaccttgagaagggggagctgctgggcctaaagcccactcctgggggtctcctgctgcttaggtccttttgggacccccacccatccaggccctttctttgcacacttcttcccccacctctatgcatcttccccccactgcggtgttcggcctgaaggtggtgggggtgagggggggtttggccattagcatttcatgtctttccccaaatgaagatgccctgcaaagggcagtaaccaca

SEQ ID NO: 458342 - DNA, 1739 bp, Homo sapiens
ttcattcaaggcctgggggagctgcggttccgagaagcggcagacggcagccagaaggcttgggctgttgagtaagcagccccctctcagtcccggccctccccgcctcgcgccctgcgcctccagtgagtgactgagcccccgctgcggccccgcccccggggccctgccggagctggtgcgcggcgcggaggggagggccggccaggtaggaatgcgctgcgggcgggcggcgcaggaggcgagcggcggaacatgtaagggcacatcccgcgagctgccgcccagcgcgcagacagagcccaggggagcaagagaacgggcgggcggtggggctcacggcctagggaggcgcggaggcatctggcagaggcgggtcgggctgggccagctggggtagagcggaggagcgggtgccggctgaagcggggcggtgggcgcggagcgcgctgggggcaccgacaccacctcaccggcagccgggtgctgagggccgcggtgtgggtgcgcggagcagtcagggcgcaggtgggcagcgcgcacggcctgccagcccggggcgccagaatcctgcgctgcggggccgagaggggcgccgcgcccgccgcagcctggagctttccgcgaacctcggggcgcccatgacggcggcggcgacggctaccgtgctcaaggagggcgtgctggagaagcgcagcggcgggctgctgcagctgtggaagcggaagcgctgcgtcctcaccgaacgcgggctgcagctcttcgaggccaagggcacgggcggccggcccaaggagctcagcttcgcccgcatcaaggccgtggagtgcgtggagagcaccgggcgccacatctacttcacgctggtgaccgaagggggcggcgagatcgacttccgctgccccctggaagatcccggctggaacgcccagatcaccctaggcctggtcaagttcaagaaccagcaggccatccagacagtgcgggcccggcagagcctcgggaccgggaccctcgtgtcctaaaccaccgggcgcaccatctttccttcatgctacccaccacctcagtgctgaggtcaaggcagcttcgttgttccctctggcttgtgggggcacggctgtgctccatgtggcaaggtggaaggcatggacgtgtggaggaggcgctggagctgaaggaatggacgagccctgggaggagggcagaaggctacgcagggctgaggatgaagatgcagcccctggatggtcccagactctcaggacatgcccagctcaggggcttcgagccacaggcctggcctcatatggcatgagggggagctggcataggagccagactgctcttagccccctggctttgtgccaggcctggaggagggcagtcccccatggggtgccgagccaacgcctcaggaatcaggaggccagcctggtaccaaaaggagtacccagggcctggtacccaggcccactccagaatggcctctggactcaccttgagaagggggagctgctgggcctaaagcccactcctgggggtctcctgctgcttaggtccttttgggacccccacccatccaggccctttctttgcacacttcttcccccacctctatgcatcttccccccactgcggtgttcggcctgaaggtggtgggggtgagggggggtttggccattagcatttcatgtctttccccaaatgaagatgccctgcaaagggcagtaaccaca

SEQ ID NO: 458343 - DNA, 1582 bp, Homo sapiens
ttcattcaaggcctgggggagctgcggttccgagaagcggcagacggcagccagaaggcttgggctgttgagtaagcagccccctctcagtcccggccctccccgcctcgcgccctgcgcctccagtgagtgactgagcccccgctgcggccccgcccccggggccctgccggagctggtgcgcggcgcggaggggagggccggccaggtaggaatgcgctgcgggcgggcggcgcaggaggcgagcggcggaacatgtaagggcacatcccgcgagctgccgcccagcgcgcagacagagcccaggggagcaagagaacgggcgggcggtggggctcacggcctagggaggcgcggaggcatctggcagaggcgggtcgggctgggccagctgggtgcgcggagcagtcagggcgcaggtgggcagcgcgcacggcctgccagcccgccgcagcctggagctttccgcgaacctcggggcgcccatgacggcggcggcgacggctaccgtgctcaaggagggcgtgctggagaagcgcagcggcgggctgctgcagctgtggaagcggaagcgctgcgtcctcaccgaacgcgggctgcagctcttcgaggccaagggcacgggcggccggcccaaggagctcagcttcgcccgcatcaaggccgtggagtgcgtggagagcaccgggcgccacatctacttcacgctggtgaccgaagggggcggcgagatcgacttccgctgccccctggaagatcccggctggaacgcccagatcaccctaggcctggtcaagttcaagaaccagcaggccatccagacagtgcgggcccggcagagcctcgggaccgggaccctcgtgtcctaaaccaccgggcgcaccatctttccttcatgctacccaccacctcagtgctgaggtcaaggcagcttcgttgttccctctggcttgtgggggcacggctgtgctccatgtggcaaggtggaaggcatggacgagccctgggaggagggcagaaggctacgcagggctgaggatgaagatgcagcccctggatggtcccagactctcaggacatgcccagctcaggggcttcgagccacaggcctggcctcatatggcatgagggggagctggcataggagccccctccctgctgtggtcctgccctctgtcctgcagactgctcttagccccctggctttgtgccaggcctggaggagggcagtcccccatggggtgccgagccaacgcctcaggaatcaggaggccagcctggtaccaaaaggagtacccagggcctggtacccaggcccactccagaatggcctctggactcaccttgagaagggggagctgctgggcctaaagcccactcctgggggtctcctgctgcttaggtccttttgggacccccacccatccaggccctttctttgcacacttcttcccccacctctatgcatcttccccccactgcggtgttcggcctgaaggtggtgggggtgagggggggtttggccattagcatttcatgtctttccccaaatgaagatgccctgcaaagggcagtaaccaca

SEQ ID NO: 458344 - DNA, 504 bp, Homo sapiens
caagatgaacgacgactcggttattcatcactgtgctgggttgttattatggtcgtgggctacgaatagagccctccctgctgtggtcctgccctctgtcctgcagactgctcttagccccctggctttgtgccaggcctggaggagggcagtcccccatggggtgccgagccaacgcctcaggaatcaggaggccagcctggtaccaaaaggagtacccagggcctggtacccaggcccactccagaatggcctctggactcaccttgagaagggggagctgctgggcctaaagcccactcctgggggtctcctgctgcttaggtccttttgggacccccacccatccaggccctttctttgcacacttcttcccccacctctatgcatcttccccccactgcggtgttcggcctgaaggtggtgggggtgagggggggtttggccattagcatttcatgtctttccccaaatgaagatgccctgcaaagggcagtaaccaca

SEQ ID NO: 458345 - DNA, 1995 bp, Homo sapiens
ttcattcaaggcctgggggagctgcggttccgagaagcggcagacggcagccagaaggcttgggctgttgagtaagcagccccctctcagtcccggccctccccgcctcgcgccctgcgcctccagtgagtgactgagcccccgctgcggccccgcccccggggccctgccggagctggtgcgcggcgcggaggggagggccggccaggtaggaatgcgctgcgggcgggcggcgcaggaggcgagcggcggaacatgtaagggcacatcccgcgagctgccgcccagcgcgcagacagagcccaggggagcaagagaacgggcgggcggtggggctcacggcctagggaggcgcggaggcatctggcagaggcgggtcgggctgggccagctggggtagagcggaggagcgggtgccggctgaagcggggcggtgggcgcggagcgcgctgggggcaccgacaccacctcaccggcagccgggtgctgagggccgcggtgtgggtgcgcggagcagtcagggcgcaggtgggcagcgcgcacggcctgccagcccggggcgccagaatcctgcgctgcggggccgagaggggcgccgcgcccgccgcagcctggagctttccgcgaacctcggggcgcccatgacggcggcggcgacggctaccgtgctcaaggagggcgtgctggagaagcgcagcggcgggctgctgcagctgtggaagcggaagcgctgcgtcctcaccgaacgcgggctgcagctcttcgaggccaagggcacgggcggccggcccaaggagctcagcttcgcccgcatcaaggccgtggagtgcgtggagagcaccgggcgccacatctacttcacgctggtgaccgaagggggcggcgagatcgacttccgctgccccctggaagatcccggctggaacgcccagatcaccctaggcctggtcaagttcaagaaccagcaggccatccagacagtgcgggcccggcagagcctcgggaccgggaccctcgtgtcctaaaccaccgggcgcaccatctttccttcatgctacccaccacctcagtgctgaggtcaaggcagcttcgttgttccctctggcttgtgggggcacggctgtgctccatgtggcaaggtggaaggcatggacgtgtggaggaggcgctggagctgaaggaatggacgagccctgggaggagggcagaaggctacgcagggctgaggatgaagatgcagcccctggatggtcccagactctcaggacatgcccagctcaggggcttcgagccacaggcctggcctcatatggcatgagggggagctggcataggagccccctccctgctgtggtcctgccctctgtcctgcagactgctcttagccccctggctttgtgccaggcctggaggagggcagtcccccatggggtgccgagccaacgcctcaggaatcaggaggccagcctggtaccaaaaggagtacccagggcctggtacccaggcccactccagaatggcctctggactcaccttgagaagggggagctgctgggcctaaagcccactcctgggggtctcctgctgcttaggtccttttgggacccccacccatccaggccctttctttgcacacttcttcccccacctctatgcatcttccccccactgcggtgttcggcctgaaggtggtgggggtgagggggggtttggccattagcatttcatgtctttccccaaatgaagatgccctgcaaagggcagtaaccacaaaaaaaaaaaaaaaaaaaagaaaaaacaacaaacagaggacaggagcaacaaaaagagaagagaggaaagaaaacagggcagtaagaaaaaagggacgagagagagaaaagagtggattcacgtcgccaaacgttttgtgaatcaagatgttgaaaaatagagggatacactaaagtgagagcgagataaaatgtcatagaagaggagaaaaaccgctataag

SEQ ID NO: 458346 - DNA, 1496 bp, Homo sapiens
gagagaacggggcgtgctgggttcgagggatcagggactacaggcaggcgcccaggaatgtgagaccgaggcgggtagccctgggactggctgaagggtaggagacgagagaggggcgtctgccgaggtagtcctcgggacggatggagcgctgagcgactgtgtggggcaccttgatccctaatcggtcagaggaagctcgcgttgtggaaggtgcacgagtgttgggtgcgcggagcagtcagggcgcaggtgggcagcgcgcacggcctgccagcccggggcgccagaatcctgcgctgcggggccgagaggggcgccgcgcccgccgcagcctggagctttccgcgaacctcggggcgcccatgacggcggcggcgacggctaccgtgctcaaggagggcgtgctggagaagcgcagcggcgggctgctgcagctgtggaagcggaagcgctgcgtcctcaccgaacgcgggctgcagctcttcgaggccaagggcacgggcggccggcccaaggagctcagcttcgcccgcatcaaggccgtggagtgcgtggagagcaccgggcgccacatctacttcacgctggtgaccgaagggggcggcgagatcgacttccgctgccccctggaagatcccggctggaacgcccagatcaccctaggcctggtcaagttcaagaaccagcaggccatccagacagtgcgggcccggcagagcctcgggaccgggaccctcgtgtcctaaaccaccgggcgcaccatctttccttcatgctacccaccacctcagtgctgaggtcaaggcagcttcgttgttccctctggcttgtgggggcacggctgtgctccatgtggcaaggtggaaggcatggacgtgtggaggaggcgctggagctgaaggaatggacgagccctgggaggagggcagaaggctacgcagggctgaggatgaagatgcagcccctggatggtcccagactctcaggacatgcccagctcaggggcttcgagccacaggcctggcctcatatggcatgagggggagctggcataggagccccctccctgctgtggtcctgccctctgtcctgcagactgctcttagccccctggctttgtgccaggcctggaggagggcagtcccccatggggtgccgagccaacgcctcaggaatcaggaggccagcctggtaccaaaaggagtacccagggcctggtacccaggcccactccagaatggcctctggactcaccttgagaagggggagctgctgggcctaaagcccactcctgggggtctcctgctgcttaggtccttttgggacccccacccatccaggccctttctttgcacacttcttcccccacctctatgcatcttccccccactgcggtgttcggcctgaaggtggtgggggtgagggggggtttggccattagcatttcatgtctttccccaaatgaagatgccctgcaaagggcagtaaccaca

SEQ ID NO: 458347 - DNA, 1364 bp, Homo sapiens
ttcattcaaggcctgggggagctgcggttccgagaagcggcagacggcagccagaaggcttgggctgttgagtaagcagccccctctcagtcccggccctccccgcctcgcgccctgcgcctccagtgagtgactgagcccccgctgcggccccgcccccggggccctgccggagctggtgcgcggcgcggaggggagggccggccaggtaggaatgcgctgcgggcgggcggcgcaggaggcgagcggcggaacatgtaagggcacatcccgcgagctgccgcccagcgcgcagacagagcccaggggagcagcggaagcgctgcgtcctcaccgaacgcgggctgcagctcttcgaggccaagggcacgggcggccggcccaaggagctcagcttcgcccgcatcaaggccgtggagtgcgtggagagcaccgggcgccacatctacttcacgctggtgaccgaagggggcggcgagatcgacttccgctgccccctggaagatcccggctggaacgcccagatcaccctaggcctggtcaagttcaagaaccagcaggccatccagacagtgcgggcccggcagagcctcgggaccgggaccctcgtgtcctaaaccaccgggcgcaccatctttccttcatgctacccaccacctcagtgctgaggtcaaggcagcttcgttgttccctctggcttgtgggggcacggctgtgctccatgtggcaaggtggaaggcatggacgtgtggaggaggcgctggagctgaaggaatggacgagccctgggaggagggcagaaggctacgcagggctgaggatgaagatgcagcccctggatggtcccagactctcaggacatgcccagctcaggggcttcgagccacaggcctggcctcatatggcatgagggggagctggcataggagccccctccctgctgtggtcctgccctctgtcctgcagactgctcttagccccctggctttgtgccaggcctggaggagggcagtcccccatggggtgccgagccaacgcctcaggaatcaggaggccagcctggtaccaaaaggagtacccagggcctggtacccaggcccactccagaatggcctctggactcaccttgagaagggggagctgctgggcctaaagcccactcctgggggtctcctgctgcttaggtccttttgggacccccacccatccaggccctttctttgcacacttcttcccccacctctatgcatcttccccccactgcggtgttcggcctgaaggtggtgggggtgagggggggtttggccattagcatttcatgtctttccccaaatgaagatgccctgcaaagggcagtaaccaca

SEQ ID NO: 458348 - DNA, 1884 bp, Homo sapiens
  misc_feature (1683)..(1683): n is a, c, g, or t
ttcattcaaggcctgggggagctgcggttccgagaagcggcagacggcagccagaaggcttgggctgttgagtaagcagccccctctcagtcccggccctccccgcctcgcgccctgcgcctccagtgagtgactgagcccccgctgcggccccgcccccggggccctgccggagctggtgcgcggcgcggaggggagggccggccaggtaggaatgcgctgcgggcgggcggcgcaggaggcgagcggcggaacatgtaagggcacatcccgcgagctgccgcccagcgcgcagacagagcccaggggagcaagagaacgggcgggcggtggggctcacggcctagggaggcgcggaggcatctggcagaggcgggtcgggctgggccagctggggtagagcggaggagcgggtgccggctgaagcggggcggtgggcgcggagcgcgctgggggcaccgacaccacctcaccggcagccgggtgctgagggccgcggtgtgggtgcgcggagcagtcagggcgcaggtgggcagcgcgcacggcctgccagcccggggcgccagaatcctgcgctgcggggccgagaggggcgccgcgcccgccgcagcctggagctttccgcgaacctcggggcgcccatgacggcggcggcgacggctaccgtgctcaaggagggcgtgctggagaagcgcagcggcgggctgctgcagctgtggaagcggaagcgctgcgtcctcaccgaacgcgggctgcagctcttcgaggccaagggcacgggcggccggcccaaggagctcagcttcgcccgcatcaaggccgtggagtgcgtggagagcaccgggcgccacatctacttcacgctggtgaccgaagggggcggcgagatcgacttccgctgccccctggaagatcccggctggaacgcccagatcaccctaggcctggtcaagttcaagaaccagcaggccatccagacagtgcgggcccggcagagcctcgggaccgggaccctcgtgtcctaaaccaccgggcgcaccatctttccttcatgctacccaccacctcagtgctgaggtcaaggcagcttcgttgttccctctggcttgtgggggcacggctgtgctccatgtggcaaggtggaaggcatggacgtgtggaggaggcgctggagctgaaggaatggacgagccctgggaggagggcagaaggctacgcagggctgaggatgaagatgcagcccctggatggtcccagactctcaggacatgcccagctcaggggcttcgagccacaggcctggcctcatatggcatgagggggagctggcataggagccccctccctgctgtggtcctgccctctgtcctgcagactgctcttagccccctggctttgtgccaggcctggaggagggcagtcccccatggggtgccgagccaacgcctcaggaatcaggaggccagcctggtaccaaaaggagtacccagggcctggtacccaggcccactccagaatggcctctggactcaccttgagaaggctacgcagggctgaggatgaagatgcagcccctggatggtcccagactctcaggacatgcccagctcaggggcttcgagccacaggcctggcctcatatggcatgagggggagctggcattaggagccccctccctgctntgggggtctcctgctgcttaggtccttttgggacccccacccatccaggccctttctttgcacacttcttcccccacctctatgcatcttccccccactgcggtgttcggcctgaaggtggtgggggtgagggggggtttggccattagcatttcatgtctttccccaaatgaagatgccctgcaaagggcagtaaccaca

SEQ ID NO: 458349 - DNA, 501 bp, Homo sapiens
taaattcgcggccgcgtcgacgaggcatctggcctcatatggcatgagggggagctggcataggagccccctccctgctgtggtcctgccctctgtcctgcagactgctcttagccccctggctttgtgccaggcctggaggagggcagtcccccatggggtgccgagccaacgcctcaggaatcaggaggccagcctggtaccaaaaggagtacccagggcctggtacccaggcccactccagaatggcctctggactcaccttgagaagggggagctgctgggcctaaagcccactcctgggggtctcctgctgcttaggtccttttgggacccccacccatccaggccctttctttgcacacttcttcccccacctctatgcatcttccccccactgcggtgttcggcctgaaggtggtgggggtgagggggggtttggccattagcatttcatgtctttccccaaatgaagatgccctgcaaagggcagtaaccaca

SEQ ID NO: 458350 - DNA, 186 bp, Homo sapiens
gcggccgcctactactactactactgctcgaattcaagcttctaacgatgtacggggaccgccgcggtggctaccgccagcagcagtctcagacggcctactgagctctccactctgtttcccgcctgggccatccaaccttgaagtcctaaaccacacctcagtcactaaaggtctgtttaaagt

SEQ ID NO: 458351 - DNA, 3126 bp, Homo sapiens
ataggctaggtacgaggctggggtgaaatcggccgagggctgtcagggccctgcggtgtgactcgcgggctcagctggtccggccgtagcacctccgcgccgtcgccatgtcgcggtttttcaccaccggttcggacagcgagtccgagtcgtccttgtccggggaggagctcgtcaccaaacctgtcggaggcaactatggcaaacagccattgttgctgagcgaggatgaagaagataccaagagagttgtccgcagtgccaaggacaagaggtttgaggagctgaccaaccttatccggaccatccgtaatgccatgaagattcgtgatgtcaccaagtgcctggaagagtttgagctcctgggaaaagcatatgggaaggccaaaagcattgtggacaaagaaggtgtcccccggttctatatccgcatcctggctgacctagaggactatcttaatgagctttgggaagataaggaagggaagaagaagatgaacaagaacaatgccaaggctctgagcaccttgcgtcagaagatccgaaaatacaaccgtgatttcgagtcccatatcacaagctacaagcagaaccccgagcagtctgcggatgaagatgctgagaaaaatgaggaggattcagaaggctcttcagatgaggatgaggatgaggacggagtcagtgctgcaactttcttgaagaagaaatcagaagctccttctggggagagtcgcaagttcctcaaaaagatggatgatgaagatgaggactcagaagattccgaagatgatgaagactgggacacaggttccacatcttccgattccgactcagaggaggaagaagggaaacaaaccgcgctggcctcaagatttcttaaaaaggcacccaccacagatgaggacaagaaggcagccgagaagaaacgggaggacaaagctaagaagaagcacgacaggaaatccaagcgcctggatgaggaggaggaggacaatgaaggcggggagtgggaaagggtccggggcggagtgccgttggttaaggagaagccaaaaatgtttgccaagggaactgagatcacccatgctgttgttatcaagaaactgaatgagatcctacaggcacgaggcaagaagggaactgatcgtgctgcccagattgagctgctgcaactgctggttcagattgcagcggaaaacaacctgggagagggcgtcattgtcaagatcaagttcaatatcatcgcctctctctatgactacaaccccaacctggcaacctacatgaagccagagatgtgggggaagtgcctggactgcatcaatgagctgatggatatcctgtttgcaaatcccaacatttttgttggagagaatattctggaagagagtgagaacctgcacaacgctgaccagccactgcgtgtccgtggctgcatcctaactctggtggaacgaatggatgaagaatttaccaaaataatgcaaaatactgaccctcactcccaagagtacgtggagcacttgaaggatgaggcccaggtgtgtgccatcatcgagcgtgtgcagcgctacctggaggagaagggcactaccgaggaggtctgccgcatctacctgctgcgcatcctgcacacctactacaagtttgattacaaggcccatcagcgacagctgaccccgcctgagggctcctcaaagtctgagcaagaccaggcagaaaatgagggcgaggactcggctgtgttgatggagagactgtgcaagtacatctacgccaaggaccgcacagaccggatccgcacatgtgccatcctctgccacatctaccaccatgctctgcactcgcgctggtaccaggcccgcgacctcatgctcatgagccacttgcaggacaacattcagcatgcagacccgccagtgcagatcctttacaaccgcaccatggtgcagctgggcatctgtgccttccgccaaggcctgaccaaggacgcacacaacgccctgctggacatccagtcgagtggccgagccaaggagcttctgggccagggcctgctgctgcgcagcctgcaggagcgcaaccaggagcaggagaaggtggagcggcgccgtcaggtccccttccacctgcacatcaacctggagctgctggagtgtgtctacctggtgtctgccatgctcctggagatcccctacatggccgcccatgagagcgatgcccgccgacgcatgatcagcaagcagttccaccaccagctgcgcgtgggcgagcgacagcccctgctgggtccccctgagtccatgcgggaacatgtggtcgctgcctccaaggccatgaagatgggtgactggaagacctgtcacagttttatcatcaatgagaagatgaatgggaaagtgtgggaccttttccccgaggctgacaaagtccgcaccatgctggttaggaagatccaggaagagtcactgaggacctacctcttcacctacagcagtgtctatgactccatcagcatggagacgctgtcagacatgtttgagctggatctgcccactgtgcactccatcatcagcaaaatgatcattaatgaggagctgatggcctccctggaccagccaacacagacagtggtgatgcaccgcactgagcccactgcccagcagaacctggctctgcagctggccgagaagctgggcagcctggtggagaacaacgaacgggtgtttgaccacaagcagggcacctacgggggctacttccgagaccagaaggacggctaccgcaaaaacgagggctacatgcgccgcggtggctaccgccagcagcagtctcagacggcctactgagctctccactctgtttcccgcctgggccatccaaccttgaagtcctaaaccacacctcagtcactaaaggtctgtttaaagttgttctggttgattgcttgttgccacaaaggtgtgttgagcccattcatttgctgattatacttctgagctgctaccacatgacagacacaaggctcagatgaagaggtgaattgaacacgttcctgacctcaaagagcctgctgctttttgacatttaacagaaaattatagtaacataagttataatgggtgt

SEQ ID NO: 458352 - DNA, 165 bp, Homo sapiens
ggatttgctggtgcagtacaactaggcttaatagggaccgccgcggtggctaccgccagcagcagtctcagacggcctactgagctctccactctgtttcccgcctgggccatccaaccttgaagtcctaaaccacacctcagtcactaaaggtctgtttaaagt

SEQ ID NO: 458353 - DNA, 3324 bp, Homo sapiens
  misc_feature (3035)..(3035): n is a, c, g, or t
  misc_feature (3039)..(3039): n is a, c, g, or t
gggcctgcggtgtgactcgcgggctcagctggttggtattttttgggcctcgtgcttcgtggtgggagacccaggtcgaggtccgggtggggccggtgaggggttgggcgtcgggaggtgttggctcgggcctcttcgcgtggccggtgacgccttggctcccccgcagggtccggccgtagcacctccgcgccgtcgccatgtcgcggtttttcaccaccggttcggacagcgagtccgagtcgtccttgtccggggaggagctcgtcaccaaacctgtcggaggcaactatggcaaacagccattgttgctgagcgaggatgaagaagataccaagagagttgtccgcagtgccaaggacaagaggtttgaggagctgaccaaccttatccggaccatccgtaatgccatgaagattcgtgatgtcaccaagtgcctggaagagtttgagctcctgggaaaagcatatgggaaggccaaaagcattgtggacaaagaaggtgtcccccggttctatatccgcatcctggctgacctagaggactatcttaatgagctttgggaagataaggaagggaagaagaagatgaacaagaacaatgccaaggctctgagcaccttgcgtcagaagatccgaaaatacaaccgtgatttcgagtcccatatcacaagctacaagcagaaccccgagcagtctgcggatgaagatgctgagaaaaatgaggaggattcagaaggctcttcagatgaggatgaggatgaggacggagtcagtgctgcaactttcttgaagaagaaatcagaagctccttctggggagagtcgcaagttcctcaaaaagatggatgatgaagatgaggactcagaagattccgaagatgatgaagactgggacacaggttccacatcttccgattccgactcagaggaggaagaagggaaacaaaccgcgctggcctcaagatttcttaaaaaggcacccaccacagatgaggacaagaaggcagccgagaagaaacgggaggacaaagctaagaagaagcacgacaggaaatccaagcgcctggatgaggaggaggaggacaatgaaggcggggagtgggaaagggtccggggcggagtgccgttggttaaggagaagccaaaaatgtttgccaagggaactgagatcacccatgctgttgttatcaagaaactgaatgagatcctacaggcacgaggcaagaagggaactgatcgtgctgcccagattgagctgctgcaactgctggttcagattgcagcggaaaacaacctgggagagggcgtcattgtcaagatcaagttcaatatcatcgcctctctctatgactacaaccccaacctggcaacctacatgaagccagagatgtgggggaagtgcctggactgcatcaatgagctgatggatatcctgtttgcaaatcccaacatttttgttggagagaatattctggaagagagtgagaacctgcacaacgctgaccagccactgcgtgtccgtggctgcatcctaactctggtggaacgaatggatgaagaatttaccaaaataatgcaaaatactgaccctcactcccaagagtacgtggagcacttgaaggatgaggcccaggtgtgtgccatcatcgagcgtgtgcagcgctacctggaggagaagggcactaccgaggaggtctgccgcatctacctgctgcgcatcctgcacacctactacaagtttgattacaaggcccatcagcgacagctgaccccgcctgagggctcctcaaagtctgagcaagaccaggcagaaaatgagggcgaggactcggctgtgttgatggagagactgtgcaagtacatctacgccaaggaccgcacagaccggatccgcacatgtgccatcctctgccacatctaccaccatgctctgcactcgcgctggtaccaggcccgcgacctcatgctcatgagccacttgcaggacaacattcagcatgcagacccgccagtgcagatcctttacaaccgcaccatggtgcagctgggcatctgtgccttccgccaaggcctgaccaaggacgcacacaacgccctgctggacatccagtcgagtggccgagccaaggagcttctgggccagggcctgctgctgcgcagcctgcaggagcgcaaccaggagcaggagaaggtggagcggcgccgtcaggtccccttccacctgcacatcaacctggagctgctggagtgtgtctacctggtgtctgccatgctcctggagatcccctacatggccgcccatgagagcgatgcccgccgacgcatgatcagcaagcagttccaccaccagctgcgcgtgggcgagcgacagcccctgctgggtccccctgagtccatgcgggaacatgtggtcgctgcctccaaggccatgaagatgggtgactggaagacctgtcacagttttatcatcaatgagaagatgaatgggaaagtgtgggaccttttccccgaggctgacaaagtccgcaccatgctggttaggaagatccaggaagagtcactgaggacctacctcttcacctacagcagtgtctatgactccatcagcatggagacgctgtcagacatgtttgagctggatctgcccactgtgcactccatcatcagcaaaatgatcattaatgaggagctgatggcctccctggaccagccaacacagacagtggtgatgcaccgcactgagcccactgcccagcagaacctggctctgcagctggccgagaagctgggcagcctggtggagaacaacgaacgggtgtttgaccacaagcagggcacctacgggggctacttccgagaccagaaggacggctaccgcaaaaacgagggctacatgcgccgcggtggctaccgccagcagcagtctcagacggcctactgagctctccactctgtttcccgcctgggccatccaaccttgaagtcctaaaccacacctcagtcactaaaggtctgtttaaagtaaaaaaaaaanaaanaaactccagactagttctctctctttctccctcgttgccgaattcggcccgagggacttgttgcaccccgaaagacggactacctggctgtgaaagaggctggtacaggcgtgtccccaagcctgacctgacctgcaccaggctgccctcggacatgaaagggccgcgtggggaaaaggcctgtgccccaggtacccccactaagaggctgaaaatttaccaagcaaggggccaggaccaaagggtcgtaaatggccatgaaggggacccccataaggtcacgac

SEQ ID NO: 458354 - DNA, 992 bp, Homo sapiens
aagcagtggtatcaacgcaggactggccattactggtgggactacttccgagaccagaaggacggctaccgcaaaaacgagggctacatgcgccgcggtggctaccgccagcagcagtctcagacggcctactgagctctccactctgtttcccgcctgggccatccaaccttgaagtcctaaaccacacctcagtcactaaaggtctgtttaaagtaaaaacaacacaaaaaaaaaaacttttgtgggcccgccttggagcctatgaaaaaggttttcaagacccaatttcggttggcgcggcgggggccccaagtaggttagggtgacacattggtcaaaaagattggttccctaaggaagatcgtgggcaatgcacttagggtcgttgggattcctcaccaaataaaaaaaaaccgcccgggggggcaaaccagagcggttcctgaaacaactcaagatggagggtcaggagggccaattcctggaacctatcccacacgggatgtcccaggcgaggtccgataataaaattacggcccgcgcccgggggaaagagcacaacacgacacagcacaacagaacgcgaccagaaacagtaacaaagcagaacacaaaaaagaacacgaagagggcacgacacgacgggcggcgggcgaggagagagaacacgaaggagacaacgaggacacagcacccgcgagccacaggcgcaagagcaagaacgaccgccaagctgcgacgacagacagaaccaggcaaaagagaagggaaaaaagaaggaccgagagcacacgtaaaggcagcccaagaaaagaagcacgagcagaaagcgagagcccaagacaaggagaactaagacggccggctaccgaaggcacgaacgacgtaaggagcagacgacagccgaacacaaaaaagccagagaagaaagcgaaccagaacgacgcgccaccaaggacctcagcagagcagagagaaagaagggaggg

SEQ ID NO: 458355 - DNA, 762 bp, Homo sapiens
  misc_feature (704)..(704): n is a, c, g, or t
  misc_feature (728)..(729): n is a, c, g, or t
ggacggcaaacagaatgttgtatgagtgcggtacctggttgttatttcaggtccggagggcgggctttctgtgttcgtgtccgtgggtccggccgtagcacctccgcgccgtcgccatgtcgcggtttttcaccaccggttcggacagcgagtccgagtcgtccttgtccggggaggagctcgtcaccaaacctgtcggaggcaactatggcaaacagccattgttgctgagcgaggatgaagaagataccaagagagttgtccgcagtgccaaggacaagaggtttgaggagctgaccaaccttatccggaccatccgtaatgccatgaagattcgtgatgtcaccaagtgcctggaagagtttgagctcctgggaaaagcatatgggaaggccaaaagcattgtggacaaagaaggtgtcccccggttctatatccgcatcctggctgacctagaggactatcttaatgagctttgggaagataaggaagggaagaagaagatgaacaagaacaatgccaaggctctgagcaccttgcgtcagaagatccgaaaatacaaccgtgatttcgagtcccatatcacaagctacaagcagaaccccgagcagtctgcggatgaagatgctgagaaaaatgaggaggattcagaaggctcttcagtatggccttagttgactgaaatatttgatcgtcaggctgtngggtttcacatgggaatttcaggnnagtgaggttgccaataagaacaagcttgtattt

SEQ ID NO: 458356 - DNA, 403 bp, Homo sapiens
ctgtgaactctttttctttttttctttttttttttttttttagatggagtcttgctgtgttgcccaggctggagtgcagtggtgcaatctcatctcactgcaacctccgcctccctggttcaagcagttctcctcagcctcccaagtagctgggattacagggcacccaccacagatgaggacaagaaggcagccgagaagaaacgggaggacaaagctaagaagaagcacgacaggaaatccaagcgcctggatgaggaggaggaggacaatgaaggcggggagtgggaaagggtccggggcggagtgccgttggttaaggtgagggtttcagaggtaaaatgaattggggaacagtttgggaggacataaaggtccccttgtggggaaaaggcaaggacag

SEQ ID NO: 458357 - DNA, 895 bp, Homo sapiens
ctgccagccccagtgtgtggttcccagcctgacaaccttggcaccccagcaccccagcaggaggggtttctgcttgtggtcccctggccaccagcctcggccagctggttgtggaccagccgtgacctggggcaacccagccaacctcaccgtccaatgggctgcagccacctctctccagtgaggtctgagacccagccttaacgaggctacccccttccagcttccagcagccggtccctgaacactcctcctctccctccttggcctcgctgacctcagagttggggacccggaggccggcgtcgatacactgctgcatggggaacttggccttggtggggtccatcttgctgcatttgcgcgtccttcgcattgaagcccttttggagttcctcaggggggaactcgtcacctccacgggttccaggccatcagggccaagctgcttcttgagctcctcctcctagtactcctgctccacctgctttctagacgcgcagcttggcgcagccccgcacaggctccgtggaggcttccagctcgtccttgaagctctccatgcactagcagtcagccgtctgaatctcagtgaagaactgccagaagcagacccgggggaccccttccggctcctgaccaacaccaggttgaactgcgtgacaattgcctagtggaccacctgctccatgagggcgcatttctcctgcacctctagatcagcacaccagatgaccagaaagagaacgagacaagcaatctctttctccaccaagtggggatacagcaagaaggcagctgtgagcaaaccagaaacagagccctcaccagacaccaaatcggtttgccagcaccttaatcttggacttcccagctccagagaactgtgaaaaat

SEQ ID NO: 458358 - DNA, 3106 bp, Homo sapiens
ggaaataaggctaggtaagaggctgggtggagaattgtgcgagggcgggctcagctggtccggccgtagcacctccgcgccgtcgccatgtcgcggtttttcaccaccggttcggacagcgagtccgagtcgtccttgtccggggaggagctcgtcaccaaacctgtcggaggcaactatggcaaacagccattgttgctgagcgaggatgaagaagataccaagagagttgtccgcagtgccaaggacaagaggtttgaggagctgaccaaccttatccggaccatccgtaatgccatgaagattcgtgatgtcaccaagtgcctggaagagtttgagctcctgggaaaagcatatgggaaggccaaaagcattgtggacaaagaaggtgtcccccggttctatatccgcatcctggctgacctagaggactatcttaatgagctttgggaagataaggaagggaagaagaagatgaacaagaacaatgccaaggctctgagcaccttgcgtcagaagatccgaaaatacaaccgtgatttcgagtcccatatcacaagctacaagcagaaccccgagcagtctgcggatgaagatgctgagaaaaatgaggaggattcagaaggctcttcagatgaggatgaggatgaggacggagtcagtgctgcaactttcttgaagaagaaatcagaagctccttctggggagagtcgcaagttcctcaaaaagatggatgatgaagatgaggactcagaagattccgaagatgatgaagactgggacacaggttccacatcttccgattccgactcagaggaggaagaagggaaacaaaccgcgctggcctcaagatttcttaaaaaggcacccaccacagatgaggacaagaaggcagccgagaagaaacgggaggacaaagctaagaagaagcacgacaggaaatccaagcgcctggatgaggaggaggaggacaatgaaggcggggagtgggaaagggtccggggcggagtgccgttggttaaggagaagccaaaaatgtttgccaagggaactgagatcacccatgctgttgttatcaagaaactgaatgagatcctacaggcacgaggcaagaagggaactgatcgtgctgcccagattgagctgctgcaactgctggttcagattgcagcggaaaacaacctgggagagggcgtcattgtcaagatcaagttcaatatcatcgcctctctctatgactacaaccccaacctggcaacctacatgaagccagagatgtgggggaagtgcctggactgcatcaatgagctgatggatatcctgtttgcaaatcccaacatttttgttggagagaatattctggaagagagtgagaacctgcacaacgctgaccagccactgcgtgtccgtggctgcatcctaactctggtggaacgaatggatgaagaatttaccaaaataatgcaaaatactgaccctcactcccaagagtacgtggagcacttgaaggatgaggcccaggtgtgtgccatcatcgagcgtgtgcagcgctacctggaggagaagggcactaccgaggaggtctgccgcatctacctgctgcgcatcctgcacacctactacaagtttgattacaaggcccatcagcgacagctgaccccgcctgagggctcctcaaagtctgagcaagaccaggcagaaaatgagggcgaggactcggctgtgttgatggagagactgtgcaagtacatctacgccaaggaccgcacagaccggatccgcacatgtgccatcctctgccacatctaccaccatgctctgcactcgcgctggtaccaggcccgcgacctcatgctcatgagccacttgcaggacaacattcagcatgcagacccgccagtgcagatcctttacaaccgcaccatggtgcagctgggcatctgtgccttccgccaaggcctgaccaaggacgcacacaacgccctgctggacatccagtcgagtggccgagccaaggagcttctgggccagggcctgctgctgcgcagcctgcaggagcgcaaccaggagcaggagaaggtggagcggcgccgtcaggtccccttccacctgcacatcaacctggagctgctggagtgtgtctacctggtgtctgccatgctcctggagatcccctacatggccgcccatgagagcgatgcccgccgacgcatgatcagcaagcagttccaccaccagctgcgcgtgggcgagcgacagcccctgctgggtccccctgagtccatgcgggaacatgtggtcgctgcctccaaggccatgaagatgggtgactggaagacctgtcacagttttatcatcaatgagaagatgaatgggaaagtgtgggaccttttccccgaggctgacaaagtccgcaccatgctggttaggaagatccaggaagagtcactgaggacctacctcttcacctacagcagtgtctatgactccatcagcatggagacgctgtcagacatgtttgagctggatctgcccactgtgcactccatcatcagcaaaatgatcattaatgaggagctgatggcctccctggaccagccaacacagacagtggtgatgcaccgcactgagcccactgcccagcagaacctggctctgcagctggccgagaagctgggcagcctggtggagaacaacgaacgggtgtttgaccacaagcagggcacctacgggggctacttccgagaccagaaggacggctaccgcaaaaacgagggctacatgcgccgcggtggctaccgccagcagcagtctcagacggcctactgagctctccactctgtttcccgcctgggccatccaaccttgaagtcctaaaccacacctcagtcactaaaggtctgtttaaagttgttctggttgattgcttgttgccacaaaggtgtgttgagcccattcatttgctgattatacttctgagctgctaccacatgacagacacaaggctcagatgaagaggtgaattgaacacgttcctgacctcaaagagcctgctgctttttgacatttaacagaaaattatagtaacataagttataatgggtgt

SEQ ID NO: 458359 - DNA, 3231 bp, Homo sapiens
  misc_feature (2942)..(2942): n is a, c, g, or t
  misc_feature (2946)..(2946): n is a, c, g, or t
ataggctaggtacgaggctggggtgaaatcggccgagggctgtcagggccctgcggtgtgactcgcgggctcagctggtccggccgtagcacctccgcgccgtcgccatgtcgcggtttttcaccaccggttcggacagcgagtccgagtcgtccttgtccggggaggagctcgtcaccaaacctgtcggaggcaactatggcaaacagccattgttgctgagcgaggatgaagaagataccaagagagttgtccgcagtgccaaggacaagaggtttgaggagctgaccaaccttatccggaccatccgtaatgccatgaagattcgtgatgtcaccaagtgcctggaagagtttgagctcctgggaaaagcatatgggaaggccaaaagcattgtggacaaagaaggtgtcccccggttctatatccgcatcctggctgacctagaggactatcttaatgagctttgggaagataaggaagggaagaagaagatgaacaagaacaatgccaaggctctgagcaccttgcgtcagaagatccgaaaatacaaccgtgatttcgagtcccatatcacaagctacaagcagaaccccgagcagtctgcggatgaagatgctgagaaaaatgaggaggattcagaaggctcttcagatgaggatgaggatgaggacggagtcagtgctgcaactttcttgaagaagaaatcagaagctccttctggggagagtcgcaagttcctcaaaaagatggatgatgaagatgaggactcagaagattccgaagatgatgaagactgggacacaggttccacatcttccgattccgactcagaggaggaagaagggaaacaaaccgcgctggcctcaagatttcttaaaaaggcacccaccacagatgaggacaagaaggcagccgagaagaaacgggaggacaaagctaagaagaagcacgacaggaaatccaagcgcctggatgaggaggaggaggacaatgaaggcggggagtgggaaagggtccggggcggagtgccgttggttaaggagaagccaaaaatgtttgccaagggaactgagatcacccatgctgttgttatcaagaaactgaatgagatcctacaggcacgaggcaagaagggaactgatcgtgctgcccagattgagctgctgcaactgctggttcagattgcagcggaaaacaacctgggagagggcgtcattgtcaagatcaagttcaatatcatcgcctctctctatgactacaaccccaacctggcaacctacatgaagccagagatgtgggggaagtgcctggactgcatcaatgagctgatggatatcctgtttgcaaatcccaacatttttgttggagagaatattctggaagagagtgagaacctgcacaacgctgaccagccactgcgtgtccgtggctgcatcctaactctggtggaacgaatggatgaagaatttaccaaaataatgcaaaatactgaccctcactcccaagagtacgtggagcacttgaaggatgaggcccaggtgtgtgccatcatcgagcgtgtgcagcgctacctggaggagaagggcactaccgaggaggtctgccgcatctacctgctgcgcatcctgcacacctactacaagtttgattacaaggcccatcagcgacagctgaccccgcctgagggctcctcaaagtctgagcaagaccaggcagaaaatgagggcgaggactcggctgtgttgatggagagactgtgcaagtacatctacgccaaggaccgcacagaccggatccgcacatgtgccatcctctgccacatctaccaccatgctctgcactcgcgctggtaccaggcccgcgacctcatgctcatgagccacttgcaggacaacattcagcatgcagacccgccagtgcagatcctttacaaccgcaccatggtgcagctgggcatctgtgccttccgccaaggcctgaccaaggacgcacacaacgccctgctggacatccagtcgagtggccgagccaaggagcttctgggccagggcctgctgctgcgcagcctgcaggagcgcaaccaggagcaggagaaggtggagcggcgccgtcaggtccccttccacctgcacatcaacctggagctgctggagtgtgtctacctggtgtctgccatgctcctggagatcccctacatggccgcccatgagagcgatgcccgccgacgcatgatcagcaagcagttccaccaccagctgcgcgtgggcgagcgacagcccctgctgggtccccctgagtccatgcgggaacatgtggtcgctgcctccaaggccatgaagatgggtgactggaagacctgtcacagttttatcatcaatgagaagatgaatgggaaagtgtgggaccttttccccgaggctgacaaagtccgcaccatgctggttaggaagatccaggaagagtcactgaggacctacctcttcacctacagcagtgtctatgactccatcagcatggagacgctgtcagacatgtttgagctggatctgcccactgtgcactccatcatcagcaaaatgatcattaatgaggagctgatggcctccctggaccagccaacacagacagtggtgatgcaccgcactgagcccactgcccagcagaacctggctctgcagctggccgagaagctgggcagcctggtggagaacaacgaacgggtgtttgaccacaagcagggcacctacgggggctacttccgagaccagaaggacggctaccgcaaaaacgagggctacatgcgccgcggtggctaccgccagcagcagtctcagacggcctactgagctctccactctgtttcccgcctgggccatccaaccttgaagtcctaaaccacacctcagtcactaaaggtctgtttaaagtaaaaaaaaaanaaanaaactccagactagttctctctctttctccctcgttgccgaattcggcccgagggacttgttgcaccccgaaagacggactacctggctgtgaaagaggctggtacaggcgtgtccccaagcctgacctgacctgcaccaggctgccctcggacatgaaagggccgcgtggggaaaaggcctgtgccccaggtacccccactaagaggctgaaaatttaccaagcaaggggccaggaccaaagggtcgtaaatggccatgaaggggacccccataaggtcacgac

SEQ ID NO: 458360 - DNA, 3079 bp, Homo sapiens
ataggctaggtacgaggctggggtgaaatcggccgagggctgtcagggccctgcggtgtgactcgcgggctcagctggtccggccgtagcacctccgcgccgtcgccatgtcgcggtttttcaccaccggttcggacagcgagtccgagtcgtccttgtccggggaggagctcgtcaccaaacctgtcggaggcaactatggcaaacagccattgttgctgagcgaggatgaagaagataccaagagagttgtccgcagtgccaaggacaagaggtttgaggagctgaccaaccttatccggaccatccgtaatgccatgaagattcgtgatgtcaccaagtgcctggaagagtttgagctcctgggaaaagcatatgggaaggccaaaagcattgtggacaaagaaggtgtcccccggttctatatccgcatcctggctgacctagaggactatcttaatgagctttgggaagataaggaagggaagaagaagatgaacaagaacaatgccaaggctctgagcaccttgcgtcagaagatccgaaaatacaaccgtgatttcgagtcccatatcacaagctacaagcagaaccccgagcagtctgcggatgaagatgctgagaaaaatgaggaggattcagaaggctcttcagatgaggatgaggatgaggacggagtcagtgctgcaactttcttgaagaagaaatcagaagctccttctggggagagtcgcaagttcctcaaaaagatggatgatgaagatgaggactcagaagattccgaagatgatgaagactgggacacaggttccacatcttccgattccgactcagaggaggaagaagggaaacaaaccgcgctggcctcaagatttcttaaaaaggcacccaccacagatgaggacaagaaggcagccgagaagaaacgggaggacaaagctaagaagaagcacgacaggaaatccaagcgcctggatgaggaggaggaggacaatgaaggcggggagtgggaaagggtccggggcggagtgccgttggttaaggagaagccaaaaatgtttgccaagggaactgagatcacccatgctgttgttatcaagaaactgaatgagatcctacaggcacgaggcaagaagggaactgatcgtgctgcccagattgagctgctgcaactgctggttcagattgcagcggaaaacaacctgggagagggcgtcattgtcaagatcaagttcaatatcatcgcctctctctatgactacaaccccaacctggcaacctacatgaagccagagatgtgggggaagtgcctggactgcatcaatgagctgatggatatcctgtttgcaaatcccaacatttttgttggagagaatattctggaagagagtgagaacctgcacaacgctgaccagccactgcgtgtccgtggctgcatcctaactctggtggaacgaatggatgaagaatttaccaaaataatgcaaaatactgaccctcactcccaagagtacgtggagcacttgaaggatgaggcccaggtgtgtgccatcatcgagcgtgtgcagcgctacctggaggagaagggcactaccgaggaggtctgccgcatctacctgctgcgcatcctgcacacctactacaagtttgattacaaggcccatcagcgacagctgaccccgcctgagggctcctcaaagtctgagcaagaccaggcagaaaatgagggcgaggactcggctgtgttgatggagagactgtgcaagtacatctacgccaaggaccgcacagaccggatccgcacatgtgccatcctctgccacatctaccaccatgctctgcactcgcgctggtaccaggcccgcgacctcatgctcatgagccacttgcaggacaacattcagcatgcagacccgccagtgcagatcctttacaaccgcaccatggtgcagctgggcatctgtgccttccgccaaggcctgaccaaggacgcacacaacgccctgctggacatccagtcgagtggccgagccaaggagcttctgggccagggcctgctgctgcgcagcctgcaggagcgcaaccaggagcaggagaaggtggagcggcgccgtcaggtccccttccacctgcacatcaacctggagctgctggagtgtgtctacctggtgtctgccatgctcctggagatcccctacatggccgcccatgagagcgatgcccgccgacgcatgatcagcaagcagttccaccaccagctgcgcgtgggcgagcgacagcccctgctgggtccccctgagtccatgcgggaacatgtggtcgctgcctccaaggccatgaagatgggtgactggaagacctgtcacagttttatcatcaatgagaagatgaatgggaaagtgtgggaccttttccccgaggctgacaaagtccgcaccatgctggttaggaagatccaggaagagtcactgaggacctacctcttcacctacagcagtgtctatgactccatcagcatggagacgctgtcagacatgtttgagctggatctgcccactgtgcactccatcatcagcaaaatgatcattaatgaggagctgatggcctccctggaccagccaacacagacagtggtgatgcaccgcactgagcccactgcccagcagaacctggctctgcagctggccgagaagctgggcagcctggtggagaacaacgaacgggtgtttgaccacaagcagggcacctacgggggctacttccgagaccagaaggacggctaccgcaaaaacgagggctacatgcgccgcggtggctaccgccagcagcagtctcagacggcctactgagctctccactctgtttcccgcctgggccatccagcctccgcggaaatggccctggttgagaaacactgtactaggtcctatgctaaacattaacatacattgtcagattttgtgctcttatagagtttctcttagagacttataaagttccatgagagcatggtccttgatgatgtctctcactatggactatcagagcttctcagttcctaggccattcaacgcctccg

SEQ ID NO: 458361 - DNA, 3224 bp, Homo sapiens
ataggctaggtacgaggctggggtgaaatcggccgagggctgtcagggccctgcggtgtgactcgcgggctcagctggtccggccgtagcacctccgcgccgtcgccatgtcgcggtttttcaccaccggttcggacagcgagtccgagtcgtccttgtccggggaggagctcgtcaccaaacctgtcggaggcaactatggcaaacagccattgttgctgagcgaggatgaagaagataccaagagagttgtccgcagtgccaaggacaagaggtttgaggagctgaccaaccttatccggaccatccgtaatgccatgaagattcgtgatgtcaccaagtgcctggaagagtttgagctcctgggaaaagcatatgggaaggccaaaagcattgtggacaaagaaggtgtcccccggttctatatccgcatcctggctgacctagaggactatcttaatgagctttgggaagataaggaagggaagaagaagatgaacaagaacaatgccaaggctctgagcaccttgcgtcagaagatccgaaaatacaaccgtgatttcgagtcccatatcacaagctacaagcagaaccccgagcagtctgcggatgaagatgctgagaaaaatgaggaggattcagaaggctcttcagatgaggatgaggatgaggacggagtcagtgctgcaactttcttgaagaagaaatcagaagctccttctggggagagtcgcaagttcctcaaaaagatggatgatgaagatgaggactcagaagattccgaagatgatgaagactgggacacaggttccacatcttccgattccgactcagaggaggaagaagggaaacaaaccgcgctggcctcaagatttcttaaaaaggcacccaccacagatgaggacaagaaggcagccgagaagaaacgggaggacaaagctaagaagaagcacgacaggaaatccaagcgcctggatgaggaggaggaggacaatgaaggcggggagtgggaaagggtccggggcggagtgccgttggttaaggagaagccaaaaatgtttgccaagggaactgagatcacccatgctgttgttatcaagaaactgaatgagatcctacaggcacgaggcaagaagggaactgatcgtgctgcccagattgagctgctgcaactgctggttcagattgcagcggaaaacaacctgggagagggcgtcattgtcaagatcaagttcaatatcatcgcctctctctatgactacaaccccaacctggcaacctacatgaagccagagatgtgggggaagtgcctggactgcatcaatgagctgatggatatcctgtttgcaaatcccaacatttttgttggagagaatattctggaagagagtgagaacctgcacaacgctgaccagccactgcgtgtccgtggctgcatcctaactctggtggaacgaatggatgaagaatttaccaaaataatgcaaaatactgaccctcactcccaagagtacgtggagcacttgaaggatgaggcccaggtgtgtgccatcatcgagcgtgtgcagcgctacctggaggagaagggcactaccgaggaggtctgccgcatctacctgctgcgcatcctgcacacctactacaagtttgattacaaggcccatcagcgacagctgaccccgcctgagggctcctcaaagtctgagcaagaccaggcagaaaatgagggcgaggactcggctgtgttgatggagagactgtgcaagtacatctacgccaaggaccgcacagaccggatccgcacatgtgccatcctctgccacatctaccaccatgctctgcactcgcgctggtaccaggcccgcgacctcatgctcatgagccacttgcaggacaacattcagcatgcagacccgccagtgcagatcctttacaaccgcaccatggtgcagctgggcatctgtgccttccgccaaggcctgaccaaggacgcacacaacgccctgctggacatccagtcgagtggccgagccaaggagcttctgggccagggcctgctgctgcgcagcctgcaggagcgcaaccaggagcaggagaaggtggagcggcgccgtcaggtccccttccacctgcacatcaacctggagctgctggagtgtgtctacctggtgtctgccatgctcctggagatcccctacatggccgcccatgagagcgatgcccgccgacgcatgatcagcaagcagttccaccaccagctgcgcgtgggcgagcgacagcccctgctgggtccccctgagtccatgcgggaacatgtggtcgctgcctccaaggccatgaagatgggtgactggaagacctgtcacagttttatcatcaatgagaagatgaatgggaaagtgtgggaccttttccccgaggctgacaaagtccgcaccatgctggttaggtgagcagacagagaggccgtgatgggtcggggaagaagagactggttggtccccttccctgaggccctgttgtgtcttctgtcccctcttcccacaggaagatccaggaagagtcactgaggacctacctcttcacctacagcagtgtctatgactccatcagcatggagacgctgtcagacatgtttgagctggatctgcccactgtgcactccatcatcagcaaaatgatcattaatgaggagctgatggcctccctggaccagccaacacagacagtggtgatgcaccgcactgagcccactgcccagcagaacctggctctgcagctggccgagaagctgggcagcctggtggagaacaacgaacgggtgtttgaccacaagcagggcacctacgggggctacttccgagaccagaaggacggctaccgcaaaaacgagggctacatgcgccgcggtggctaccgccagcagcagtctcagacggcctactgagctctccactctgtttcccgcctgggccatccaaccttgaagtcctaaaccacacctcagtcactaaaggtctgtttaaagttgttctggttgattgcttgttgccacaaaggtgtgttgagcccattcatttgctgattatacttctgagctgctaccacatgacagacacaaggctcagatgaagaggtgaattgaacacgttcctgacctcaaagagcctgctgctttttgacatttaacagaaaattatagtaacataagttataatgggtgt

SEQ ID NO: 458362 - DNA, 3221 bp, Homo sapiens
ataggctaggtacgaggctggggtgaaatcggccgagggctgtcagggccctgcggtgtgactcgcgggctcagctggtccggccgtagcacctccgcgccgtcgccatgtcgcggtttttcaccaccggttcggacagcgagtccgagtcgtccttgtccggggaggagctcgtcaccaaacctgtcggaggcaactatggcaaacagccattgttgctgagcgaggatgaagaagataccaagagagttgtccgcagtgccaaggacaagaggtttgaggagctgaccaaccttatccggaccatccgtaatgccatgaagattcgtgatgtcaccaagtgcctggaagagtttgagctcctgggaaaagcatatgggaaggccaaaagcattgtggacaaagaaggtgtcccccggttctatatccgcatcctggctgacctagaggactatcttaatgagctttgggaagataaggaagggaagaagaagatgaacaagaacaatgccaaggctctgagcaccttgcgtcagaagatccgaaaatacaaccgtgatttcgagtcccatatcacaagctacaagcagaaccccgagcagtctgcggatgaagatgctgagaaaaatgaggaggattcagaaggctcttcagatgaggatgaggatgaggacggagtcagtgctgcaactttcttgaagaagaaatcagaagctccttctggggagagtcgcaagttcctcaaaaagatggatgatgaagatgaggactcagaagattccgaagatgatgaagactgggacacaggttccacatcttccgattccgactcagaggaggaagaagggaaacaaaccgcgctggcctcaagatttcttaaaaaggcacccaccacagatgaggacaagaaggcagccgagaagaaacgggaggacaaagctaagaagaagcacgacaggaaatccaagcgcctggatgaggaggaggaggacaatgaaggcggggagtgggaaagggtccggggcggagtgccgttggttaaggagaagccaaaaatgtttgccaagggaactgagatcacccatgctgttgttatcaagaaactgaatgagatcctacaggcacgaggcaagaagggaactgatcgtgctgcccagattgagctgctgcaactgctggttcagattgcagcggaaaacaacctgggagagggcgtcattgtcaagatcaagttcaatatcatcgcctctctctatgactacaaccccaacctggcaacctacatgaagccagagatgtgggggaagtgcctggactgcatcaatgagctgatggatatcctgtttgcaaatcccaacatttttgttggagagaatattctggaagagagtgagaacctgcacaacgctgaccagccactgcgtgtccgtggctgcatcctaactctggtggaacgaatggatgaagaatttaccaaaataatgcaaaatactgaccctcactcccaagagtacgtggagcacttgaaggatgaggcccaggtgtgtgccatcatcgagcgtgtgcagcgctacctggaggagaagggcactaccgaggaggtctgccgcatctacctgctgcgcatcctgcacacctactacaagtttgattacaaggcccatcagcgacagctgaccccgcctgagggctcctcaaagtctgagcaagaccaggcagaaaatgagggcgaggactcggctgtgttgatggagagactgtgcaagtacatctacgccaaggaccgcacagaccggatccgcacatgtgccatcctctgccacatctaccaccatgctctgcactcgcgctggtaccaggcccgcgacctcatgctcatgagccacttgcaggacaacattcagcatgcagacccgccagtgcagatcctttacaaccgcaccatggtgcagctgggcatctgtgccttccgccaaggcctgaccaaggacgcacacaacgccctgctggacatccagtcgagtggccgagccaaggagcttctgggccagggcctgctgctgcgcagcctgcaggagcgcaaccaggagcaggagaaggtggagcggcgccgtcaggtccccttccacctgcacatcaacctggagctgctggagtgtgtctacctggtgtctgccatgctcctggagatcccctacatggccgcccatgagagcgatgcccgccgacgcatgatcagcaagcagttccaccaccagctgcgcgtgggcgagcgacagcccctgctgggtccccctgagtccatgcgggaacatgtggtcgctgcctccaaggccatgaagatgggtgactggaagacctgtcacagttttatcatcaatgagaagatgaatgggaaagtgtgggaccttttccccgaggctgacaaagtccgcaccatgctggttaggaagatccaggaagagtcactgaggacctacctcttcacctacagcagtgtctatgactccatcagcatggagacgctgtcagacatgtttgagctggatctgcccactgtgcactccatcatcagcaaaatgatcattaatgaggagctgatggcctccctggaccagccaacacagacagtggtgatgcaccgcactgagcccactgcccagcagaacctggctctgcagctggccgagaagctgggcagcctggtggagaacaacgaacgggtgtttgaccacaagcagggcacctacgggggctacttccgaggtgagtacttcggctcctctccttgcccactcctggtgccctcaccgcctctcacctggcattccctgcccttccttcccatctctctcctacagaccagaaggacggctaccgcaaaaacgagggctacatgcgccgcggtggctaccgccagcagcagtctcagacggcctactgagctctccactctgtttcccgcctgggccatccaaccttgaagtcctaaaccacacctcagtcactaaaggtctgtttaaagttgttctggttgattgcttgttgccacaaaggtgtgttgagcccattcatttgctgattatacttctgagctgctaccacatgacagacacaaggctcagatgaagaggtgaattgaacacgttcctgacctcaaagagcctgctgctttttgacatttaacagaaaattatagtaacataagttataatgggtgt

SEQ ID NO: 458363 - DNA, 2802 bp, Homo sapiens
  misc_feature (2697)..(2697): n is a, c, g, or t
  misc_feature (2704)..(2704): n is a, c, g, or t
ataggctaggtacgaggctggggtgaaatcggccgagggctgtcagggccctgcggtgtgactcgcgggctcagctggtccggccgtagcacctccgcgccgtcgccatgtcgcggtttttcaccaccggttcggacagcgagtccgagtcgtccttgtccggggaggagctcgtcaccaaacctgtcggaggcaactatggcaaacagccattgttgctgagcgaggatgaagaagataccaagagagttgtccgcagtgccaaggacaagaggtttgaggagctgaccaaccttatccggaccatccgtaatgccatgaagattcgtgatgtcaccaagtgcctggaagagtttgagctcctgggaaaagcatatgggaaggccaaaagcattgtggacaaagaaggtgtcccccggttctatatccgcatcctggctgacctagaggactatcttaatgagctttgggaagataaggaagggaagaagaagatgaacaagaacaatgccaaggctctgagcaccttgcgtcagaagatccgaaaatacaaccgtgatttcgagtcccatatcacaagctacaagcagaaccccgagcagtctgcggatgaagatgctgagaaaaatgaggaggattcagaaggctcttcagatgaggatgaggatgaggacggagtcagtgctgcaactttcttgaagaagaaatcagaagctccttctggggagagtcgcaagttcctcaaaaagatggatgatgaagatgaggactcagaagattccgaagatgatgaagactgggacacaggttccacatcttccgattccgactcagaggaggaagaagggaaacaaaccgcgctggcctcaagatttcttaaaaaggcacccaccacagatgaggacaagaaggcagccgagaagaaacgggaggacaaagctaagaagaagcacgacaggaaatccaagcgcctggatgaggaggaggaggacaatgaaggcggggagtgggaaagggtccggggcggagtgccgttggttaaggagaagccaaaaatgtttgccaagggaactgagatcacccatgctgttgttatcaagaaactgaatgagatcctacaggcacgaggcaagaagggaactgatcgtgctgcccagattgagctgctgcaactgctggttcagattgcagcggaaaacaacctgggagagggcgtcattgtcaagatcaagttcaatatcatcgcctctctctatgactacaaccccaacctggcaacctacatgaagccagagatgtgggggaagtgcctggactgcatcaatgagctgatggatatcctgtttgcaaatcccaacatttttgttggagagaatattctggaagagagtgagaacctgcacaacgctgaccagccactgcgtgtccgtggctgcatcctaactctggtggaacgaatggatgaagaatttaccaaaataatgcaaaatactgaccctcactcccaagagtacgtggagcacttgaaggatgaggcccaggtgtgtgccatcatcgagcgtgtgcagcgctacctggaggagaagggcactaccgaggaggtctgccgcatctacctgctgcgcatcctgcacacctactacaagtttgattacaaggcccatcagcgacagctgaccccgcctgagggctcctcaaagtctgagcaagaccaggcagaaaatgagggcgaggactcggctgtgttgatggagagactgtgcaagtacatctacgccaaggaccgcacagaccggatccgcacatgtgccatcctctgccacatctaccaccatgctctgcactcgcgctggtaccaggcccgcgacctcatgctcatgagccacttgcaggacaacattcagcatgcagacccgccagtgcagatcctttacaaccgcaccatggtgcagctgggcatctgtgccttccgccaaggcctgaccaaggacgcacacaacgccctgctggacatccagtcgagtggccgagccaaggagcttctgggccagggcctgctgctgcgcagcctgcaggagcgcaaccaggagcaggagaaggtggagcggcgccgtcaggtccccttccacctgcacatcaacctggagctgctggagtgtgtctacctggtgtctgccatgctcctggagatcccctacatggccgcccatgagagcgatgcccgccgacgcatgatcagcaagcagttccaccaccagctgcgcgtgggcgagcgacagcccctgctgggtccccctgagtccatgcgggaacatgtggtcgctgcctccaaggccatgaagatgggtgactggaagacctgtcacagttttatcatcaatgagaagatgaatgggaaagtgtgggaccttttccccgaggctgacaaagtccgcaccatgctggttaggaagatccaggaagagtcactgaggacctacctcttcacctacagcagtgtctatgactccatcagcatggagacgctgtcagacatgtttgagctggatctgcccactgtgcactccatcatcagcaaaatgatcattaatgaggagctgatggcctccctggaccagccaacacagacagtggtgatgcaccgcactgagcccactgcccagcttggccgaaactggcgccggtgggaaccccgcngggtgtngccccgcggccccggggctcccgcccgggggtcccgacggcctcccgggtcccaattcaccacagcccctccggcactgtccccttcgtttgtaaccc

SEQ ID NO: 458364 - DNA, 2737 bp, Homo sapiens
ataggctaggtacgaggctggggtgaaatcggccgagggctgtcagggccctgcggtgtgactcgcgggctcagctggtccggccgtagcacctccgcgccgtcgccatgtcgcggtttttcaccaccggttcggacagcgagtccgagtcgtccttgtccggggaggagctcgtcaccaaacctgtcggaggcaactatggcaaacagccattgttgctgagcgaggatgaagaagataccaagagagttgtccgcagtgccaaggacaagaggtttgaggagctgaccaaccttatccggaccatccgtaatgccatgaagattcgtgatgtcaccaagtgcctggaagagtttgagctcctgggaaaagcatatgggaaggccaaaagcattgtggacaaagaaggtgtcccccggttctatatccgcatcctggctgacctagaggactatcttaatgagctttgggaagataaggaagggaagaagaagatgaacaagaacaatgccaaggctctgagcaccttgcgtcagaagatccgaaaatacaaccgtgatttcgagtcccatatcacaagctacaagcagaaccccgagcagtctgcggatgaagatgctgagaaaaatgaggaggattcagaaggctcttcagatgaggatgaggatgaggacggagtcagtgctgcaactttcttgaagaagaaatcagaagctccttctggggagagtcgcaagttcctcaaaaagatggatgatgaagatgaggactcagaagattccgaagatgatgaagactgggacacaggttccacatcttccgattccgactcagaggaggaagaagggaaacaaaccgcgctggcctcaagatttcttaaaaaggcacccaccacagatgaggacaagaaggcagccgagaagaaacgggaggacaaagctaagaagaagcacgacaggaaatccaagcgcctggatgaggaggaggaggacaatgaaggcggggagtgggaaagggtccggggcggagtgccgttggttaaggagaagccaaaaatgtttgccaagggaactgagatcacccatgctgttgttatcaagaaactgaatgagatcctacaggcacgaggcaagaagggaactgatcgtgctgcccagattgagctgctgcaactgctggttcagattgcagcggaaaacaacctgggagagggcgtcattgtcaagatcaagttcaatatcatcgcctctctctatgactacaaccccaacctggcaacctacatgaagccagagatgtgggggaagtgcctggactgcatcaatgagctgatggatatcctgtttgcaaatcccaacatttttgttggagagaatattctggaagagagtgagaacctgcacaacgctgaccagccactgcgtgtccgtggctgcatcctaactctggtggaacgaatggatgaagaatttaccaaaataatgcaaaatactgaccctcactcccaagagtacgtggagcacttgaaggatgaggcccaggtgtgtgccatcatcgagcgtgtgcagcgctacctggaggagaagggcactaccgaggaggtctgccgcatctacctgctgcgcatcctgcacacctactacaagtttgattacaaggcccatcagcgacagctgaccccgcctgagggctcctcaaagtctgagcaagaccaggcagaaaatgagggcgaggactcggctgtgttgatggagagactgtgcaagtacatctacgccaaggaccgcacagaccggatccgcacatgtgccatcctctgccacatctaccaccatgctctgcactcgcgctggtaccaggcccgcgacctcatgctcatgagccacttgcaggacaacattcagcatgcagacccgccagtgcagatcctttacaaccgcaccatggtgcagctgggcatctgtgccttccgccaaggcctgaccaaggacgcacacaacgccctgctggacatccagtcgagtggccgagccaaggagcttctgggccagggcctgctgctgcgcagcctgcaggagcgcaaccaggagcaggagaaggtggagcggcgccgtcaggtccccttccacctgcacatcaacctggagctgctggagtgtgtctacctggtgtctgccatgctcctggagatcccctacatggccgcccatgagagcgatgcccgccgacgcatgatcagcaagcagttccaccaccagctgcgcgtgggcgagcgacagcccctgctgggtccccctgagtccatgcgggaacatgtggtcgctgcctccaaggccatgaagatgggtgactggaagacctgtcacagttttatcatcaatgagaagatgaatgggaaagtgtgggaccttttccccgaggctgacaaagtccgcaccatgctggttaggaagatccaggaagagtcactgaggacctacctcttcacctacagcagtgtctatgactccatcagcatggagacgctgtcagacatgtttgagctggatctgcccactgtgcactccatcatcagcaaaatgatcattaatgaggagctgatggcctccctggaccagccaacacagacagtggtgatgcaccgcactgagcccactgcccagctctgtttcccgcctgggccatccaaccttgaagtcctaaaccacacctcagtcactaaaggtctgtttaaagt

SEQ ID NO: 458365 - DNA, 2542 bp, Homo sapiens
cggacgcgtgggtcgacccacgtcgtcgagatgctgagaaaaatgaggaggattcagtaaggctcttcagatgaggatgaggatgaggacggagtcagtgctgcaactttcttgaagaagaaatcagaagctccttctggggagagtcgcaagttcctcaaaaagatggatgatgaagatgaggactcagaagattccgaagatgatgaagactgggacacaggttccacatcttccgattccgactcagaggaggaagaagggaaacaaaccgcgctggcctcaagatttcttaaaaaggcacccaccacagatgaggacaagaaggcagccgagaagaaacgggaggacaaagctaagaagaagcacgacaggaaatccaagcgcctggatgaggaggaggaggacaatgaaggcggggagtgggaaagggtccggggcggagtgccgttggttaaggagaagccaaaaatgtttgccaagggaactgagatcacccatgctgttgttatcaagaaactgaatgagatcctacaggcacgaggcaagaagggaactgatcgtgctgcccagattgagctgctgcaactgctggttcagattgcagcggaaaacaacctgggagagggcgtcattgtcaagatcaagttcaatatcatcgcctctctctatgactacaaccccaacctggcaacctacatgaagccagagatgtgggggaagtgcctggactgcatcaatgagctgatggatatcctgtttgcaaatcccaacatttttgttggagagaatattctggaagagagtgagaacctgcacaacgctgaccagccactgcgtgtccgtggctgcatcctaactctggtggaacgaatggatgaagaatttaccaaaataatgcaaaatactgaccctcactcccaagagtacgtggagcacttgaaggatgaggcccaggtgtgtgccatcatcgagcgtgtgcagcgctacctggaggagaagggcactaccgaggaggtctgccgcatctacctgctgcgcatcctgcacacctactacaagtttgattacaaggcccatcagcgacagctgaccccgcctgagggctcctcaaagtctgagcaagaccaggcagaaaatgagggcgaggactcggctgtgttgatggagagactgtgcaagtacatctacgccaaggaccgcacagaccggatccgcacatgtgccatcctctgccacatctaccaccatgctctgcactcgcgctggtaccaggcccgcgacctcatgctcatgagccacttgcaggacaacattcagcatgcagacccgccagtgcagatcctttacaaccgcaccatggtgcagctgggcatctgtgccttccgccaaggcctgaccaaggacgcacacaacgccctgctggacatccagtcgagtggccgagccaaggagcttctgggccagggcctgctgctgcgcagcctgcaggagcgcaaccaggagcaggagaaggtggagcggcgccgtcaggtccccttccacctgcacatcaacctggagctgctggagtgtgtctacctggtgtctgccatgctcctggagatcccctacatggccgcccatgagagcgatgcccgccgacgcatgatcagcaagcagttccaccaccagctgcgcgtgggcgagcgacagcccctgctgggtccccctgagtccatgcgggaacatgtggtcgctgcctccaaggccatgaagatgggtgactggaagacctgtcacagttttatcatcaatgagaagatgaatgggaaagtgtgggaccttttccccgaggctgacaaagtccgcaccatgctggttaggaagatccaggaagagtcactgaggacctacctcttcacctacagcagtgtctatgactccatcagcatggagacgctgtcagacatgtttgagctggatctgcccactgtgcactccatcatcagcaaaatgatcattaatgaggagctgatggcctccctggaccagccaacacagacagtggtgatgcaccgcactgagcccactgcccagcagaacctggctctgcagctggccgagaagctgggcagcctggtggagaacaacgaacgggtgtttgaccacaagcagggcacctacgggggctacttccgagaccagaaggacggctaccgcaaaaacgagggctacatgcgccgcggtggctaccgccagcagcagtctcagacggcctactgagctctccactctgtttcccgcctgggccatccaaccttgaagtcctaaaccacacctcagtcactaaaggtctgtttaaagttgttctggttgattgcttgttgccacaaaggtgtgttgagcccattcatttgctgattatacttctgagctgctaccacatgacagacacaaggctcagatgaagaggtgaattgaacacgttcctgacctcaaagagcctgctgctttttgacatttaacagaaaattatagtaacataagttataatgggtgt

SEQ ID NO: 458366 - DNA, 3072 bp, Homo sapiens
ataggctaggtacgaggctggggtgaaatcggccgagggctgtcagggccctgcggtgtgactcgcgggctcagctggtccggccgtagcacctccgcgccgtcgccatgtcgcggtttttcaccaccggttcggacagcgagtccgagtcgtccttgtccggggaggagctcgtcaccaaacctgtcggaggcaactatggcaaacagccattgttgctgagcgaggatgaagaagataccaagagagttgtccgcagtgccaaggacaagaggtttgaggagctgaccaaccttatccggaccatccgtaatgccatgaagattcgtgatgtcaccaagtgcctggaagagtttgagctcctgggaaaagcatatgggaaggccaaaagcattgtggacaaagaaggtgtcccccggttctatatccgcatcctggctgacctagaggactatcttaatgagctttgggaagataaggaagggaagaagaagatgaacaagaacaatgccaaggctctgagcaccttgcgtcagaagatccgaaaatacaaccgtgatttcgagtcccatatcacaagctacaagcagaaccccgagcagtctgcggatgaagatgctgagaaaaatgaggaggattcagaaggctcttcagatgaggatgaggatgaggacggagtcagtgctgcaactttcttgaagaagaaatcagaagctccttctggggagagtcgcaagttcctcaaaaagatggatgatgaagatgaggactcagaagattccgaagatgatgaagactgggacacaggttccacatcttccgattccgactcagaggaggaagaagggaaacaaaccgcgctggcctcaagatttcttaaaaaggcacccaccacagatgaggacaagaaggcagccgagaagaaacgggaggacaaagctaagaagaagcacgacaggaaatccaagcgcctggatgaggaggaggaggacaatgaaggcggggagtgggaaagggtccggggcggagtgccgttggttaaggagaagccaaaaatgtttgccaagggaactgagatcacccatgctgttgttatcaagaaactgaatgagatcctacaggcacgaggcaagaagggaactgatcgtgctgcccagattgagctgctgcaactgctggttcagattgcagcggaaaacaacctgggagagggcgtcattgtcaagatcaagttcaatatcatcgcctctctctatgactacaaccccaacctggcaacctacatgaagccagagatgtgggggaagtgcctggactgcatcaatgagctgatggatatcctgtttgcaaatcccaacatttttgttggagagaatattctggaagagagtgagaacctgcacaacgctgaccagccactgcgtgtccgtggctgcatcctaactctggtggaacgaatggatgaagaatttaccgatgaggcccaggtgtgtgccatcatcgagcgtgtgcagcgctacctggaggagaagggcactaccgaggaggtctgccgcatctacctgctgcgcatcctgcacacctactacaagtttgattacaaggcccatcagcgacagctgaccccgcctgagggctcctcaaagtctgagcaagaccaggcagaaaatgagggcgaggactcggctgtgttgatggagagactgtgcaagtacatctacgccaaggaccgcacagaccggatccgcacatgtgccatcctctgccacatctaccaccatgctctgcactcgcgctggtaccaggcccgcgacctcatgctcatgagccacttgcaggacaacattcagcatgcagacccgccagtgcagatcctttacaaccgcaccatggtgcagctgggcatctgtgccttccgccaaggcctgaccaaggacgcacacaacgccctgctggacatccagtcgagtggccgagccaaggagcttctgggccagggcctgctgctgcgcagcctgcaggagcgcaaccaggagcaggagaaggtggagcggcgccgtcaggtccccttccacctgcacatcaacctggagctgctggagtgtgtctacctggtgtctgccatgctcctggagatcccctacatggccgcccatgagagcgatgcccgccgacgcatgatcagcaagcagttccaccaccagctgcgcgtgggcgagcgacagcccctgctgggtccccctgagtccatgcgggaacatgtggtcgctgcctccaaggccatgaagatgggtgactggaagacctgtcacagttttatcatcaatgagaagatgaatgggaaagtgtgggaccttttccccgaggctgacaaagtccgcaccatgctggttaggaagatccaggaagagtcactgaggacctacctcttcacctacagcagtgtctatgactccatcagcatggagacgctgtcagacatgtttgagctggatctgcccactgtgcactccatcatcagcaaaatgatcattaatgaggagctgatggcctccctggaccagccaacacagacagtggtgatgcaccgcactgagcccactgcccagcagaacctggctctgcagctggccgagaagctgggcagcctggtggagaacaacgaacgggtgtttgaccacaagcagggcacctacgggggctacttccgagaccagaaggacggctaccgcaaaaacgagggctacatgcgccgcggtggctaccgccagcagcagtctcagacggcctactgagctctccactctgtttcccgcctgggccatccaaccttgaagtcctaaaccacacctcagtcactaaaggtctgtttaaagttgttctggttgattgcttgttgccacaaaggtgtgttgagcccattcatttgctgattatacttctgagctgctaccacatgacagacacaaggctcagatgaagaggtgaattgaacacgttcctgacctcaaagagcctgctgctttttgacatttaacagaaaattatagtaacataagttataatgggtgt

SEQ ID NO: 458367 - DNA, 2620 bp, Homo sapiens
ataggctaggtacgaggctggggtgaaatcggccgagggctgtcagggccctgcggtgtgactcgcgggctcagctggtccggccgtagcacctccgcgccgtcgccatgtcgcggtttttcaccaccggttcggacagcgagtccgagtcgtccttgtccggggaggagctcgtcaccaaacctgtcggaggcaactatggcaaacagccattgttgctgagcgaggatgaagaagataccaagagagttgtccgcagtgccaaggacaagaggtttgaggagctgaccaaccttatccggaccatccgtaatgccatgaagattcgtgatgtcaccaagtgcctggaagagtttgagctcctgggaaaagcatatgggaaggccaaaagcattgtggacaaagaaggtgtcccccggttctatatccgcatcctggctgacctagaggactatcttaatgagctttgggaagataaggaagggaagaagaagatgaacaagaacaatgccaaggctctgagcaccttgcgtcagaagatccgaaaatacaaccgtgatttcgagtcccatatcacaagctacaagcagaaccccgagcagtctgcggatgaagatgctgagaaaaatgaggaggattcagaaggctcttcagatgaggatgaggatgaggacggagtcagtgctgcaactttcttgaagaagaaatcagaagctccttctggggagagtcgcaagttcctcaaaaagatggatgatgaagatgaggactcagaagattccgaagatgatgaagactgggacacaggttccacatcttccgattccgactcagaggaggaagaagggaaacaaaccgcgctggcctcaagatttcttaaaaaggcacccaccacagatgaggacaagaaggcagccgagaagaaacgggaggacaaagctaagaagaagcacgacaggaaatccaagcgcctggatgaggaggaggaggacaatgaaggcggggagtgggaaagggtccggggcggagtgccgttggttaaggagaagccaaaaatgtttgccaagggaactgagatcacccatgctgttgttatcaagaaactgaatgagatcctacaggcacgaggcaagaagggaactgatcgtgctgcccagattgagctgctgcaactgctggttcagattgcagcggaaaacaacctgggagagggcgtcattgtcaagatcaagttcaatatcatcgcctctctctatgactacaaccccaacctggcaacctacatgaagccagagatgtgggggaagtgcctggactgcatcaatgagctgatggatatcctgtttgcaaatcccaacatttttgttggagagaatattctggaagagagtgagaacctgcacaacgctgaccagccactgcgtgtccgtggctgcatcctaactctggtggaacgaatggatgaagaatttaccaaaataatgcaaaatactgaccctcactcccaagagtacgtggagcacttgaaggatgaggcccaggtgtgtgccatcatcgagcgtgtgcagcgctacctggaggagaagggcactaccgaggaggtctgccgcatctacctgctgcgcatcctgcacacctactacaagtttgattacaaggcccatcagcgacagctgaccccgcctgagggctcctcaaagtctgagcaagaccaggcagaaaatgagggcgaggactcggctgtgttgatggagagactgtgcaagtacatctacgccaaggaccgcacagaccggatccgcacatgtgccatcctctgccacatctaccaccatgctctgcactcgcgctggtaccaggcccgcgacctcatgctcatgagccacttgcaggacaacattcagcatgcagacccgccagtgcagatcctttacaaccgcaccatggtgcagctgggcatctgtgccttccgccaaggcctgaccaaggacgcacacaacgccctgctggacatccagtcgagtggccgagccaaggagcttctgggccagggcctgctgctgcgcagcctgcaggagcgcaaccaggagcaggagaaggtggagcggcgccgtcaggtccccttccacctgcacatcaacctggagctgctggagtgtgtctacctggtgtctgccatgctcctggagatcccctacatggccgcccatgagagcgatgcccgccgacgcatgatcagcaagcagttccaccaccagctgcgcgtgggcgagcgacagcccctgctgggtccccctgagtccatgcgggaacatgtggtcgctgcctccaaggccatgaagatgggtgactggaagacctgtcacagttttatcatcaatgagaagatgaatgggaaagtgtgggaccttttccccgaggctgacaaagtccgcaccatgctggttaggaagatccaggaagagtcactgaggacctacctcttcacctacagcagtgtctatgactccatcagcatggagacgctgtcagacatgtttgagctggatctgcccactgtgcctggcgcctccagggtaccggtcgatctacgcttctgtttttttataaaagaaaaaaa

SEQ ID NO: 458368 - DNA, 2420 bp, Homo sapiens
ataggctaggtacgaggctggggtgaaatcggccgagggctgtcagggcgatgaagatgaggactcagaagattccgaagatgatgaagactgggacacaggttccacatcttccgattccgactcagaggaggaagaagggaaacaaaccgcgctggcctcaagatttcttaaaaaggcacccaccacagatgaggacaagaaggcagccgagaagaaacgggaggacaaagctaagaagaagcacgacaggaaatccaagcgcctggatgaggaggaggaggacaatgaaggcggggagtgggaaagggtccggggcggagtgccgttggttaaggagaagccaaaaatgtttgccaagggaactgagatcacccatgctgttgttatcaagaaactgaatgagatcctacaggcacgaggcaagaagggaactgatcgtgctgcccagattgagctgctgcaactgctggttcagattgcagcggaaaacaacctgggagagggcgtcattgtcaagatcaagttcaatatcatcgcctctctctatgactacaaccccaacctggcaacctacatgaagccagagatgtgggggaagtgcctggactgcatcaatgagctgatggatatcctgtttgcaaatcccaacatttttgttggagagaatattctggaagagagtgagaacctgcacaacgctgaccagccactgcgtgtccgtggctgcatcctaactctggtggaacgaatggatgaagaatttaccaaaataatgcaaaatactgaccctcactcccaagagtacgtggagcacttgaaggatgaggcccaggtgtgtgccatcatcgagcgtgtgcagcgctacctggaggagaagggcactaccgaggaggtctgccgcatctacctgctgcgcatcctgcacacctactacaagtttgattacaaggcccatcagcgacagctgaccccgcctgagggctcctcaaagtctgagcaagaccaggcagaaaatgagggcgaggactcggctgtgttgatggagagactgtgcaagtacatctacgccaaggaccgcacagaccggatccgcacatgtgccatcctctgccacatctaccaccatgctctgcactcgcgctggtaccaggcccgcgacctcatgctcatgagccacttgcaggacaacattcagcatgcagacccgccagtgcagatcctttacaaccgcaccatggtgcagctgggcatctgtgccttccgccaaggcctgaccaaggacgcacacaacgccctgctggacatccagtcgagtggccgagccaaggagcttctgggccagggcctgctgctgcgcagcctgcaggagcgcaaccaggagcaggagaaggtggagcggcgccgtcaggtccccttccacctgcacatcaacctggagctgctggagtgtgtctacctggtgtctgccatgctcctggagatcccctacatggccgcccatgagagcgatgcccgccgacgcatgatcagcaagcagttccaccaccagctgcgcgtgggcgagcgacagcccctgctgggtccccctgagtccatgcgggaacatgtggtcgctgcctccaaggccatgaagatgggtgactggaagacctgtcacagttttatcatcaatgagaagatgaatgggaaagtgtgggaccttttccccgaggctgacaaagtccgcaccatgctggttaggaagatccaggaagagtcactgaggacctacctcttcacctacagcagtgtctatgactccatcagcatggagacgctgtcagacatgtttgagctggatctgcccactgtgcactccatcatcagcaaaatgatcattaatgaggagctgatggcctccctggaccagccaacacagacagtggtgatgcaccgcactgagcccactgcccagcagaacctggctctgcagctggccgagaagctgggcagcctggtggagaacaacgaacgggtgtttgaccacaagcagggcacctacgggggctacttccgagaccagaaggacggctaccgcaaaaacgagggctacatgcgccgcggtggctaccgccagcagcagtctcagacggcctactgagctctccactctgtttcccgcctgggccatccaaccttgaagtcctaaaccacacctcagtcactaaaggtctgtttaaagttgttctggttgattgcttgttgccacaaaggtgtgttgagcccattcatttgctgattatacttctgagctgctaccacatgacagacacaaggctcagatgaagaggtgaattgaacacgttcctgacctcaaagagcctgctgctttttgacatttaacagaaaattatagtaacataagttataatgggtgt

SEQ ID NO: 458369 - DNA, 2590 bp, Homo sapiens
ataggctaggtacgaggctggggtgaaatcggccgagggctgtcagggccctgcggtgtgactcgcgggctcagctggtccggccgtagcacctccgcgccgtcgccatgtcgcggtttttcaccaccggttcggacagcgagtccgagtcgtccttgtccggggaggagctcgtcaccaaacctgtcggaggcaactatggcaaacagccattgttgctgagcgaggatgaagaagataccaagagagttgtccgcagtgccaaggacaagaggtttgaggagctgaccaaccttatccggaccatccgtaatgccatgaagattcgtgatgtcaccaagtgcctggaagagtttgagctcctgggaaaagcatatgggaaggccaaaagcattgtggacaaagaaggtgtcccccggttctatatccgcatcctggctgacctagaggactatcttaatgagctttgggaagataaggaagggaagaagaagatgaacaagaacaatgccaaggctctgagcaccttgcgtcagaagatccgaaaatacaaccgtgatttcgagtcccatatcacaagctacaagcagaaccccgagcagtctgcggatgaagatgctgagaaaaatgaggaggattcagaaggctcttcagatgaggatgaggatgaggacggagtcagtgctgcaactttcttgaagaagaaatcagaagctccttctggggagagtcgcaagttcctcaaaaagatggatgatgaagatgaggactcagaagattccgaagatgatgaagactgggacacaggttccacatcttccgattccgactcagaggaggaagaagggaaacaaaccgcgctggcctcaagatttcttaaaaaggcacccaccacagatgaggacaagaaggcagccgagaagaaacgggaggacaaagctaagaagaagcacgacaggaaatccaagcgcctggatgaggaggaggaggacaatgaaggcggggagtgggaaagggtccggggcggagtgccgttggttaaggagaagccaaaaatgtttgccaagggaactgagatcacccatgctgttgttatcaagaaactgaatgagatcctacaggcacgaggcaagaagggaactgatcgtgctgcccagattgagctgctgcaactgctggttcagattgcagcggaaaacaacctgggagagggcgtcattgtcaagatcaagttcaatatcatcgcctctctctatgactacaaccccaacctggcaacctacatgaagccagagatgtgggggaagtgcctggactgcatcaatgagctgatggatatcctgtttgcaaatcccaacatttttgttggagagaatattctggaagagagtgagaacctgcacaacgctgaccagccactgcgtgtccgtggctgcatcctaactctggtggaacgaatggatgaagaatttaccaaaataatgcaaaatactgaccctcactcccaagagtacgtggagcacttgaaggatgaggcccaggtgtgtgccatcatcgagcgtgtgcagcgctacctggaggagaagggcactaccgaggaggtctgccgcatctacctgctgcgcatcctgcacacctactacaagtttgattacaaggcccatcagcgacagctgaccccgcctgagggctcctcaaagtctgagcaagaccaggcagaaaatgagggcgaggactcggctgtgttgatggagagactgtgcaagtacatctacgccaaggaccgcacagaccggatccgcacatgtgccatcctctgccacatctaccaccatgctctgcactcgcgctggtaccaggcccgcgacctcatgctcatgagccacttgcaggacaacattcagcatgcagacccgccagtgcagatcctttacaaccgcaccatggtgcagctgggcatctgtgccttccgccaaggcctgaccaaggacgcacacaacgccctgctggacatccagtcgagtggccgagccaaggagcttctgggccagggcctgctgctgcgcagcctgcaggagcgcaaccaggagcaggagaaggtggagcggcgccgtcaggtccccttccacctgcacatcaacctggagctgctggagtgtgtctacctggtgtctgccatgctcctggagatcccctacatggccgcccatgagagcgatgcccgccgacgcatgatcagcaagcagttccaccaccagctgcgcgtgggcgagcgacagcccctgctgggtccccctgagtccatgcgggaacatgtggtcgctgcctccaaggccatgaagatgggtgactggaagacctgtcacagttttatcatcaatgagaagatgaatgggaaagtgtgggacctttatccaggtctgcatgcggttagacgacaggagagtctgggaccaccttagcaaggggtctagtccgcctggtgcgcaacgttgtctgtggcccggccatcaagtatagtaggcctccacacatgtgatgtcccatatcttttgctgttttcttctcttcctcttgtgtctggacgcag

SEQ ID NO: 458370 - DNA, 2616 bp, Homo sapiens
ataggctaggtacgaggctggggtgaaatcggccgagggctgtcagggccctgcggtgtgactcgcgggctcagctggtccggccgtagcacctccgcgccgtcgccatgtcgcggtttttcaccaccggttcggacagcgagtccgagtcgtccttgtccggggaggagctcgtcaccaaacctgtcggaggcaactatggcaaacagccattgttgctgagcgaggatgaagaagataccaagagagttgtccgcagtgccaaggacaagaggtttgaggagctgaccaaccttatccggaccatccgtaatgccatgaagattcgtgatgtcaccaagtgcctggaagagtttgagctcctgggaaaagcatatgggaaggccaaaagcattgtggacaaagaaggtgtcccccggttctatatccgcatcctggctgacctagaggactatcttaatgagctttgggaagataaggaagggaagaagaagatgaacaagaacaatgccaaggctctgagcaccttgcgtcagaagatccgaaaatacaaccgtgatttcgagtcccatatcacaagctacaagcagaaccccgagcagtctgcggatgaagatgctgagaaaaatgaggaggattcagaaggctcttcagatgaggatgaggatgaggacggagtcagtgctgcaactttcttgaagaagaaatcagaagctccttctggggagagtcgcaagttcctcaaaaagatggatgatgaagatgaggactcagaagattccgaagatgatgaagactgggacacaggttccacatcttccgattccgactcagaggaggaagaagggaaacaaaccgcgctggcctcaagatttcttaaaaaggcacccaccacagatgaggacaagaaggcagccgagaagaaacgggaggacaaagctaagaagaagcacgacaggaaatccaagcgcctggatgaggaggaggaggacaatgaaggcggggagtgggaaagggtccggggcggagtgccgttggttaaggagaagccaaaaatgtttgccaagggaactgagatcacccatgctgttgttatcaagaaactgaatgagatcctacaggcacgaggcaagaagggaactgatcgtgctgcccagattgagctgctgcaactgctggttcagattgcagcggaaaacaacctgggagagggcgtcattgtcaagatcaagttcaatatcatcgcctctctctatgactacaaccccaacctggcaacctacatgaagccagagatgtgggggaagtgcctggactgcatcaatgagctgatggatatcctgtttgcaaatcccaacatttttgttggagagaatattctggaagagagtgagaacctgcacaacgctgaccagccactgcgtgtccgtggctgcatcctaactctggtggaacgaatggatgaagaatttaccaaaataatgcaaaatactgaccctcactcccaagagtacgtggagcacttgaaggatgaggcccaggtgtgtgccatcatcgagcgtgtgcagcgctacctggaggagaagggcactaccgaggaggtctgccgcatctacctgctgcgcatcctgcacacctactacaagtttgattacaaggcccatcagcgacagctgaccccgcctgagggctcctcaaagtctgagcaagaccaggcagaaaatgagggcgaggactcggctgtgttgatggagagactgtgcaagtacatctacgccaaggaccgcacagaccggatccgcacatgtgccatcctctgccacatctaccaccatgctctgcactcgcgctggtaccaggcccgcgacctcatgctcatgagccacttgcaggacaacattcagcatgcagacccgccagtgcagatcctttacaaccgcaccatggtgcagctgggcatctgtgcctacctcttcacctacagcagtgtctatgactccatcagcatggagacgctgtcagacatgtttgagctggatctgcccactgtgcactccatcatcagcaaaatgatcattaatgaggagctgatggcctccctggaccagccaacacagacagtggtgatgcaccgcactgagcccactgcccagcagaacctggctctgcagctggccgagaagctgggcagcctggtggagaacaacgaacgggtgtttgaccacaagcagggcacctacgggggctacttccgagaccagaaggacggctaccgcaaaaacgagggctacatgcgccgcggtggctaccgccagcagcagtctcagacggcctactgagctctccactctgtttcccgcctgggccatccaaccttgaagtcctaaaccacacctcagtcactaaaggtctgtttaaagttgttctggttgattgcttgttgccacaaaggtgtgttgagcccattcatttgctgattatacttctgagctgctaccacatgacagacacaaggctcagatgaagaggtgaattgaacacgttcctgacctcaaagagcctgctgctttttgacatttaacagaaaattatagtaacataagttataatgggtgt

SEQ ID NO: 458371 - DNA, 2603 bp, Homo sapiens
ataggctaggtacgaggctggggtgaaatcggccgagggctgtcagggccctgcggtgtgactcgcgggctcagctggtccggccgtagcacctccgcgccgtcgccatgtcgcggtttttcaccaccggttcggacagcgagtccgagtcgtccttgtccggggaggagctcgtcaccaaacctgtcggaggcaactatggcaaacagccattgttgctgagcgaggatgaagaagataccaagagagttgtccgcagtgccaaggacaagaggtttgaggagctgaccaaccttatccggaccatccgtaatgccatgaagattcgtgatgtcaccaagtgcctggaagagtttgagctcctgggaaaagcatatgggaaggccaaaagcattgtggacaaagaaggtgtcccccggttctatatccgcatcctggctgacctagaggactatcttaatgagctttgggaagataaggaagggaagaagaagatgaacaagaacaatgccaaggctctgagcaccttgcgtcagaagatccgaaaatacaaccgtgatttcgagtcccatatcacaagctacaagcagaaccccgagcagtctgcggatgaagatgctgagaaaaatgaggaggattcagaaggctcttcagatgaggatgaggatgaggacggagtcagtgctgcaactttcttgaagaagaaatcagaagctccttctggggagagtcgcaagttcctcaaaaagatggatgatgaagatgaggactcagaagattccgaagatgatgaagactgggacacaggttccacatcttccgattccgactcagaggaggaagaagggaaacaaaccgcgctggcctcaagatttcttaaaaaggcacccaccacagatgaggacaagaaggcagccgagaagaaacgggaggacaaagctaagaagaagcacgacaggaaatccaagcgcctggatgaggaggaggaggacaatgaaggcggggagtgggaaagggtccggggcggagtgccgttggttaaggagaagccaaaaatgtttgccaagggaactgagatcacccatgctgttgttatcaagaaactgaatgagatcctacaggcacgaggcaagaagggaactgatcgtgctgcccagattgagctgctgcaactgctggttcagattgcagcggaaaacaacctgggagagggcgtcattgtcaagatcaagttcaatatcatcgcctctctctatgactacaaccccaacctggcaacctacatgaagccagagatgtgggggaagtgcctggactgcatcaatgagctgatggatatcctgtttgcaaatcccaacatttttgttggagagaatattctggaagagagtgagaacctgcacaacgctgaccagccactgcgtgtccgtggctgcatcctaactctggtggaacgaatggatgaagaatttaccaaaataatgcaaaatactgaccctcactcccaagagtacgtggagcacttgaaggatgaggcccaggtgtgtgccatcatcgagcgtgtgcagcgctacctggaggagaagggcactaccgaggaggtctgccgcatctacctgctgcgcatcctgcacacctactacaagtttgattacaaggcccatcagcgacagctgaccccgcctgagggctcctcaaagtctgagcaagaccaggcagaaaatgagggcgaggactcggctgtgttgatggagagactgtgcaagtacatctacgccaaggaccgcacagaccggatccgcacatgtgccatcctctgccacatctaccaccatgctctgcactcgcgctggtaccaggcccgcgacctcatgctcatgagccacttgcaggacaacattcagcatgcagacccgccagtgcagatcctttacaaccgcaccatggtgcagctgggcatctgtgccttccgccaaggcctgaccaaggacgcacacaacgccctgctggacatccagtcgagtggccgagccaaggagcttctgggccagggcctgctgctgcgcagcctgcaggagcgcaaccaggagcaggagaaggtggagcggcgccgtcaggtccccttccacctgcacatcaacagaacctggctctgcagctggccgagaagctgggcagcctggtggagaacaacgaacgggtgtttgaccacaagcagggcacctacgggggctacttccgagaccagaaggacggctaccgcaaaaacgagggctacatgcgccgcggtggctaccgccagcagcagtctcagacggcctactgagctctccactctgtttcccgcctgggccatccaaccttgaagtcctaaaccacacctcagtcactaaaggtctgtttaaagttgttctggttgattgcttgttgccacaaaggtgtgttgagcccattcatttgctgattatacttctgagctgctaccacatgacagacacaaggctcagatgaagaggtgaattgaacacgttcctgacctcaaagagcctgctgctttttgacatttaacagaaaattatagtaacataagttataatgggtgt

SEQ ID NO: 458372 - DNA, 2132 bp, Homo sapiens
ataggctaggtacgaggctggggtgaaatcggccgagggctgtcagggcgagaagccaaaaatgtttgccaagggaactgagatcacccatgctgttgttatcaagaaactgaatgagatcctacaggcacgaggcaagaagggaactgatcgtgctgcccagattgagctgctgcaactgctggttcagattgcagcggaaaacaacctgggagagggcgtcattgtcaagatcaagttcaatatcatcgcctctctctatgactacaaccccaacctggcaacctacatgaagccagagatgtgggggaagtgcctggactgcatcaatgagctgatggatatcctgtttgcaaatcccaacatttttgttggagagaatattctggaagagagtgagaacctgcacaacgctgaccagccactgcgtgtccgtggctgcatcctaactctggtggaacgaatggatgaagaatttaccaaaataatgcaaaatactgaccctcactcccaagagtacgtggagcacttgaaggatgaggcccaggtgtgtgccatcatcgagcgtgtgcagcgctacctggaggagaagggcactaccgaggaggtctgccgcatctacctgctgcgcatcctgcacacctactacaagtttgattacaaggcccatcagcgacagctgaccccgcctgagggctcctcaaagtctgagcaagaccaggcagaaaatgagggcgaggactcggctgtgttgatggagagactgtgcaagtacatctacgccaaggaccgcacagaccggatccgcacatgtgccatcctctgccacatctaccaccatgctctgcactcgcgctggtaccaggcccgcgacctcatgctcatgagccacttgcaggacaacattcagcatgcagacccgccagtgcagatcctttacaaccgcaccatggtgcagctgggcatctgtgccttccgccaaggcctgaccaaggacgcacacaacgccctgctggacatccagtcgagtggccgagccaaggagcttctgggccagggcctgctgctgcgcagcctgcaggagcgcaaccaggagcaggagaaggtggagcggcgccgtcaggtccccttccacctgcacatcaacctggagctgctggagtgtgtctacctggtgtctgccatgctcctggagatcccctacatggccgcccatgagagcgatgcccgccgacgcatgatcagcaagcagttccaccaccagctgcgcgtgggcgagcgacagcccctgctgggtccccctgagtccatgcgggaacatgtggtcgctgcctccaaggccatgaagatgggtgactggaagacctgtcacagttttatcatcaatgagaagatgaatgggaaagtgtgggaccttttccccgaggctgacaaagtccgcaccatgctggttaggaagatccaggaagagtcactgaggacctacctcttcacctacagcagtgtctatgactccatcagcatggagacgctgtcagacatgtttgagctggatctgcccactgtgcactccatcatcagcaaaatgatcattaatgaggagctgatggcctccctggaccagccaacacagacagtggtgatgcaccgcactgagcccactgcccagcagaacctggctctgcagctggccgagaagctgggcagcctggtggagaacaacgaacgggtgtttgaccacaagcagggcacctacgggggctacttccgagaccagaaggacggctaccgcaaaaacgagggctacatgcgccgcggtggctaccgccagcagcagtctcagacggcctactgagctctccactctgtttcccgcctgggccatccaaccttgaagtcctaaaccacacctcagtcactaaaggtctgtttaaagttgttctggttgattgcttgttgccacaaaggtgtgttgagcccattcatttgctgattatacttctgagctgctaccacatgacagacacaaggctcagatgaagaggtgaattgaacacgttcctgacctcaaagagcctgctgctttttgacatttaacagaaaattatagtaacataagttataatgggtgt

SEQ ID NO: 458373 - DNA, 2464 bp, Homo sapiens
ataggctaggtacgaggctggggtgaaatcggccgagggctgtcagggccctgcggtgtgactcgcgggctcagctggtccggccgtagcacctccgcgccgtcgccatgtcgcggtttttcaccaccggttcggacagcgagtccgagtcgtccttgtccggggaggagctcgtcaccaaacctgtcggaggcaactatggcaaacagccattgttgctgagcgaggatgaagaagataccaagagagttgtccgcagtgccaaggacaagaggtttgaggagctgaccaaccttatccggaccatccgtaatgccatgaagattcgtgatgtcaccaagtgcctggaagagtttgagctcctgggaaaagcatatgggaaggccaaaagcattgtggacaaagaaggtgtcccccggttctatatccgcatcctggctgacctagaggactatcttaatgagctttgggaagataaggaagggaagaagaagatgaacaagaacaatgccaaggctctgagcaccttgcgtcagaagatccgaaaatacaaccgtgatttcgagtcccatatcacaagctacaagcagaaccccgagcagtctgcggatgaagatgctgagaaaaatgaggaggattcagaaggctcttcagatgaggatgaggatgaggacggagtcagtgctgcaactttcttgaagaagaaatcagaagctccttctggggagagtcgcaagttcctcaaaaagatggatgatgaagatgaggactcagaagattccgaagatgatgaagactgggacacaggttccacatcttccgattccgactcagaggaggaagaagggaaacaaaccgcgctggcctcaagatttcttaaaaaggcacccaccacagatgaggacaagaaggcagccgagaagaaacgggaggacaaagctaagaagaagcacgacaggaaatccaagcgcctggatgaggaggaggaggacaatgaaggcggggagtgggaaagggtccggggcggagtgccgttggttaaggagaagccaaaaatgtttgccaagggaactgagatcacccatgctgttgttatcaagaaactgaatgagatcctacaggcacgaggcaagaagggaactgatcgtgctgcccagattgagctgctgcaactgctggttcagattgcagcggaaaacaacctgggagagggcgtcattgtcaagatcaagttcaatatcatcgcctctctctatgactacaaccccaacctggcaacctacatgaagccagagatgtgggggaagtgcctggactgcatcaatgagctgatggatatcctgtttgcaaatcccaacatttttgttggagagaatattctggaagagagtgagaacctgcacaacgctgaccagccactgcgtgtccgtggctgcatcctaactctggtggaacgaatggatgaagaatttaccaaaataatgcaaaatactgaccctcactcccaagagtacgtggagcacttgaaggatgaggcccaggtgtgtgccatcatcgagcgtgtgcagcgctacctggaggagaagggcactaccgaggagcctgcaggagcgcaaccaggagcaggagaaggtggagcggcgccgtcaggtccccttccacctgcacatcaacctggagctgctggagtgtgtctacctggtgtctgccatgctcctggagatcccctacatggccgcccatgagagcgatgcccgccgacgcatgatcagcaagcagttccaccaccagctgcgcgtgggcgagcgacagcccctgctgggtccccctgagtccatgcgggaacatgtggtcgctgcctccaaggccatgaagatgggtgactggaagacctgtcacagttttatcatcaatgagaagatgaatgggaaagtgtgggaccttttccccgaggctgacaaagtccgcaccatgctggttaggaagatccaggaagagtcactgaggacctacctcttcacctacagcagtgtctatgactccatcagcatggagacgctgtcagacatgtttgagctggatctgcccactgtgcactccatcatcagcaaaatgatcattaatgaggagctgatggcctccctggaccagccaacacagacagtggtgatgcaccgcactgagcccactgcccagcagaacctggctctgcagctggccgagaagctgggcagcctggtggagaacaacgaacgggtgtttgaccacaagcagggcacctacgggggctacttccgagaccagaaggacggctaccgcaaaaacgagggctacatgcgccgcggtggctaccgccagcagcagtctcagacggcctactgagctctccactctgtttcccgcctgggccatccaaccttgaagtcctaaaccacacctcagtcactaaaggtctgtttaaagt

SEQ ID NO: 458374 - DNA, 1561 bp, Homo sapiens
ataggctaggtacgaggctggggtgaaatcggccgagggctgtcagggccctgcggtgtgactcgcgggctcagctggtccggccgtagcacctccgcgccgtcgccatgtcgcggtttttcaccaccggttcggacagcgagtccgagtcgtccttgtccggggaggagctcgtcaccaaacctgtcggaggcaactatggcaaacagccattgttgctgagcgaggatgaagaagataccaagagagttgtccgcagtgccaaggacaagaggtttgaggagctgaccaaccttatccggaccatccgtaatgccatgaagattcgtgatgtcaccaagtgcctggaagagtttgagctcctgggaaaagcatatgggaaggccaaaagcattgtggacaaagaaggtgtcccccggttctatatccgcatcctggctgacctagaggactatcttaatgagctttgggaagataaggaagggaagaagaagatgaacaagaacaatgccaaggctctgagcaccttgcgtcagaagatccgaaaatacaaccgtgatttcgagtcccatatcacaagctacaagcagaaccccgagcagtctgcggatgaagatgctgagaaaaatgaggaggattcagaaggctcttcagatgaggatgaggatgaggacggagtcagtgctgcaactttcttgaagaagaaatcagaagctccttctggggagagtcgcaagttcctcaaaaagatggatgatgaagatgaggactcagaagattccgaagatgatgaagactgggacacaggttccacatcttccgattccgactcagaggaggaagaagggaaacaaaccgcgctggcctcaagatttcttaaaaaggcacccaccacagatgaggacaagaaggcagccgagaagaaacgggaggacaaagctaagaagaagcacgacaggaaatccaagcgcctggatgaggaggaggaggacaatgaaggcggggagtgggaaagggtccggggcggagtgccgttggttaaggagaagccaaaaatgtttgccaagggaactgagatcacccatgctgttgttatcaagaaactgaatgagatcctacaggcacgaggcaagaagggaactgatcgtgctgcccagattgagctgctgcaactgctggttcagattgcagcggaaaacaacctgggagagggcgtcattgtcaagatcaagttcaatatcatcgcctctctctatgactacaaccccaacctggcaacctacatgaagccagagatgtgggggaagtgcctggactgcatcaatgagctgatggatatcctgtttgcaaatcccaacatttttgttggagagaatattctggaagagagtgagaacctgcacaacgctgaccagccactgcgtgtccgtggctgcatcctaactctggtggaacgaatggatgaagaatttaccaaaataatgcaaaatactgaccctcactcccaagagtacgtggagcacttgaaggatgaagccacaaacggaggaccgagctcgaa

SEQ ID NO: 458375 - DNA, 1697 bp, Homo sapiens
ataggctaggtacgaggctggggtgaaatcggccgagggctgtcagggccctgcggtgtgactcgcgggctcagctggtccggccgtagcacctccgcgccgtcgccatgtcgcggtttttcaccaccggttcggacagcgagtccgagtcgtccttgtccggggaggagctcgtcaccaaacctgtcggaggcaactatggcaaacagccattgttgctgagcgaggatgaagaagataccaagagagttgtccgcagtgccaaggacaagaggtttgaggagctgaccaaccttatccggaccatccgtaatgccatgaagattcgtgatgtcaccaagtgcctggaagagtttgagctcctgggaaaagcacatgtgccatcctctgccacatctaccaccatgctctgcactcgcgctggtaccaggcccgcgacctcatgctcatgagccacttgcaggacaacattcagcatgcagacccgccagtgcagatcctttacaaccgcaccatggtgcagctgggcatctgtgccttccgccaaggcctgaccaaggacgcacacaacgccctgctggacatccagtcgagtggccgagccaaggagcttctgggccagggcctgctgctgcgcagcctgcaggagcgcaaccaggagcaggagaaggtggagcggcgccgtcaggtccccttccacctgcacatcaacctggagctgctggagtgtgtctacctggtgtctgccatgctcctggagatcccctacatggccgcccatgagagcgatgcccgccgacgcatgatcagcaagcagttccaccaccagctgcgcgtgggcgagcgacagcccctgctgggtccccctgagtccatgcgggaacatgtggtcgctgcctccaaggccatgaagatgggtgactggaagacctgtcacagttttatcatcaatgagaagatgaatgggaaagtgtgggaccttttccccgaggctgacaaagtccgcaccatgctggttaggaagatccaggaagagtcactgaggacctacctcttcacctacagcagtgtctatgactccatcagcatggagacgctgtcagacatgtttgagctggatctgcccactgtgcactccatcatcagcaaaatgatcattaatgaggagctgatggcctccctggaccagccaacacagacagtggtgatgcaccgcactgagcccactgcccagcagaacctggctctgcagctggccgagaagctgggcagcctggtggagaacaacgaacgggtgtttgaccacaagcagggcacctacgggggctacttccgagaccagaaggacggctaccgcaaaaacgagggctacatgcgccgcggtggctaccgccagcagcagtctcagacggcctactgagctctccactctgtttcccgcctgggccatccaaccttgaagtcctaaaccacacctcagtcactaaaggtctgtttaaagttgttctggttgattgcttgttgccacaaaggtgtgttgagcccattcatttgctgattatacttctgagctgctaccacatgacagacacaaggctcagatgaagaggtgaattgaacacgttcctgacctcaaagagcctgctgctttttgacatttaacagaaaattatagtaacataagttataatgggtgt

SEQ ID NO: 458376 - DNA, 1062 bp, Homo sapiens
ccatcagctcctcattaatgatcattttgctgatgatgataaaactgcgtcaggtccccttccacctgcacatcaacctggagctgctggagtgtgtctacctggtgtctgccatgctcctggagatcccctacatggccgcccatgagagcgatgcccgccgacgcatgatcagcaagcagttccaccaccagctgcgcgtgggcgagcgacagcccctgctgggtccccctgagtccatgcgggaacatgtggtcgctgcctccaaggccatgaagatgggtgactggaagacctgtcacagttttatcatcaatgagaagatgaatgggaaagtgtgggaccttttccccgaggctgacaaagtccgcaccatgctggttaggaagatccaggaagagtcactgaggacctacctcttcacctacagcagtgtctatgactccatcagcatggagacgctgtcagacatgtttgagctggatctgcccactgtgcactccatcatcagcaaaatgatcattaatgaggagctgatggcctccctggaccagccaacacagacagtggtgatgcaccgcactgagcccactgcccagcagaacctggctctgcagctggccgagaagctgggcagcctggtggagaacaacgaacgggtgtttgaccacaagcagggcacctacgggggctacttccgagaccagaaggacggctaccgcaaaaacgagggctacatgcgccgcggtggctaccgccagcagcagtctcagacggcctactgagctctccactctgtttcccgcctgggccatccaaccttgaagtcctaaaccacacctcagtcactaaaggtctgtttaaagttgttctggttgattgcttgttgccacaaaggtgtgttgagcccattcatttgctgattatacttctgagctgctaccacatgacagacacaaggctcagatgaagaggtgaattgaacacgttcctgacctcaaagagcctgctgctttttgacatttaacagaaaattatagtaacataagttataatgggtgt

SEQ ID NO: 458377 - DNA, 1440 bp, Homo sapiens
ataggctaggtacgaggctggggtgaaatcggccgagggctgtcagggccctgcggtgtgactcgcgggctcagctggtccggccgtagcacctccgcgccgtcgccatgtcgcggtttttcaccaccggttcggacagcgagtccgagtcgtccttgtccggggaggagctcgtcaccaaacctgtcggaggcaactatggcaaacagccattgttgctgagcgaggatgaagaagataccaagagagttgtccgcagtgccaaggacaagaggtttgaggagctgaccaaccttatccggaccatccgtaatgccatgaagattcgtgatgtcaccaagtgcctggaagagtttgagctcctgggaaaagcatatgggaaggccaaaagcattgtggacaaagaaggtgtcccccggttctatatccgcatcctggctgacctagaggactatcttaatgagctttgggaagataaggaagggaagaagaagatgaacaagaacaatgccaaggctctgagcaccttgcgtcagaagatccgaaaatacaaccgtgatttcgagtcccatatcacaagctacaagcagaaccccgagcagtctgcggatgaagatgctgagaaaaatgaggaggattcagaaggctcttcagatgaggatgaggatgaggacggagtcagtgctgcaactttcttgaagaagaaatcagaagctccttctggggagagtcgcaagttcctcaaaaagatggatgatgaagatgaggactcagaagattccgaagatgatgaagactgggacacaggttccacatcttccgattccgactcagaggaggaagaagggaaacaaaccgcgctggcctcaagatttcttaaaaaggcacccaccacagatgaggacaagaaggcagccgagaagaaacgggaggacaaagctaagaagaagcacgacaggaaatccaagcgcctggatgaggaggaggaggacaatgaaggcggggagtgggaaagggtccggggcggagtgccgttggttaaggagaagccaaaaatgtttgccaagggaactgagatcacccatgctgttgttatcaagaaactgaatgagatcctacaggcacgaggcaagaagggaactgatcgtgctgcccagattgagctgctgcaactgctggttcagattgcagcggaaaacaacctgggagagggcgtcattgtcaacgaacgggtgtttgaccacaagcagggcacctacgggggctacttccgagaccagaaggacggctaccgcaaaaacgagggctacatgcgccgcggtggctaccgccagcagcagtctcagacggcctactgagctctccactctgtttcccgcctgggccatccaaccttgaagtcctaaaccacacctcagtcactaaaggtctgtttaaagt

SEQ ID NO: 458378 - DNA, 1200 bp, Homo sapiens
ataggctaggtacgaggctggggtgaaatcggccgagggctgtcagggccctgcggtgtgactcgcgggctcagctggtccggccgtagcacctccgcgccgtcgccatgtcgcggtttttcaccaccggttcggacagcgagtccgagtcgtccttgtccggggaggagctcgtcaccaaacctgtcggaggcaactatggcaaacagccattgttgctgagcgaggatgaagaagataccaagagagttgtccgcagtgccaaggacaagaggtttgaggagctgaccaaccttatccggaccatccgtaatgccatgaagattcgtgatgtcaccaagtgcctggaagagtttgagctcctgggaaaagcatatgggaaggccaaaagcattgtggacaaagaaggtgtcccccggttctatatccgcatcctggctgacctagaggactatcttaatgagctttgggaagataaggaagggaagaagaagatgaacaagaacaatgccaaggctctgagcaccttgcgtcagaagatccgaaaatacaaccgtgatttcgagtcccatatcacaagctacaagcagaaccccgagcagtctgcggatgaagatgctgagaaaaatgaggaggattcagaaggctcttcagatgaggatgaggatgaggacggagtcagtgctgcaactttcttgaagaagaaatcagaagctccttctggggagagtcgcaagttcctcaaaaagatggatgatgaagatgaggactcagaagattccgaagatgatgaagactgggacacaggttccacatcttccgattccgactcagaggaggaagaagggaaacaaaccgcgctggcctcaagatttcttaaaaaggcacccaccacagatgaggacaagaaggcagccgagaagaaacgggaggacaaagctaagaagaagcacgacaggaaatccaagcgcctggatgaggaggaggaggacaatgaaggcggggagtgggaaagggtccggggcggagtgccgttggttaaggagaagccaaaaatgtttgccaagggaactgagatcacccatgctgttgttatcaagaaactgaatgagatcctacaggcacgaggcaagaagggaactgatcgtctgcccagattgagctcgcatctgttcagatccagcgatacacctcgcgcag

SEQ ID NO: 458379 - DNA, 1667 bp, Homo sapiens
ataggctaggtacgaggctggggtgaaatcggccgagggctgtcagggccctgcggtgtgactcgcgggctcagctggtccggccgtagcacctccgcgccgtcgccatgtcgcggtttttcaccaccggttcggacagcgagtccgagtcgtccttgtccggggaggagctcgtcaccaaacctgtcggaggcaactatggcaaacagccattgttgctgagcgaggatgaagaagataccaagagagttgtccgcagtgccaaggacaagaggtttgaggagctgaccaaccttatccggaccatccgtaatgccatgaagattcgtgatgtcaccaagtgcctggaagagtttgagctcctgggaaaagcatatgggaaggccaaaagcattgtggacaaagaaggtgtcccccggttctatatccgcatcctggctgacctagaggactatcttaatgagctttgggaagataaggaagggaagaagaagatgaacaagaacaatgccaaggctctgagcaccttgcgtcagaagatccgaaaatacaaccgtgatttcgagtcccatatcacaagctacaagcagaaccccgagcagtctgcggatgaagatgctgagaaaaatgaggaggattcagaaggctcttcagatgaggatgaggatgaggacggagtcagtgctgcaactttcttgaagaagaaatcagaagctccttctggggagagtcgcaagttcctcaaaaagatggatgatgaagatgaggactcagaagattccgaagatgatgaagactgggacacaggttccacatcttccgattccgactcagaggaggaagaagggaaacaaaccgcgctggcctcaagatttcttaaaaaggcacccaccacagatgaggacaagaaggcagccgagaagaaacgggaggacaaagctaagaagaagcacgacaggaaatccaagcgcctggatgaggaggaggaggacaatgaaggcggggagtgggaaagggtccggggcggagtgccgttggttaaggagaagccaaaaatgtttgccaagggaacatgctgagaaactgatgaagctgcagaaccaacgaggtggccgaatcttccttcaggatatcaagaaaccagactgtgatgactgggagagcgggctgaatgcaatggagtgtgcattacatttggaaaaaaaatgtgaatcagtcactactgggaactggacaaaatgggcactgacaaaaatgagcccaattgggtgacttcattgaggacacattacttgaatgagcaggtgaaagccatcaagaatcgggtgaacacgtgaccaattgtgcaagatggaaggcgattcgggtgggggaaattcttgggaagacaccggggaaaggctatgaagagaagcgcggaaatcccagacgggggagagccccgggccacaggggagccagtagggagcagaacacaccatacaaggcgaaaacaccacaaacggaggcaccccccaagaacgggccagcacaaagacaagcaggcaagccaagaagaccgcgacagccgaaacacaaaacacagaagacaacaagacccaagccaggagtcgcacagaaacagcaaaccaccacggtcctcacgacaccatacgccgaacagaagc

SEQ ID NO: 458380 - DNA, 838 bp, Homo sapiens
  misc_feature (786)..(786): n is a, c, g, or t
  misc_feature (815)..(815): n is a, c, g, or t
  misc_feature (831)..(831): n is a, c, g, or t
ataggctaggtacgaggctggggtgaaatcggccgagggctgtcagggccctgcggtgtgactcgcgggctcagctggtccggccgtagcacctccgcgccgtcgccatgtcgcggtttttcaccaccggttcggacagcgagtccgagtcgtccttgtccggggaggagctcgtcaccaaacctgtcggaggcaactatggcaaacagccattgttgctgagcgaggatgaagaagataccaagagagttgtccgcagtgccaaggacaagaggtttgaggagctgaccaaccttatccggaccatccgtaatgccatgaagattcgtgatgtcaccaagtgcctggaagagtttgagctcctgggaaaagcatatgggaaggccaaaagcattgtggacaaagaaggtgtcccccggttctatatccgcatcctggctgacctagaggactatcttaatgagctttgggaagataaggaagggaagaagaagatgaacaagaacaatgccaaggctctgagcaccttgcgtcagaagatccgaaaatacaaccgtgatttcgagtcccatatcacaagctacaagcagaaccccgagcagtctgcggatgaagatgctgagaaaaatgaggaggattcagaaggctcttcagatgaggatgaggatgaggacggagtcagtgctgcaactttcttgaagaagaaatcagaagctccttctggggagagtcgcaagttcctcaaaaagatggatgggattgattgaaagaatgaaggacttccanaaaaaattttcccgaaaaatgattgaaanacttggggaccaccanggtttcc

SEQ ID NO: 458381 - DNA, 743 bp, Homo sapiens
ataggctaggtacgaggctggggtgaaatcggccgagggctgtcagggccctgcggtgtgactcgcgggctcagctggtccggccgtagcacctccgcgccgtcgccatgtcgcggtttttcaccaccggttcggacagcgagtccgagtcgtccttgtccggggaggagctcgtcaccaaacctgtcggaggcaactatggcaaacagccattgttgctgagcgaggatgaagaagataccaagagagttgtccgcagtgccaaggacaagaggtttgaggagctgaccaaccttatccggaccatccgtaatgccatgaagattcgtgatgtcaccaagtgcctggaagagtttgagctcctgggaaaagcatatgggaaggccaaaagcattgtggacaaagaaggtgtcccccggttctatatccgcatcctggctgacctagaggactatcttaatgagctttgggaagataaggaagggaagaagaagatgaacaagaacaatgccaaggctctgagcaccttgcgtcagaagatccgaaaatacaaccgtgatttcgagtcccatatcacaagctacaagcagaaccccgagcagtctgcggatgaagatgctgagaaaaatgaggaggattcagaaggctcttcagatgaggatgaggatgaggacggagtcacttccctgtacgcagacgttcgaaaccgctgcggggccaagctcacatgcctcccgtcgatt

SEQ ID NO: 458382 - DNA, 576 bp, Homo sapiens
cttccagcagccggtccctgaacactcctcctctccctccttggcctcgctgacctcagagttggggacccggaggccggcgtcgatacactgctgcatggggaacttggccttggtggggtccatcttgctgcatttgcgcgtccttcgcattgaagcccttttggagttcctcaggggggaactcgtcacctccacgggttccaggccatcagggccaagctgcttcttgagctcctcctcctagtactcctgctccacctgctttctagacgcgcagcttggcgcagccccgcacaggctccgtggaggcttccagctcgtccttgaagctctccatgcactagcagtcagccgtctgaatctcagtgaagaactgccagaagcagacccgggggaccccttccggctcctgaccaacaccaggttgaactgcgtgacaattgcctagtggaccacctgctccatgagggcgcatttctcctgcacctctagatcagcacaccagatgaccaggtagttgaccatcttctcatcaggcttggtgttcaccatgctcctgctaaagccgtcttt

SEQ ID NO: 458383 - DNA, 278 bp, Homo sapiens
cagtgtgtggttcccagcctgacaaccttggcaccccagcaccccagcaggaggggtttctgcttgtggtcccctggccaccagcctcggccagctggttgtggaccagccgtgacctggggcaacccagccaacctcaccgtccaatgggctgcagccacctctctccagtgaggtctgagacccagccttaacgaggctacccccttccaggtttgttctttctctgggctctctccctcaccctttgggtgttttttggttgttgttgtttgcgt

SEQ ID NO: 458384 - DNA, 839 bp, Homo sapiens
  misc_feature (31)..(31): n is a, c, g, or t
  misc_feature (37)..(38): n is a, c, g, or t
ccagtaatctcagggttataggtacgaggcngggtgnngcaggccctgcggtgtgactcgcgggctcagctggtccggccgtagcacctccgcgccgtcgccatgtcgcggtttttcaccaccggttcggacagcgagtccgagtcgtccttgtccggggaggagctcgtcaccaaacctgtcggaggcaactatggcaaacagccattgttgctgagcgaggatgaagaagataccaagagagttgtccgcagtgccaaggacaagaggtttgaggagctgaccaaccttatccggaccatccgtaatgccatgaagattcgtgatgtcaccaagtgcctggaagagtttgagctcctgggaaaagcatatgggaaggccaaaagcattgtggacaaagaaggtgtcccccggttctatatccgcatcctggctgacctagaggactatcttaatgagctttgggaagataaggaagggaagaagaagatgaacaagaacaatgccaaggctctgagcaccttgcgtcagaagatccgaaaatacaaccgtgatttcgagtcccatatcacaagctacaagcagaaccccgagcagtctgcggatgaagatgctgagaaaaatgaggaggattcagaaggctcttcagatgaggatgaggatgaggacggagtcagtgctgcaactttcttgaagaagaaatcagaagctccttctggggagagtcgcaagttcctcaaaaagatggatgttacgatgcgggccgagatcccaatgtggactgggcccggtccactttcgtccagcgggggcaaggaacaccgggccaatatcatacc

SEQ ID NO: 458385 - DNA, 409 bp, Homo sapiens
  misc_feature (88)..(88): n is a, c, g, or t
  misc_feature (125)..(125): n is a, c, g, or t
  misc_feature (147)..(147): n is a, c, g, or t
  misc_feature (180)..(180): n is a, c, g, or t
  misc_feature (354)..(354): n is a, c, g, or t
tgccaaaaggccccttcccacgtccctcgagctctgtagcctggtctgtgcattgtggctgtcaaatccatgtgtcccccctgtggtntgtgtgtgacaccaccactgtgtcccagtgtttggcncagccatggctggatgtgcatntggcctatgaccctgtgcctgtgtttcatgttntgtgtcacgtgaccctgtgccccgcctcccggggtgcccgtgtggcctgggtcctcggccctgtagccctggcccggtcccagtccggtgccttccaccctgccctggcctaccacagctgcctccggcctcggcctggcttcaccgcattccagggctgcagccccctgcttntcccgcaccttgaagtcctaaaccacacctcagtcactaaaggtctgtttaaagt

SEQ ID NO: 458386 - DNA, 303 bp, Homo sapiens
aattcgcggccgcgtcgacaagacgacagaagggagagaacctggctctgcagctggccgagaagctgggcagcctggtggagaacaacgaacgggtgtttgaccacaagcagggcacctacgggggctacttccgagaccagaaggacggctaccgcaaaaacgagggctacatgcgccgcggtggctaccgccagcagcagtctcagacggcctactgagctctccactctgtttcccgcctgggccatccaaccttgaagtcctaaaccacacctcagtcactaaaggtctgtttaaagt

SEQ ID NO: 458387 - DNA, 3103 bp, Homo sapiens
  misc_feature (25)..(25): n is a, c, g, or t
gccactatcatagtcgaggccgggngtgaatcggcacgagggcgggctcagctggtccggccgtagcacctccgcgccgtcgccatgtcgcggtttttcaccaccggttcggacagcgagtccgagtcgtccttgtccggggaggagctcgtcaccaaacctgtcggaggcaactatggcaaacagccattgttgctgagcgaggatgaagaagataccaagagagttgtccgcagtgccaaggacaagaggtttgaggagctgaccaaccttatccggaccatccgtaatgccatgaagattcgtgatgtcaccaagtgcctggaagagtttgagctcctgggaaaagcatatgggaaggccaaaagcattgtggacaaagaaggtgtcccccggttctatatccgcatcctggctgacctagaggactatcttaatgagctttgggaagataaggaagggaagaagaagatgaacaagaacaatgccaaggctctgagcaccttgcgtcagaagatccgaaaatacaaccgtgatttcgagtcccatatcacaagctacaagcagaaccccgagcagtctgcggatgaagatgctgagaaaaatgaggaggattcagaaggctcttcagatgaggatgaggatgaggacggagtcagtgctgcaactttcttgaagaagaaatcagaagctccttctggggagagtcgcaagttcctcaaaaagatggatgatgaagatgaggactcagaagattccgaagatgatgaagactgggacacaggttccacatcttccgattccgactcagaggaggaagaagggaaacaaaccgcgctggcctcaagatttcttaaaaaggcacccaccacagatgaggacaagaaggcagccgagaagaaacgggaggacaaagctaagaagaagcacgacaggaaatccaagcgcctggatgaggaggaggaggacaatgaaggcggggagtgggaaagggtccggggcggagtgccgttggttaaggagaagccaaaaatgtttgccaagggaactgagatcacccatgctgttgttatcaagaaactgaatgagatcctacaggcacgaggcaagaagggaactgatcgtgctgcccagattgagctgctgcaactgctggttcagattgcagcggaaaacaacctgggagagggcgtcattgtcaagatcaagttcaatatcatcgcctctctctatgactacaaccccaacctggcaacctacatgaagccagagatgtgggggaagtgcctggactgcatcaatgagctgatggatatcctgtttgcaaatcccaacatttttgttggagagaatattctggaagagagtgagaacctgcacaacgctgaccagccactgcgtgtccgtggctgcatcctaactctggtggaacgaatggatgaagaatttaccaaaataatgcaaaatactgaccctcactcccaagagtacgtggagcacttgaaggatgaggcccaggtgtgtgccatcatcgagcgtgtgcagcgctacctggaggagaagggcactaccgaggaggtctgccgcatctacctgctgcgcatcctgcacacctactacaagtttgattacaaggcccatcagcgacagctgaccccgcctgagggctcctcaaagtctgagcaagaccaggcagaaaatgagggcgaggactcggctgtgttgatggagagactgtgcaagtacatctacgccaaggaccgcacagaccggatccgcacatgtgccatcctctgccacatctaccaccatgctctgcactcgcgctggtaccaggcccgcgacctcatgctcatgagccacttgcaggacaacattcagcatgcagacccgccagtgcagatcctttacaaccgcaccatggtgcagctgggcatctgtgccttccgccaaggcctgaccaaggacgcacacaacgccctgctggacatccagtcgagtggccgagccaaggagcttctgggccagggcctgctgctgcgcagcctgcaggagcgcaaccaggagcaggagaaggtggagcggcgccgtcaggtccccttccacctgcacatcaacctggagctgctggagtgtgtctacctggtgtctgccatgctcctggagatcccctacatggccgcccatgagagcgatgcccgccgacgcatgatcagcaagcagttccaccaccagctgcgcgtgggcgagcgacagcccctgctgggtccccctgagtccatgcgggaacatgtggtcgctgcctccaaggccatgaagatgggtgactggaagacctgtcacagttttatcatcaatgagaagatgaatgggaaagtgtgggaccttttccccgaggctgacaaagtccgcaccatgctggttaggaagatccaggaagagtcactgaggacctacctcttcacctacagcagtgtctatgactccatcagcatggagacgctgtcagacatgtttgagctggatctgcccactgtgcactccatcatcagcaaaatgatcattaatgaggagctgatggcctccctggaccagccaacacagacagtggtgatgcaccgcactgagcccactgcccagcagaacctggctctgcagctggccgagaagctgggcagcctggtggagaacaacgaacgggtgtttgaccacaagcagggcacctacgggggctacttccgagaccagaaggacggctaccgcaaaaacgagggctacatgcgccgcggtggctaccgccagcagcagtctcagacggcctactgagctctccactctgtttcccgcctgggccatccaaccttgaagtcctaaaccacacctcagtcactaaaggtctgtttaaagttgttctggttgattgcttgttgccacaaaggtgtgttgagcccattcatttgctgattatacttctgagctgctaccacatgacagacacaaggctcagatgaagaggtgaattgaacacgttcctgacctcaaagagcctgctgctttttgacatttaacagaaaattatagtaacataagttataatgggtgt

SEQ ID NO: 458388 - DNA, 2931 bp, Homo sapiens
ataggctaggtacgaggctggggtgaaatcggccgagggctgtcagggccctgcggtgtgactcgcgggctcagctggtccggccgtagcacctccgcgccgtcgccatgtcgcggtttttcaccaccggttcggacagcgagtccgagtcgtccttgtccggggaggagctcgtcaccaaacctgtcggaggcaactatggcaaacagccattgttgctgagcgaggatgaagaagataccaagagagttgtccgcagtgccaaggacaagaggtttgaggagctgaccaaccttatccggaccatccgtaatgccatgaagattcgtgatgtcaccaagtgcctggaagagtttgagctcctgggaaaagcatatgggaaggccaaaagcattgtggacaaagaaggtgtcccccggttctatatccgcatcctggctgacctagaggactatcttaatgagctttgggaagataaggaagggaagaagaagatgaacaagaacaatgccaaggctctgagcaccttgcgtcagaagatccgaaaatacaaccgtgatttcgagtcccatatcacaagctacaagcagaaccccgagcagtctgcggatgaagatgctgagaaaaatgaggaggattcagaaggctcttcagatgaggatgaggatgaggacggagtcagtgctgcaactttcttgaagaagaaatcagaagctccttctggggagagtcgcaagttcctcaaaaagatggatgatgaagatgaggactcagaagattccgaagatgatgaagactgggacacaggttccacatcttccgattccgactcagaggaggaagaagggaaacaaaccgcgctggcctcaagatttcttaaaaaggcacccaccacagatgaggacaagaaggcagccgagaagaaacgggaggacaaagctaagaagaagcacgacaggaaatccaagcgcctggatgaggaggaggaggacaatgaaggcggggagtgggaaagggtccggggcggagtgccgttggttaaggagaagccaaaaatgtttgccaagggaactgagatcacccatgctgttgttatcaagaaactgaatgagatcctacaggcacgaggcaagaagggaactgatcgtgctgcccagattgagctgctgcaactgctggttcagattgcagcggaaaacaacctgggagagggcgtcattgtcaagatcaagttcaatatcatcgcctctctctatgactacaaccccaacctggcaacctacatgaagccagagatgtgggggaagtgcctggactgcatcaatgagctgatggatatcctgtttgcaaatcccaacatttttgttggagagaatattctggaagagagtgagaacctgcacaacgctgaccagccactgcgtgtccgtggctgcatcctaactctggtggaacgaatggatgaagaatttaccaaaataatgcaaaatactgaccctcactcccaagagtacgtggagcacttgaaggatgaggcccaggtgtgtgccatcatcgagcgtgtgcagcgctacctggaggagaagggcactaccgaggaggtctgccgcatctacctgctgcgcatcctgcacacctactacaagtttgattacaaggcccatcagcgacagctgaccccgcctgagggctcctcaaagtctgagcaagaccaggcagaaaatgagggcgaggactcggctgtgttgatggagagactgtgcaagtacatctacgccaaggaccgcacagaccggatccgcacatgtgccatcctctgccacatctaccaccatgctctgcactcgcgctggtaccaggcccgcgacctcatgctcatgagccacttgcaggacaacattcagcatgcagacccgccagtgcagatcctttacaaccgcaccatggtgcagctgggcatctgtgccttccgccaaggcctgaccaaggacgcacacaacgccctgctggacatccagtcgagtggccgagccaaggagcttctgggccagggcctgctgctgcgcagcctgcaggagcgcaaccaggagcaggagaaggtggagcggcgccgtcaggtccccttccacctgcacatcaacctggagctgctggagtgtgtctacctggtgtctgccatgctcctggagatcccctacatggccgcccatgagagcgatgcccgccgacgcatgatcagcaagcagttccaccaccagctgcgcgtgggcgagcgacagcccctgctgggtccccctgagtccatgcgggaacatgtggtcgctgcctccaaggccatgaagatgggtgactggaagacctgtcacagttttatcatcaatgagaagatgaatgggaaagtgtgggaccttttccccgaggctgacaaagtccgcaccatgctggttaggaagatccaggaagagtcactgaggacctacctcttcacctacagcagtgtctatgactccatcagcatggagacgctgtcagacatgtttgagctggatctgcccactgtgcactccatcatcagcaaaatgatcattaatgaggagctgatggcctccctggaccagccaacacagacagtggtgatgcaccgcactgagcccactgcccagcagaacctggctctgcagctggccgagaagctgggcagcctggtggagaacaacgaacgggtgtttgaccacaagcagggcacctacgggggctacttccgagaccagaaggacggctaccgcaaaaacgagggctacatgcgccgcggtggctaccgccagcagcagtctcagacggcctactgagctctccactctgtttcccgcctgggccatccaaccttgaagtcctaaaccacacctcagtcactaaaggtctgtttaaagt

SEQ ID NO: 458389 - DNA, 3288 bp, Homo sapiens
ataggctaggtacgaggctggggtgaaatcggccgagggctgtcagggccctgcggtgtgactcgcgggctcagctggtccggccgtagcacctccgcgccgtcgccatgtcgcggtttttcaccaccggttcggacagcgagtccgagtcgtccttgtccggggaggagctcgtcaccaaacctgtcggaggcaactatggcaaacagccattgttgctgagcgaggatgaagaagataccaagagagttgtccgcagtgccaaggacaagaggtttgaggagctgaccaaccttatccggaccatccgtaatgccatgaagattcgtgatgtcaccaagtgcctggaagagtttgagctcctgggaaaagcatatgggaaggccaaaagcattgtggacaaagaaggtgtcccccggttctatatccgcatcctggctgacctagaggactatcttaatgagctttgggaagataaggaagggaagaagaagatgaacaagaacaatgccaaggctctgagcaccttgcgtcagaagatccgaaaatacaaccgtgatttcgagtcccatatcacaagctacaagcagaaccccgagcagtctgcggatgaagatgctgagaaaaatgaggaggattcagaaggctcttcagatgaggatgaggatgaggacggagtcagtgctgcaactttcttgaagaagaaatcagaagctccttctggggagagtcgcaagttcctcaaaaagatggatgatgaagatgaggactcagaagattccgaagatgatgaagactgggacacaggttccacatcttccgattccgactcagaggaggaagaagggaaacaaaccgcgctggcctcaagatttcttaaaaaggcacccaccacagatgaggacaagaaggcagccgagaagaaacgggaggacaaagctaagaagaagcacgacaggaaatccaagcgcctggatgaggaggaggaggacaatgaaggcggggagtgggaaagggtccggggcggagtgccgttggttaaggagaagccaaaaatgtttgccaagggaactgagatcacccatgctgttgttatcaagaaactgaatgagatcctacaggcacgaggcaagaagggaactgatcgtgctgcccagattgagctgctgcaactgctggttcagattgcagcggaaaacaacctgggagagggcgtcattgtcaagatcaagttcaatatcatcgcctctctctatgactacaaccccaacctggcaacctacatgaagccagagatgtgggggaagtgcctggactgcatcaatgagctgatggatatcctgtttgcaaatcccaacatttttgttggagagaatattctggaagagagtgagaacctgcacaacgctgaccagccactgcgtgtccgtggctgcatcctaactctggtggaacgaatggatgaagaatttaccaaaataatgcaaaatactgaccctcactcccaagagtacgtggagcacttgaaggatgaggcccaggtgtgtgccatcatcgagcgtgtgcagcgctacctggaggagaagggcactaccgaggaggtctgccgcatctacctgctgcgcatcctgcacacctactacaagtttgattacaaggcccatcagcgacagctgaccccgcctgagggctcctcaaagtctgagcaagaccaggcagaaaatgagggcgaggactcggctgtgttgatggagagactgtgcaagtacatctacgccaaggaccgcacagaccggatccgcacatgtgccatcctctgccacatctaccaccatgctctgcactcgcgctggtaccaggcccgcgacctcatgctcatgagccacttgcaggacaacattcagcatgcagacccgccagtgcagatcctttacaaccgcaccatggtgcagctgggcatctgtgccttccgccaaggcctgaccaaggacgcacacaacgccctgctggacatccagtcgagtggccgagccaaggagcttctgggccagggcctgctgctgcgcagcctgcaggagcgcaaccaggagcaggagaaggtggagcggcgccgtcaggtccccttccacctgcacatcaacctggagctgctggagtgtgtctacctggtgtctgccatgctcctggagatcccctacatggccgcccatgagagcgatgcccgccgacgcatgatcagcaagcagttccaccaccagctgcgcgtgggcgagcgacagcccctgctgggtccccctgagtccatgcgggaacatgtggtcgctgcctccaaggccatgaagatgggtgactggaagacctgtcacagttttatcatcaatgagaagatgaatgggaaagtgtgggaccttttccccgaggctgacaaagtccgcaccatgctggttaggaagatccaggaagagtcactgaggacctacctcttcacctacagcagtgtctatgactccatcagcatggagacgctgtcagacatgtttgagctggatctgcccactgtgcactccatcatcagcaaaatgatcattaatgaggagctgatggcctccctggaccagccaacacagacagtggtgatgcaccgcactgagcccactgcccagcagaacctggctctgcagctggccgagaagctgggcagcctggtggagaacaacgaacgggtgtttgaccacaagcagggcacctacgggggctacttccgagaccagaaggacggctaccgcaaaaacgagggctacatgcgccgcggtggctaccgccagcagcagtctcagacggcctactgagctctccactctgtttcccgcctgggccatccaaccttgaagtcctaaaccacacctcagtcactaaaggtctgtttaaagtttaaaaaaaaaaaaaaaaaaaaaaaaacaaaaacaaaaaaaaaaaacacaaaaaaagaagggagaccagacgcctaacaactagtaccccttaagaagggccgcaaaagcgcgggggccccgaccagtttcttactcacaagaggggcgcgcaccacattaatagacgcgtgtcgatctatttagaattcttatcgaaataggcggcgcggagcgtatatataaaccatgccgtcttagtaataatagtaataaatatgtcatccctcttcgtgtcagttttttttttaacagacagacctctctttatctactcagcggagtggtgctccaatattttgcgtaactaccaccaagt

SEQ ID NO: 458390 - DNA, 3429 bp, Homo sapiens
ataggctaggtacgaggctggggtgaaatcggccgagggctgtcagggccctgcggtgtgactcgcgggctcagctggtccggccgtagcacctccgcgccgtcgccatgtcgcggtttttcaccaccggttcggacagcgagtccgagtcgtccttgtccggggaggagctcgtcaccaaacctgtcggaggcaactatggcaaacagccattgttgctgagcgaggatgaagaagataccaagagagttgtccgcagtgccaaggacaagaggtttgaggagctgaccaaccttatccggaccatccgtaatgccatgaagattcgtgatgtcaccaagtgcctggaagagtttgagctcctgggaaaagcatatgggaaggccaaaagcattgtggacaaagaaggtgtcccccggttctatatccgcatcctggctgacctagaggactatcttaatgagctttgggaagataaggaagggaagaagaagatgaacaagaacaatgccaaggctctgagcaccttgcgtcagaagatccgaaaatacaaccgtgatttcgagtcccatatcacaagctacaagcagaaccccgagcagtctgcggatgaagatgctgagaaaaatgaggaggattcagaaggctcttcagatgaggatgaggatgaggacggagtcagtgctgcaactttcttgaagaagaaatcagaagctccttctggggagagtcgcaagttcctcaaaaagatggatgatgaagatgaggactcagaagattccgaagatgatgaagactgggacacaggttccacatcttccgattccgactcagaggaggaagaagggaaacaaaccgcgctggcctcaagatttcttaaaaaggcacccaccacagatgaggacaagaaggcagccgagaagaaacgggaggacaaagctaagaagaagcacgacaggaaatccaagcgcctggatgaggaggaggaggacaatgaaggcggggagtgggaaagggtccggggcggagtgccgttggttaaggagaagccaaaaatgtttgccaagggaactgagatcacccatgctgttgttatcaagaaactgaatgagatcctacaggcacgaggcaagaagggaactgatcgtgctgcccagattgagctgctgcaactgctggttcagattgcagcggaaaacaacctgggagagggcgtcattgtcaagatcaagttcaatatcatcgcctctctctatgactacaaccccaacctggcaacctacatgaagccagagatgtgggggaagtgcctggactgcatcaatgagctgatggatatcctgtttgcaaatcccaacatttttgttggagagaatattctggaagagagtgagaacctgcacaacgctgaccagccactgcgtgtccgtggctgcatcctaactctggtggaacgaatggatgaagaatttaccaaaataatgcaaaatactgaccctcactcccaagagtacgtggagcacttgaaggatgaggcccaggtgtgtgccatcatcgagcgtgtgcagcgctacctggaggagaagggcactaccgaggaggtctgccgcatctacctgctgcgcatcctgcacacctactacaagtttgattacaaggcccatcagcgacagctgaccccgcctgagggctcctcaaagtctgagcaagaccaggcagaaaatgagggcgaggactcggctgtgttgatggagagactgtgcaagtacatctacgccaaggaccgcacagaccggatccgcacatgtgccatcctctgccacatctaccaccatgctctgcactcgcgctggtaccaggcccgcgacctcatgctcatgagccacttgcaggacaacattcagcatgcagacccgccagtgcagatcctttacaaccgcaccatggtgcagctgggcatctgtgccttccgccaaggcctgaccaaggacgcacacaacgccctgctggacatccagtcgagtggccgagccaaggagcttctgggccagggcctgctgctgcgcagcctgcaggagcgcaaccaggagcaggagaaggtggagcggcgccgtcaggtccccttccacctgcacatcaacctggagctgctggagtgtgtctacctggtgtctgccatgctcctggagatcccctacatggccgcccatgagagcgatgcccgccgacgcatgatcagcaagcagttccaccaccagctgcgcgtgggcgagcgacagcccctgctgggtccccctgagtccatgcgggaacatgtggtcgctgcctccaaggccatgaagatgggtgactggaagacctgtcacagttttatcatcaatgagaagatgaatgggaaagtgtgggaccttttccccgaggctgacaaagtccgcaccatgctggttaggaagatccaggaagagtcactgaggacctacctcttcacctacagcagtgtctatgactccatcagcatggagacgctgtcagacatgtttgagctggatctgcccactgtgcactccatcatcagcaaaatgatcattaatgaggagctgatggcctccctggaccagccaacacagacagtggtgatgcaccgcactgagcccactgcccagcagaacctggctctgcagctggccgagaagctgggcagcctggtggagaacaacgaacgggtgtttgaccacaagcagggcacctacgggggctacttccgagaccagaaggacggctaccgcaaaaacgagggctacatgcgccgcggtggctaccgccagcagcagtctcagacggcctactgagctctccactctgtttcccgcctgggccatccatagtgactgaggtgtggtttaggacttcaaacttcgggcggaggctgagcgccggcggcgaggcagcggcggactcggggccgcggcggagtcgaggcattgcacctgggcttcggagcgtagcgccagggcctgagccctttgaagcaggagcgagcgggaggcagaccagctgggggcgtccatcatactccggcaaaaccccaataccaccatgctggtacctcctgacccagcgcagcccggacggacgcacggcgctactgccggcaagcgacgacggccagcagacccgaacgaaacgaaatggcccccggcccactacagctccccagccccctgagtaatgagagccagaccacagacaggcaccagcctcccagcgcatcgttgctgcagcacgggccccgccccgacgacccaatacagatcagaaaacgagcagacagaatccggactatacaaaacacccccggccttaacaacaacacaacaccaaggcagcagactaaccaaccaagaacgcacggcaaccacaagacatact

SEQ ID NO: 458391 - DNA, 2613 bp, Homo sapiens
atggctagtgggcgggggtagcgaagatccgaaaatacaaccgtgatttcgagtcccatatcacaagctacaagcagaaccccgagcagtctgcggatgaagatgctgagaaaaatgaggaggattcagaaggctcttcagatgaggatgaggatgaggacggagtcagtgctgcaactttcttgaagaagaaatcagaagctccttctggggagagtcgcaagttcctcaaaaagatggatgatgaagatgaggactcagaagattccgaagatgatgaagactgggacacaggttccacatcttccgattccgactcagaggaggaagaagggaaacaaaccgcgctggcctcaagatttcttaaaaaggcacccaccacagatgaggacaagaaggcagccgagaagaaacgggaggacaaagctaagaagaagcacgacaggaaatccaagcgcctggatgaggaggaggaggacaatgaaggcggggagtgggaaagggtccggggcggagtgccgttggttaaggagaagccaaaaatgtttgccaagggaactgagatcacccatgctgttgttatcaagaaactgaatgagatcctacaggcacgaggcaagaagggaactgatcgtgctgcccagattgagctgctgcaactgctggttcagattgcagcggaaaacaacctgggagagggcgtcattgtcaagatcaagttcaatatcatcgcctctctctatgactacaaccccaacctggcaacctacatgaagccagagatgtgggggaagtgcctggactgcatcaatgagctgatggatatcctgtttgcaaatcccaacatttttgttggagagaatattctggaagagagtgagaacctgcacaacgctgaccagccactgcgtgtccgtggctgcatcctaactctggtggaacgaatggatgaagaatttaccaaaataatgcaaaatactgaccctcactcccaagagtacgtggagcacttgaaggatgaggcccaggtgtgtgccatcatcgagcgtgtgcagcgctacctggaggagaagggcactaccgaggaggtctgccgcatctacctgctgcgcatcctgcacacctactacaagtttgattacaaggcccatcagcgacagctgaccccgcctgagggctcctcaaagtctgagcaagaccaggcagaaaatgagggcgaggactcggctgtgttgatggagagactgtgcaagtacatctacgccaaggaccgcacagaccggatccgcacatgtgccatcctctgccacatctaccaccatgctctgcactcgcgctggtaccaggcccgcgacctcatgctcatgagccacttgcaggacaacattcagcatgcagacccgccagtgcagatcctttacaaccgcaccatggtgcagctgggcatctgtgccttccgccaaggcctgaccaaggacgcacacaacgccctgctggacatccagtcgagtggccgagccaaggagcttctgggccagggcctgctgctgcgcagcctgcaggagcgcaaccaggagcaggagaaggtggagcggcgccgtcaggtccccttccacctgcacatcaacctggagctgctggagtgtgtctacctggtgtctgccatgctcctggagatcccctacatggccgcccatgagagcgatgcccgccgacgcatgatcagcaagcagttccaccaccagctgcgcgtgggcgagcgacagcccctgctgggtccccctgagtccatgcgggaacatgtggtcgctgcctccaaggccatgaagatgggtgactggaagacctgtcacagttttatcatcaatgagaagatgaatgggaaagtgtgggaccttttccccgaggctgacaaagtccgcaccatgctggttaggaagatccaggaagagtcactgaggacctacctcttcacctacagcagtgtctatgactccatcagcatggagacgctgtcagacatgtttgagctggatctgcccactgtgcactccatcatcagcaaaatgatcattaatgaggagctgatggcctccctggaccagccaacacagacagtggtgatgcaccgcactgagcccactgcccagcagaacctggctctgcagctggccgagaagctgggcagcctggtggagaacaacgaacgggtgtttgaccacaagcagggcacctacgggggctacttccgagaccagaaggacggctaccgcaaaaacgagggctacatgcgccgcggtggctaccgccagcagcagtctcagacggcctactgagctctccactctgtttcccgcctgggccatccaaccttgaagtcctaaaccacacctcagtcactaaaggtctgtttaaagttgttctggttgattgcttgttgccacaaaggtgtgttgagcccattcatttgctgattatacttctgagctgctaccacatgacagacacaaggctcagatgaagaggtgaattgaacacgttcctgacctcaaagagcctgctgctttttgacatttaacagaaaattatagtaacataagttataatgggtgt

SEQ ID NO: 458392 - DNA, 2930 bp, Homo sapiens
ataggctaggtacgaggctggggtgaaatcggccgagggctgtcagggccctgcggtgtgactcgcgggctcagctggtccggccgtagcacctccgcgccgtcgccatgtcgcggtttttcaccaccggttcggacagcgagtccgagtcgtccttgtccggggaggagctcgtcaccaaacctgtcggaggcaactatggcaaacagccattgttgctgagcgaggatgaagaagataccaagagagttgtccgcagtgccaaggacaagaggtttgaggagctgaccaaccttatccggaccatccgtaatgccatgaagattcgtgatgtcaccaagtgcctggaagagtttgagctcctgggaaaagcatatgggaaggccaaaagcattgtggacaaagaaggtgtcccccggttctatatccgcatcctggctgacctagaggactatcttaatgagctttgggaagataaggaagggaagaagaagatgaacaagaacaatgccaaggctctgagcaccttgcgtcagaagatccgaaaatacaaccgtgatttcgagtcccatatcacaagctacaagcagaaccccgagcagtctgcggatgaagatgctgagaaaaatgaggaggattcagaaggctcttcagatgaggatgaggatgaggacggagtcagtgctgcaactttcttgaagaagaaatcagaagctccttctggggagagtcgcaagttcctcaaaaagatggatgatgaagatgaggactcagaagattccgaagatgatgaagactgggacacaggttccacatcttccgattccgactcagaggaggaagaagggaaacaaaccgcgctggcctcaagatttcttaaaaaggcacccaccacagatgaggacaagaaggcagccgagaagaaacgggaggacaaagctaagaagaagcacgacaggaaatccaagcgcctggatgaggaggaggaggacaatgaaggcggggagtgggaaagggtccggggcggagtgccgttggttaaggagaagccaaaaatgtttgccaagggaactgagatcacccatgctgttgttatcaagaaactgaatgagatcctacaggcacgaggcaagaagggaactgatcgtgctgcccagattgagctgctgcaactgctggttcagattgcagcggaaaacaacctgggagagggcgtcattgtcaagatcaagttcaatatcatcgcctctctctatgactacaaccccaacctggcaacctacatgaagccagagatgtgggggaagtgcctggactgcatcaatgagctgatggatatcctgtttgcaaatcccaacatttttgttggagagaatattctggaagagagtgagaacctgcacaacgctgaccagccactgcgtgtccgtggctgcatcctaactctggtggaacgaatggatgaagaatttaccaaaataatgcaaaatactgaccctcactcccaagagtacgtggagcacttgaaggatgaggcccaggtgtgtgccatcatcgagcgtgtgcagcgctacctggaggagaagggcactaccgaggaggtctgccgcatctacctgctgcgcatcctgcacacctactacaagtttgattacaaggcccatcagcgacagctgaccccgcctgagggctcctcaaagtctgagcaagaccaggcagaaaatgagggcgaggactcggctgtgttgatggagagactgtgcaagtacatctacgccaaggaccgcacagaccggatccgcacatgtgccatcctctgccacatctaccaccatgctctgcactcgcgctggtaccaggcccgcgacctcatgctcatgagccacttgcaggacaacattcagcatgcagacccgccagtgcagatcctttacaaccgcaccatggtgcagctgggcatctgtgccttccgccaaggcctgaccaaggacgcacacaacgccctgctggacatccagtcgagtggccgagccaaggagcttctgggccagggcctgctgctgcgcagcctgcaggagcgcaaccaggagcaggagaaggtggagcggcgccgtcaggtccccttccacctgcacatcaacctggagctgctggagtgtgtctacctggtgtctgccatgctcctggagatcccctacatggccgcccatgagagcgatgcccgccgacgcatgatcagcaagcagttccaccaccagctgcgcgtgggcgagcgacagcccctgctgggtccccctgagtccatgcgggaacatgtggtcgctgcctccaaggccatgaagatgggtgactggaagacctgtcacagttttatcatcaatgagaagatgaatgggaaagtgtgggaccttttccccgaggctgacaaagtccgcaccatgctggttaggaagatccaggaagagtcactgaggacctacctcttcacctacagcagtgtctatgactccatcagcatggagacgctgtcagacatgtttgagctggatctgcccactgtgcactccatcatcagcaaaatgatcattaatgaggagctgatggcctccctggaccagccaacacagacagtggtgatgcaccgcactgagcccactgcccagcagaacctggctctgcagctggccgagaagctgggcagcctggtggagaacaacgaacgggtgtttgaccacaagcagggcacctacgggggctacttccgagaccagaaggacggctaccgcaaaaacgagggctacatccacgccggtcggtccctggaacatttttattgtaagacggattgtggtttaaaatatggttttaaaaaaaaccagaaaataaaatagtcattttatgtgctcccgtcaaaaaaggtatgtttaaaa

SEQ ID NO: 458393 - DNA, 3070 bp, Homo sapiens
ataggctaggtacgaggctggggtgaaatcggccgagggctgtcagggccctgcggtgtgactcgcgggctcagctggtccggccgtagcacctccgcgccgtcgccatgtcgcggtttttcaccaccggttcggacagcgagtccgagtcgtccttgtccggggaggagctcgtcaccaaacctgtcggaggcaactatggcaaacagccattgttgctgagcgaggatgaagaagataccaagagagttgtccgcagtgccaaggacaagaggtttgaggagctgaccaaccttatccggaccatccgtaatgccatgaagattcgtgatgtcaccaagtgcctggaagagtttgagctcctgggaaaagcatatgggaaggccaaaagcattgtggacaaagaaggtgtcccccggttctatatccgcatcctggctgacctagaggactatcttaatgagctttgggaagataaggaagggaagaagaagatgaacaagaacaatgccaaggctctgagcaccttgcgtcagaagatccgaaaatacaaccgtgatttcgagtcccatatcacaagctacaagcagaaccccgagcagtctgcggatgaagatgctgagaaaaatgaggaggattcagaaggctcttcagatgaggatgaggatgaggacggagtcagtgctgcaactttcttgaagaagaaatcagaagctccttctggggagagtcgcaagttcctcaaaaagatggatgatgaagatgaggactcagaagattccgaagatgatgaagactgggacacaggttccacatcttccgattccgactcagaggaggaagaagggaaacaaaccgcgctggcctcaagatttcttaaaaaggcacccaccacagatgaggacaagaaggcagccgagaagaaacgggaggacaaagctaagaagaagcacgacaggaaatccaagcgcctggatgaggaggaggaggacaatgaaggcggggagtgggaaagggtccggggcggagtgccgttggttaaggagaagccaaaaatgtttgccaagggaactgagatcacccatgctgttgttatcaagaaactgaatgagatcctacaggcacgaggcaagaagggaactgatcgtgctgcccagattgagctgctgcaactgctggttcagattgcagcggaaaacaacctgggagagggcgtcattgtcaagatcaagttcaatatcatcgcctctctctatgactacaaccccaacctggcaacctacatgaagccagagatgtgggggaagtgcctggactgcatcaatgagctgatggatatcctgtttgcaaatcccaacatttttgttggagagaatattctggaagagagtgagaacctgcacaacgctgaccagccactgcgtgtccgtggctgcatcctaactctggtggaacgaatggatgaagaatttaccaaaataatgcaaaatactgaccctcactcccaagagtacgtggagcacttgaaggatgaggcccaggtgtgtgccatcatcgagcgtgtgcagcgctacctggaggagaagggcactaccgaggaggtctgccgcatctacctgctgcgcatcctgcacacctactacaagtttgattacaaggcccatcagcgacagctgaccccgcctgagggctcctcaaagactgtgcaagtacatctacgccaaggaccgcacagaccggatccgcacatgtgccatcctctgccacatctaccaccatgctctgcactcgcgctggtaccaggcccgcgacctcatgctcatgagccacttgcaggacaacattcagcatgcagacccgccagtgcagatcctttacaaccgcaccatggtgcagctgggcatctgtgccttccgccaaggcctgaccaaggacgcacacaacgccctgctggacatccagtcgagtggccgagccaaggagcttctgggccagggcctgctgctgcgcagcctgcaggagcgcaaccaggagcaggagaaggtggagcggcgccgtcaggtccccttccacctgcacatcaacctggagctgctggagtgtgtctacctggtgtctgccatgctcctggagatcccctacatggccgcccatgagagcgatgcccgccgacgcatgatcagcaagcagttccaccaccagctgcgcgtgggcgagcgacagcccctgctgggtccccctgagtccatgcgggaacatgtggtcgctgcctccaaggccatgaagatgggtgactggaagacctgtcacagttttatcatcaatgagaagatgaatgggaaagtgtgggaccttttccccgaggctgacaaagtccgcaccatgctggttaggaagatccaggaagagtcactgaggacctacctcttcacctacagcagtgtctatgactccatcagcatggagacgctgtcagacatgtttgagctggatctgcccactgtgcactccatcatcagcaaaatgatcattaatgaggagctgatggcctccctggaccagccaacacagacagtggtgatgcaccgcactgagcccactgcccagcagaacctggctctgcagctggccgagaagctgggcagcctggtggagaacaacgaacgggtgtttgaccacaagcagggcacctacgggggctacttccgagaccagaaggacggctaccgcaaaaacgagggctacatgcgccgcggtggctaccgccagcagcagtctcagacggcctactgagctctccactctgtttcccgcctgggccatccaaccttgaagtcctaaaccacacctcagtcactaaaggtctgtttaaagttgttctggttgattgcttgttgccacaaaggtgtgttgagcccattcatttgctgattatacttctgagctgctaccacatgacagacacaaggctcagatgaagaggtgaattgaacacgttcctgacctcaaagagcctgctgctttttgacatttaacagaaaattatagtaacataagttataatgggtgt

SEQ ID NO: 458394 - DNA, 2482 bp, Homo sapiens
gtgatcatagtacgacccgggtgtattcatgcagagggtgctgcaactttcttgaagaagaaatcagaagctccttctggggagagtcgcaagttcctcaaaaagatggatgatgaagatgaggactcagaagattccgaagatgatgaagactgggacacaggttccacatcttccgattccgactcagaggaggaagaagggaaacaaaccgcgctggcctcaagatttcttaaaaaggcacccaccacagatgaggacaagaaggcagccgagaagaaacgggaggacaaagctaagaagaagcacgacaggaaatccaagcgcctggatgaggaggaggaggacaatgaaggcggggagtgggaaagggtccggggcggagtgccgttggttaaggagaagccaaaaatgtttgccaagggaactgagatcacccatgctgttgttatcaagaaactgaatgagatcctacaggcacgaggcaagaagggaactgatcgtgctgcccagattgagctgctgcaactgctggttcagattgcagcggaaaacaacctgggagagggcgtcattgtcaagatcaagttcaatatcatcgcctctctctatgactacaaccccaacctggcaacctacatgaagccagagatgtgggggaagtgcctggactgcatcaatgagctgatggatatcctgtttgcaaatcccaacatttttgttggagagaatattctggaagagagtgagaacctgcacaacgctgaccagccactgcgtgtccgtggctgcatcctaactctggtggaacgaatggatgaagaatttaccaaaataatgcaaaatactgaccctcactcccaagagtacgtggagcacttgaaggatgaggcccaggtgtgtgccatcatcgagcgtgtgcagcgctacctggaggagaagggcactaccgaggaggtctgccgcatctacctgctgcgcatcctgcacacctactacaagtttgattacaaggcccatcagcgacagctgaccccgcctgagggctcctcaaagtctgagcaagaccaggcagaaaatgagggcgaggactcggctgtgttgatggagagactgtgcaagtacatctacgccaaggaccgcacagaccggatccgcacatgtgccatcctctgccacatctaccaccatgctctgcactcgcgctggtaccaggcccgcgacctcatgctcatgagccacttgcaggacaacattcagcatgcagacccgccagtgcagatcctttacaaccgcaccatggtgcagctgggcatctgtgccttccgccaaggcctgaccaaggacgcacacaacgccctgctggacatccagtcgagtggccgagccaaggagcttctgggccagggcctgctgctgcgcagcctgcaggagcgcaaccaggagcaggagaaggtggagcggcgccgtcaggtccccttccacctgcacatcaacctggagctgctggagtgtgtctacctggtgtctgccatgctcctggagatcccctacatggccgcccatgagagcgatgcccgccgacgcatgatcagcaagcagttccaccaccagctgcgcgtgggcgagcgacagcccctgctgggtccccctgagtccatgcgggaacatgtggtcgctgcctccaaggccatgaagatgggtgactggaagacctgtcacagttttatcatcaatgagaagatgaatgggaaagtgtgggaccttttccccgaggctgacaaagtccgcaccatgctggttaggaagatccaggaagagtcactgaggacctacctcttcacctacagcagtgtctatgactccatcagcatggagacgctgtcagacatgtttgagctggatctgcccactgtgcactccatcatcagcaaaatgatcattaatgaggagctgatggcctccctggaccagccaacacagacagtggtgatgcaccgcactgagcccactgcccagcagaacctggctctgcagctggccgagaagctgggcagcctggtggagaacaacgaacgggtgtttgaccacaagcagggcacctacgggggctacttccgagaccagaaggacggctaccgcaaaaacgagggctacatgcgccgcggtggctaccgccagcagcagtctcagacggcctactgagctctccactctgtttcccgcctgggccatccaaccttgaagtcctaaaccacacctcagtcactaaaggtctgtttaaagttgttctggttgattgcttgttgccacaaaggtgtgttgagcccattcatttgctgattatacttctgagctgctaccacatgacagacacaaggctcagatgaagaggtgaattgaacacgttcctgacctcaaagagcctgctgctttttgacatttaacagaaaattatagtaacataagttataatgggtgt

SEQ ID NO: 458395 - DNA, 3029 bp, Homo sapiens
ataggctaggtacgaggctggggtgaaatcggccgagggctgtcagggccctgcggtgtgactcgcgggctcagctggtccggccgtagcacctccgcgccgtcgccatgtcgcggtttttcaccaccggttcggacagcgagtccgagtcgtccttgtccggggaggagctcgtcaccaaacctgtcggaggcaactatggcaaacagccattgttgctgagcgaggatgaagaagataccaagagagttgtccgcagtgccaaggacaagaggtttgaggagctgaccaaccttatccggaccatccgtaatgccatgaagattcgtgatgtcaccaagtgcctggaagagtttgagctcctgggaaaagcatatgggaaggccaaaagcattgtggacaaagaaggtgtcccccggttctatatccgcatcctggctgacctagaggactatcttaatgagctttgggaagataaggaagggaagaagaagatgaacaagaacaatgccaaggctctgagcaccttgcgtcagaagatccgaaaatacaaccgtgatttcgagtcccatatcacaagctacaagcagaaccccgagcagtctgcggatgaagatgctgagaaaaatgaggaggattcagaaggctcttcagatgaggatgaggatgaggacggagtcagtgctgcaactttcttgaagaagaaatcagaagctccttctggggagagtcgcaagttcctcaaaaagatggatgatgaagatgaggactcagaagattccgaagatgatgaagactgggacacaggttccacatcttccgattccgactcagaggaggaagaagggaaacaaaccgcgctggcctcaagatttcttaaaaaggcacccaccacagatgaggacaagaaggcagccgagaagaaacgggaggacaaagctaagaagaagcacgacaggaaatccaagcgcctggatgaggaggaggaggacaatgaaggcggggagtgggaaagggtccggggcggagtgccgttggttaaggagaagccaaaaatgtttgccaagggaactgagatcacccatgctgttgttatcaagaaactgaatgagatcctacaggcacgaggcaagaagggaactgatcgtgctgcccagattgagctgctgcaactgctggttcagattgcagcggaaaacaacctgggagagggcgtcattgtcaagatcaagttcaatatcatcgcctctctctatgactacaaccccaacctggcaacctacatgaagccagagatgtgggggaagtgcctggactgcatcaatgagctgatggatatcctgtttgcaaatcccaacatttttgttggagagaatattctggaagagagtgagaacctgcacaacgctgaccagccactgcgtgtccgtggctgcatcctaactctggtggaacgaatggatgaagaatttaccaaaataatgcaaaatactgaccctcactcccaagagtacgtggagcacttgaaggatgaggcccaggtgtgtgccatcatcgagcgtgtgcagcgctacctggaggagaagggcactaccgaggaggtctgccgcatctacctgctgcgcatcctgcacacctactacaagtttgattacaaggcccatcagcgacagctgaccccgcctgagggctcctcaaagtctgagcaagaccaggcagaaaatgagggcgaggactcggctgtgttgatggagagactgtgcaagtacatctacgccaaggaccgcacagaccggatccgcacatgtgccatcctctgccacatctaccaccatgctctgcactcgcgctggtaccaggcccgcgacctcatgctcatgagccacttgcaggacaacattcagcatgcagacccgccagtgcagatcctttacaaccgcaccatggtgcagctgggcatctgtgccttccgccaaggcctgaccaaggacgcacacaacgccctgctggacatccagtcgagtggccgagccaaggagcttctgggccagggcctgctgctgcgcagcctgcaggagcgcaaccaggagcaggagaaggtggagcggcgccgtcaggtccccttccacctgcacatcaacctggagctgctggagtgtgtctacctggtgtctgccatgctcctggagatcccctacatggccgcccatgagagcgatgcccgccgacgcatgatcagcaagcagttccaccaccagctgcgcgtgggcgagcgacagcccctgctgggtccccctgagtccatgcgggaacatgtggtcgctgcctccaaggccatgaagatgggtgactggaagacctgtcacagttttatcatcaatgagaagatgaatgggaaagtgtgggaccttttccccgaggctgacaaagtccgcaccatgctggttaggtgagcagacagagaggccgtgatgggtcggggaagaagagactggttggtccccttccctgaggccctgttgtgtcttctgtcccctcttcccacaggaagatccaggaagagtcactgaggacctacctcttcacctacagcagtgtctatgactccatcagcatggagacgctgtcagacatgtttgagctggatctgcccactgtgcactccatcatcagcaaaatgatcattaatgaggagctgatggcctccctggaccagccaacacagacagtggtgatgcaccgcactgagcccactgcccagcagaacctggctctgcagctggccgagaagctgggcagcctggtggagaacaacgaacgggtgtttgaccacaagcagggcacctacgggggctacttccgagaccagaaggacggctaccgcaaaaacgagggctacatgcgccgcggtggctaccgccagcagcagtctcagacggcctactgagctctccactctgtttcccgcctgggccatccaaccttgaagtcctaaaccacacctcagtcactaaaggtctgtttaaagt

SEQ ID NO: 458396 - DNA, 3262 bp, Homo sapiens
ataggctaggtacgaggctggggtgaaatcggccgagggctgtcagggccctgcggtgtgactcgcgggctcagctggtccggccgtagcacctccgcgccgtcgccatgtcgcggtttttcaccaccggttcggacagcgagtccgagtcgtccttgtccggggaggagctcgtcaccaaacctgtcggaggcaactatggcaaacagccattgttgctgagcgaggatgaagaagataccaagagagttgtccgcagtgccaaggacaagaggtttgaggagctgaccaaccttatccggaccatccgtaatgccatgaagattcgtgatgtcaccaagtgcctggaagagtttgagctcctgggaaaagcatatgggaaggccaaaagcattgtggacaaagaaggtgtcccccggttctatatccgcatcctggctgacctagaggactatcttaatgagctttgggaagataaggaagggaagaagaagatgaacaagaacaatgccaaggctctgagcaccttgcgtcagaagatccgaaaatacaaccgtgatttcgagtcccatatcacaagctacaagcagaaccccgagcagtctgcggatgaagatgctgagaaaaatgaggaggattcagaaggctcttcagatgaggatgaggatgaggacggagtcagtgctgcaactttcttgaagaagaaatcagaagctccttctggggagagtcgcaagttcctcaaaaagatggatgatgaagatgaggactcagaagattccgaagatgatgaagactgggacacaggttccacatcttccgattccgactcagaggaggaagaagggaaacaaaccgcgctggcctcaagatttcttaaaaaggcacccaccacagatgaggacaagaaggcagccgagaagaaacgggaggacaaagctaagaagaagcacgacaggaaatccaagcgcctggatgaggaggaggaggacaatgaaggcggggagtgggaaagggtccggggcggagtgccgttggttaaggagaagccaaaaatgtttgccaagggaactgagatcacccatgctgttgttatcaagaaactgaatgagatcctacaggcacgaggcaagaagggaactgatcgtgctgcccagattgagctgctgcaactgctggttcagattgcagcggaaaacaacctgggagagggcgtcattgtcaagatcaagttcaatatcatcgcctctctctatgactacaaccccaacctggcaacctacatgaagccagagatgtgggggaagtgcctggactgcatcaatgagctgatggatatcctgtttgcaaatcccaacatttttgttggagagaatattctggaagagagtgagaacctgcacaacgctgaccagccactgcgtgtccgtggctgcatcctaactctggtggaacgaatggatgaagaatttaccaaaataatgcaaaatactgaccctcactcccaagagtacgtggagcacttgaaggatgaggcccaggtgtgtgccatcatcgagcgtgtgcagcgctacctggaggagaagggcactaccgaggaggtctgccgcatctacctgctgcgcatcctgcacacctactacaagtttgattacaaggcccatcagcgacagctgaccccgcctgagggctcctcaaagtctgagcaagaccaggcagaaaatgagggcgaggactcggctgtgttgatggagagactgtgcaagtacatctacgccaaggaccgcacagaccggatccgcacatgtgccatcctctgccacatctaccaccatgctctgcactcgcgctggtaccaggcccgcgacctcatgctcatgagccacttgcaggacaacattcagcatgcagacccgccagtgcagatcctttacaaccgcaccatggtgcagctgggcatctgtgccttccgccaaggcctgaccaaggacgcacacaacgccctgctggacatccagtcgagtggccgagccaaggagcttctgggccagggcctgctgctgcgcagcctgcaggagcgcaaccaggagcaggagaaggtggagcggcgccgtcaggtccccttccacctgcacatcaacctggagctgctggagtgtgtctacctggtgtctgccatgctcctggagatcccctacatggccgcccatgagagcgatgcccgccgacgcatgatcagcaagcagttccaccaccagctgcgcgtgggcgagcgacagcccctgctgggtccccctgagtccatgcgggaacatgtggtcgctgcctccaaggccatgaagatgggtgactggaagacctgtcacagttttatcatcaatgagaagatgaatgggaaagtgtgggaccttttccccgaggctgacaaagtccgcaccatgctggttaggaagatccaggaagagtcactgaggacctacctcttcacctacagcagtgtctatgactccatcagcatggagacgctgtcagcctcggggaaaaggtcccacactttcccattcatcttctcattgatgataaaactgtgactggaagacctgtcacagttttatcatcaatgagaagatgaatgggaaagctgcgaccttccccctcagacacccacaattaattgtttccaatcagctttgggcagctttgagaagcggtacaagagttctgtgcctgtgtgtccagccctggagccagccagtgcatttattttaagctcttagaagcaactccttggcccaggaatgcgtgacccctgagatgggtccacgcatctctctacacttccttctctccgtgggatactggactcgtgcctctgcgcccattctcttctcacgcatatccatgagctttaatttcactttctgatcacggtacgtccataaagccagtattacacttaaatgaagtattctttgttgtaatcgttttttttagaaggtaaacaaatttaataaagctaccaataatgttaaaaaaaaaaaaaaaaaaaaaaaaaaaaaaggggggggcacgataaagaagagaataccccacgagaggggcacccaaggaactatcagcggcatccccacaggagattccctggctaccaacaggggggggcccccccaaataagacggaacgacgacgtacatataaacaggacaaagggcaacgtgagccgcacgaggtgacacaagccggtcgggaaaggggggcaaa

SEQ ID NO: 458397 - DNA, 2727 bp, Homo sapiens
ataggctaggtacgaggctggggtgaaatcggccgagggctgtcagggccctgcggtgtgactcgcgggctcagctggtccggccgtagcacctccgcgccgtcgccatgtcgcggtttttcaccaccggttcggacagcgagtccgagtcgtccttgtccggggaggagctcgtcaccaaacctgtcggaggcaactatggcaaacagccattgttgctgagcgaggatgaagaagataccaagagagttgtccgcagtgccaaggacaagaggtttgaggagctgaccaaccttatccggaccatccgtaatgccatgaagattcgtgatgtcaccaagtgcctggaagagtttgagctcctgggaaaagcatatgggaaggccaaaagcattgtggacaaagaaggtgtcccccggttctatatccgcatcctggctgacctagaggactatcttaatgagctttgggaagataaggaagggaagaagaagatgaacaagaacaatgccaaggctctgagcaccttgcgtcagaagatccgaaaatacaaccgtgatttcgagtcccatatcacaagctacaagcagaaccccgagcagtctgcggatgaagatgctgagaaaaatgaggaggattcagaaggctcttcagatgaggatgaggatgaggacggagtcagtgctgcaactttcttgaagaagaaatcagaagctccttctggggagagtcgcaagttcctcaaaaagatggatgatgaagatgaggactcagaagattccgaagatgatgaagactgggacacaggttccacatcttccgattccgactcagaggaggaagaagggaaacaaaccgcgctggcctcaagatttcttaaaaaggcacccaccacagatgaggacaagaaggcagccgagaagaaacgggaggacaaagctaagaagaagcacgacaggaaatccaagcgcctggatgaggaggaggaggacaatgaaggcggggagtgggaaagggtccggggcggagtgccgttggttaaggagaagccaaaaatgtttgccaagggaactgagatcacccatgctgttgttatcaagaaactgaatgagatcctacaggcacgaggcaagaagggaactgatcgtgctgcccagattgagctgctgcaactgctggttcagattgcagcggaaaacaacctgggagagggcgtcattgtcaagatcaagttcaatatcatcgcctctctctatgactacaaccccaacctggcaacctacatgaagccagagatgtgggggaagtgcctggactgcatcaatgagctgatggatatcctgtttgcaaatcccaacatttttgttggagagaatattctggaagagagtgagaacctgcacaacgctgaccagccactgcgtgtccgtggctgcatcctaactctggtggaacgaatggatgaagaatttaccaaaataatgcaaaatactgaccctcactcccaagagtacgtggagcacttgaaggatgaggcccaggtgtgtgccatcatcgagcgtgtgcagcgctacctggaggagaagggcactaccgaggaggtctgccgcatctacctgctgcgcatcctgcacacctactacaagtttgattacaaggcccatcagcgacagctgaccccgcctgagggctcctcaaagtctgagcaagaccaggcagaaaatgagggcgaggactcggctgtgttgatggagagactgtgcaagtacatctacgccaaggaccgcacagaccggatccgcacatgtgccatcctctgccacatctaccaccatgctctgcactcgcgctggtaccaggcccgcgacctcatgctcatgagccacttgcaggacaacattcagcatgcagacccgccagtgcagatcctttacaaccgcaccatggtgcagctgggcatctgtgccttccgccaaggcctgaccaaggacgcacacaacgccctgctggacatccagtcgagtggccgagccaaggagcttctgggccagggcctgctgctgcgcagcctgcaggagcgcaaccaggagcaggagaaggtggagcggcgccgtcaggtccccttccacctgcacatcaacctggagctgctggagtgtgtctacctggtgtctgccatgctcctggagatcccctacatggccgcccatgagagcgatgcccgccgacgcatgatcagcaagcagttccaccaccagctgcgcgtgggcgagcgacagcccctgctgggtccccctgagtccatgcgggaacatgtggtcgctgcctccaaggccatgaagatgggtgactggaagacctgtcacagttttatcatcaatgagaagatgaatgggaaagtgtgggaccttttccccgaggctgacaaagtccgcaccatgctggttaggaagatccaggaagagtcactgaggacctacctcttcacctacagcagtgtctatgactccatcagcatggcactcatgtcagacatgtttgagcggcatctgcccacctgtgcacgccagcagctcgcaatatgatcaattcatcaggtactgatcacctacctggaccagacaacacagacctgtctatgctctcgacttctggtcagctatgtgtgagacgatctgcgtacggcgcgagtgaccacaaccaggtaatgatcgggtattactttga

SEQ ID NO: 458398 - DNA, 2509 bp, Homo sapiens
ataggctaggtacgaggctggggtgaaatcggccgagggctgtcagggccctgcggtgtgactcgcgggctcagctggtccggccgtagcacctccgcgccgtcgccatgtcgcggtttttcaccaccggttcggacagcgagtccgagtcgtccttgtccggggaggagctcgtcaccaaacctgtcggaggcaactatggcaaacagccattgttgctgagcgaggatgaagaagataccaagagagttgtccgcagtgccaaggacaagaggtttgaggagctgaccaaccttatccggaccatccgtaatgccatgaagattcgtgatgtcaccaagtgcctggaagagtttgagctcctgggaaaagcatatgggaaggccaaaagcattgtggacaaagaaggtgtcccccggttctatatccgcatcctggctgacctagaggactatcttaatgagctttgggaagataaggaagggaagaagaagatgaacaagaacaatgccaaggctctgagcaccttgcgtcagaagatccgaaaatacaaccgtgatttcgagtcccatatcacaagctacaagcagaaccccgagcagtctgcggatgaagatgctgagaaaaatgaggaggattcagaaggctcttcagatgaggatgaggatgaggacggagtcagtgctgcaactttcttgaagaagaaatcagaagctccttctggggagagtcgcaagttcctcaaaaagatggatgatgaagatgaggactcagaagattccgaagatgatgaagactgggacacaggttccacatcttccgattccgactcagaggaggaagaagggaaacaaaccgcgctggcctcaagatttcttaaaaaggcacccaccacagatgaggacaagaaggcagccgagaagaaacgggaggacaaagctaagaagaagcacgacaggaaatccaagcgcctggatgaggaggaggaggacaatgaaggcggggagtgggaaagggtccggggcggagtgccgttggttaaggagaagccaaaaatgtttgccaagggaactgagatcacccatgctgttgttatcaagaaactgaatgagatcctacaggcacgaggcaagaagggaactgatcgtgctgcccagattgagctgctgcaactgctggttcagattgcagcggaaaacaacctgggagagggcgtcattgtcaagatcaagttcaatatcatcgcctctctctatgactacaaccccaacctggcaacctacatgaagccagagatgtgggggaagtgcctggactgcatcaatgagctgatggatatcctgtttgcaaatcccaacatttttgttggagagaatattctggaagagagtgagaacctgcacaacgctgaccagccactgcgtgtccgtggctgcatcctaactctggtggaacgaatggatgaagaatttaccaaaataatgcaaaatactgaccctcactcccaagagtacgtggagcacttgaaggatgaggcccaggtgtgtgccatcatcgagcgtgtgcagcgctacctggaggagaagggcactaccgaggaggtctgccgcatctacctgctgcgcatcctgcacacctactacaagtttgattacaaggcccatcagcgacagctgaccccgcctgagggctcctcaaagtctgagcaagaccaggcagaaaatgagggcgaggactcggctgtgttgatggagagactgtgcaagtacatctacgccaaggaccgcacagaccggatccgcacatgtgccatcctctgccacatctaccaccatgctctgcactcgcgctggtaccaggcccgcgacctcatgctcatgagccacttgcaggacaacattcagcatgcagacccgccagtgcagatcctttacaaccgcaccatggtgcagctgggcatctgtgccttccgccaaggcctgaccaaggacgcacacaacgccctgctggacatccagtcgagtggccgagccaaggagcttctgggccagggcctgctgctgcgcagcctgcaggagcgcaaccaggagcaggagaaggtggagcggcgccgtcaggtccccttccacctgcacatcaacctggagctgctggagtgtgtctacctggtgtctgccatgctcctggagatcccctacatggccgcccatgagagcgatgcccgccgacgcatgatcagcaagcagttccaccaccagctgcgcgtgggcgagcgacagcccctgctgggtccccctgagtccatgcgggaacatgtggtcgctgcctccaaggccatgaagatgggtgactggaagacctgtcacagttttatcatcaatgagaagatgaatgggaaagtgtgggacctttctggccacgactatgaccaagattgcgacatcgtgcttagtaagatccagcaagagacgctggagacttacattctaaattaacgcgggcttgggaa

SEQ ID NO: 458399 - DNA, 2408 bp, Homo sapiens
ataggctaggtacgaggctggggtgaaatcggccgagggctgtcagggccctgcggtgtgactcgcgggctcagctggtccggccgtagcacctccgcgccgtcgccatgtcgcggtttttcaccaccggttcggacagcgagtccgagtcgtccttgtccggggaggagctcgtcaccaaacctgtcggaggcaactatggcaaacagccattgttgctgagcgaggatgaagaagataccaagagagttgtccgcagtgccaaggacaagaggtttgaggagctgaccaaccttatccggaccatccgtaatgccatgaagattcgtgatgtcaccaagtgcctggaagagtttgagctcctgggaaaagcatatgggaaggccaaaagcattgtggacaaagaaggtgtcccccggttctatatccgcatcctggctgacctagaggactatcttaatgagctttgggaagataaggaagggaagaagaagatgaacaagaacaatgccaaggctctgagcaccttgcgtcagaagatccgaaaatacaaccgtgatttcgagtcccatatcacaagctacaagcagaaccccgagcagtctgcggatgaagatgctgagaaaaatgaggaggattcagaaggctcttcagatgaggatgaggatgaggacggagtcagtgctgcaactttcttgaagaagaaatcagaagctccttctggggagagtcgcaagttcctcaaaaagatggatgatgaagatgaggactcagaagattccgaagatgatgaagactgggacacaggttccacatcttccgattccgactcagaggaggaagaagggaaacaaaccgcgctggcctcaagatttcttaaaaaggcacccaccacagatgaggacaagaaggcagccgagaagaaacgggaggacaaagctaagaagaagcacgacaggaaatccaagcgcctggatgaggaggaggaggacaatgaaggcggggagtgggaaagggtccggggcggagtgccgttggttaaggagaagccaaaaatgtttgccaagggaactgagatcacccatgctgttgttatcaagaaactgaatgagatcctacaggcacgaggcaagaagggaactgatcgtgctgcccagattgagctgctgcaactgctggttcagattgcagcggaaaacaacctgggagagggcgtcattgtcaagatcaagttcaatatcatcgcctctctctatgactacaaccccaacctggcaacctacatgaagccagagatgtgggggaagtgcctggactgcatcaatgagctgatggatatcctgtttgcaaatcccaacatttttgttggagagaatattctggaagagagtgagaacctgcacaacgctgaccagccactgcgtgtccgtggctgcatcctaactctggtggaacgaatggatgaagaatttaccaaaataatgcaaaatactgaccctcactcccaagagtacgtggagcacttgaaggatgaggcccaggtgtgtgccatcatcgagcgtgtgcagcgctacctggaggagaagggcactaccgaggaggtctgccgcatctacctgctgcgcatcctgcacacctactacaagtttgattacaaggcccatcagcgacagctgaccccgcctgagggctcctcaaagtctgagcaagaccaggcagaaaatgagggcgaggactcggctgtgttgatggagagactgtgcaagtacatctacgccaaggaccgcacagaccggatccgcacatgtgccatcctctgccacatctaccaccatgctctgcactcgcgctggtaccaggcccgcgacctcatgctcatgagccacttgcaggacaacattcagcatgcagacccgccagtgcagatcctttacaaccgcaccatggtgcagctgggcatctgtgccttccgccaaggcctgaccaaggacgcacacaacgccctgctggacatccagtcgagtggccgagccaaggagcttctgggccagggcctgctgctgcgcagcctgcaggagcgcaaccaggagcaggagaaggtggagcggcgccgtcaggtccccttccacctgcacatcaacagaacctggctctgcagctggccgagaagctgggcagcctggtggagaacaacgaacgggtgtttgaccacaagcagggcacctacgggggctacttccgagaccagaaggacggctaccgcaaaaacgagggctacatgcgccgcggtggctaccgccagcagcagtctcagacggcctactgagctctccactctgtttcccgcctgggccatccaaccttgaagtcctaaaccacacctcagtcactaaaggtctgtttaaagt

SEQ ID NO: 458400 - DNA, 2041 bp, Homo sapiens
tgaggaggccgggggcgacccgggcgaggagagccacaggcacgaggcaagaagggaacgactgctgcccagattgagctgctgcaactgctggttcagattgcagcggaaaacaacctgggagagggcgtcattgtcaagatcaagttcaatatcatcgcctctctctatgactacaaccccaacctggcaacctacatgaagccagagatgtgggggaagtgcctggactgcatcaatgagctgatggatatcctgtttgcaaatcccaacatttttgttggagagaatattctggaagagagtgagaacctgcacaacgctgaccagccactgcgtgtccgtggctgcatcctaactctggtggaacgaatggatgaagaatttaccaaaataatgcaaaatactgaccctcactcccaagagtacgtggagcacttgaaggatgaggcccaggtgtgtgccatcatcgagcgtgtgcagcgctacctggaggagaagggcactaccgaggaggtctgccgcatctacctgctgcgcatcctgcacacctactacaagtttgattacaaggcccatcagcgacagctgaccccgcctgagggctcctcaaagtctgagcaagaccaggcagaaaatgagggcgaggactcggctgtgttgatggagagactgtgcaagtacatctacgccaaggaccgcacagaccggatccgcacatgtgccatcctctgccacatctaccaccatgctctgcactcgcgctggtaccaggcccgcgacctcatgctcatgagccacttgcaggacaacattcagcatgcagacccgccagtgcagatcctttacaaccgcaccatggtgcagctgggcatctgtgccttccgccaaggcctgaccaaggacgcacacaacgccctgctggacatccagtcgagtggccgagccaaggagcttctgggccagggcctgctgctgcgcagcctgcaggagcgcaaccaggagcaggagaaggtggagcggcgccgtcaggtccccttccacctgcacatcaacctggagctgctggagtgtgtctacctggtgtctgccatgctcctggagatcccctacatggccgcccatgagagcgatgcccgccgacgcatgatcagcaagcagttccaccaccagctgcgcgtgggcgagcgacagcccctgctgggtccccctgagtccatgcgggaacatgtggtcgctgcctccaaggccatgaagatgggtgactggaagacctgtcacagttttatcatcaatgagaagatgaatgggaaagtgtgggaccttttccccgaggctgacaaagtccgcaccatgctggttaggaagatccaggaagagtcactgaggacctacctcttcacctacagcagtgtctatgactccatcagcatggagacgctgtcagacatgtttgagctggatctgcccactgtgcactccatcatcagcaaaatgatcattaatgaggagctgatggcctccctggaccagccaacacagacagtggtgatgcaccgcactgagcccactgcccagcagaacctggctctgcagctggccgagaagctgggcagcctggtggagaacaacgaacgggtgtttgaccacaagcagggcacctacgggggctacttccgagaccagaaggacggctaccgcaaaaacgagggctacatgcgccgcggtggctaccgccagcagcagtctcagacggcctactgagctctccactctgtttcccgcctgggccatccaaccttgaagtcctaaaccacacctcagtcactaaaggtctgtttaaagttgttctggttgattgcttgttgccacaaaggtgtgttgagcccattcatttgctgattatacttctgagctgctaccacatgacagacacaaggctcagatgaagaggtgaattgaacacgttcctgacctcaaagagcctgctgctttttgacatttaacagaaaattatagtaacataagttataatgggtgt

SEQ ID NO: 458401 - DNA, 1687 bp, Homo sapiens
  misc_feature (1608)..(1608): n is a, c, g, or t
  misc_feature (1611)..(1612): n is a, c, g, or t
  misc_feature (1614)..(1614): n is a, c, g, or t
  misc_feature (1617)..(1617): n is a, c, g, or t
  misc_feature (1627)..(1627): n is a, c, g, or t
  misc_feature (1630)..(1631): n is a, c, g, or t
  misc_feature (1635)..(1635): n is a, c, g, or t
  misc_feature (1637)..(1637): n is a, c, g, or t
  misc_feature (1639)..(1639): n is a, c, g, or t
  misc_feature (1648)..(1648): n is a, c, g, or t
  misc_feature (1654)..(1655): n is a, c, g, or t
ataggctaggtacgaggctggggtgaaatcggccgagggctgtcagggccctgcggtgtgactcgcgggctcagctggtccggccgtagcacctccgcgccgtcgccatgtcgcggtttttcaccaccggttcggacagcgagtccgagtcgtccttgtccggggaggagctcgtcaccaaacctgtcggaggcaactatggcaaacagccattgttgctgagcgaggatgaagaagataccaagagagttgtccgcagtgccaaggacaagaggtttgaggagctgaccaaccttatccggaccatccgtaatgccatgaagattcgtgatgtcaccaagtgcctggaagagtttgagctcctgggaaaagcatatgggaaggccaaaagcattgtggacaaagaaggtgtcccccggttctatatccgcatcctggctgacctagaggactatcttaatgagctttgggaagataaggaagggaagaagaagatgaacaagaacaatgccaaggctctgagcaccttgcgtcagaagatccgaaaatacaaccgtgatttcgagtcccatatcacaagctacaagcagaaccccgagcagtctgcggatgaagatgctgagaaaaatgaggaggattcagaaggctcttcagatgaggatgaggatgaggacggagtcagtgctgcaactttcttgaagaagaaatcagaagctccttctggggagagtcgcaagttcctcaaaaagatggatgatgaagatgaggactcagaagattccgaagatgatgaagactgggacacaggttccacatcttccgattccgactcagaggaggaagaagggaaacaaaccgcgctggcctcaagatttcttaaaaaggcacccaccacagatgaggacaagaaggcagccgagaagaaacgggaggacaaagctaagaagaagcacgacaggaaatccaagcgcctggatgaggaggaggaggacaatgaaggcggggagtgggaaagggtccggggcggagtgccgttggttaaggagaagccaaaaatgtttgccaagggaactgagatcacccatgctgttgttatcaagaaactgaatgagatcctacaggcacgaggcaagaagggaactgatcgtgctgcccagattgagctgctgcaactgctggttcagattgcagcggaaaacaacctgggagagggcgtcattgtcaagatcaagttcaatatcatcgcctctctctatgactacaaccccaacctggcaacctacatgaagccagagatgtgggggaagtgcctggactgcatcaatgagctgatggatatcctgtttgcaaatcccaacatttttgttggagagaatattctggaagagagtgagaacctgcacaacgctgaccagccactgcgtgtccgtggctgcatcctaactctggtggaacgaatggatgaagaatttaccaaaataatgcaaaatactgaccctcactcccaagagtacgtggagcacttgaaggatgaggcccaggtgtgtgccatcatcgagcgtgtgcagcgctacctggaggagaagggcactaccgaggaggtgcgantanngnggnttcggcctanaannttgntnangcctagaangacccnngggcccaaatggaacggaaaaaggggaccgtt

SEQ ID NO: 458402 - DNA, 1767 bp, Homo sapiens
ataggctaggtacgaggctggggtgaaatcggccgagggctgtcagggccctgcggtgtgactcgcgggctcagctggtccggccgtagcacctccgcgccgtcgccatgtcgcggtttttcaccaccggttcggacagcgagtccgagtcgtccttgtccggggaggagctcgtcaccaaacctgtcggaggcaactatggcaaacagccattgttgctgagcgaggatgaagaagataccaagagagttgtccgcagtgccaaggacaagaggtttgaggagctgaccaaccttatccggaccatccgtaatgccatgaagattcgtgatgtcaccaagtgcctggaagagtttgagctcctgggaaaagcatatgggaaggccaaaagcattgtggacaaagaaggtgtcccccggttctatatccgcatcctggctgacctagaggactatcttaatgagctttgggaagataaggaagggaagaagaagatgaacaagaacaatgccaaggctctgagcaccttgcgtcagaagatccgaaaatacaaccgtgatttcgagtcccatatcacaagctacaagcagaaccccgagcagtctgcggatgaagatgctgagaaaaatgaggaggattcagaaggctcttcagatgaggatgaggatgaggacggagtcagtgctgcaactttcttgaagaagaaatcagaagctccttctggggagagtcgcaagttcctcaaaaagatggatgatgaagatgaggactcagaagattccgaagatgatgaagactgggacacaggttccacatcttccgattccgactcagaggaggaagaagggaaacaaaccgcgctggcctcaagatttcttaaaaaggcacccaccacagatgaggacaagaaggcagccgagaagaaacggggtccccctgagtccatgcgggaacatgtggtcgctgcctccaaggccatgaagatgggtgactggaagacctgtcacagttttatcatcaatgagaagatgaatgggaaagtgtgggaccttttccccgaggctgacaaagtccgcaccatgctggttaggaagatccaggaagagtcactgaggacctacctcttcacctacagcagtgtctatgactccatcagcatggagacgctgtcagacatgtttgagctggatctgcccactgtgcactccatcatcagcaaaatgatcattaatgaggagctgatggcctccctggaccagccaacacagacagtggtgatgcaccgcactgagcccactgcccagcagaacctggctctgcagctggccgagaagctgggcagcctggtggagaacaacgaacgggtgtttgaccacaagcagggcacctacgggggctacttccgagaccagaaggacggctaccgcaaaaacgagggctacatgcgccgcggtggctaccgccagcagcagtctcagacggcctactgagctctccactctgtttcccgcctgggccatccaaccttgaagtcctaaaccacacctcagtcactaaaggtctgtttaaagttgttctggttgattgcttgttgccacaaaggtgtgttgagcccattcatttgctgattatacttctgagctgctaccacatgacagacacaaggctcagatgaagaggtgaattgaacacgttcctgacctcaaagagcctgctgctttttgacatttaacagaaaattatagtaacataagttataatgggtgt

SEQ ID NO: 458403 - DNA, 1470 bp, Homo sapiens
ataggctaggtacgaggctggggtgaaatcggccgagggctgtcagggccctgcggtgtgactcgcgggctcagctggtccggccgtagcacctccgcgccgtcgccatgtcgcggtttttcaccaccggttcggacagcgagtccgagtcgtccttgtccggggaggagctcgtcaccaaacctgtcggaggcaactatggcaaacagccattgttgctgagcgaggatgaagaagataccaagagagttgtccgcagtgccaaggacaagaggtttgaggagctgaccaaccttatccggaccatccgtaatgccatgaagattcgtgatgtcaccaagtgcctggaagagtttgagctcctgggaaaagcatatgggaaggccaaaagcattgtggacaaagaaggtgtcccccggttctatatccgcatcctggctgacctagaggactatcttaatgagctttgggaagataaggaagggaagaagaagatgaacaagaacaatgccaaggctctgagcaccttgcgtcagaagatccgaaaatacaaccgtgatttcgagtcccatatcacaagctacaagcagaaccccgagcagtctgcggatgaagatgctgagaaaaatgaggaggattcagaaggctcttcagatgaggatgaggatgaggacggagtcagtgctgcaactttcttgaagaagaaatcagaagctccttctggggagagtcgcaagttcctcaaaaagatggatgatgaagatgaggactcagaagattccgaagatgatgaagactgggacacaggttccacatcttccgattccgactcagaggaggaagaagggaaacaaaccgcgctggcctcaagatttcttaaaaaggcacccaccacagatgaggacaagaaggcagccgagaagaaacgggaggacaaagctaagaagaagcacgacaggaaatccaagcgcctggatgaggaggaggaggacaatgaaggcggggagtgggaaagggtccggggcggagtgccgttggttaaggagaagccaaaaatgtttgccaagggaactgagatcacccatgctgttgttatcaagaaactgaatgagatcctacaggcacgaggcaagaagggaactgatcgtgctgcccagattgagctgctgcaactgctggttcagattgcagcggaaaacaacctgggagagggcgtcattgtcaagatcaagttcaatatcatcgcctctctctatgactacaaccccaacctggcaacctacatgaagccagagatgtgggggaagtgcctggactgcatcaatgagctgatggatatcctgtttgcaaatcccaacatttttgttggagagaatattctggaagagagtgagaacctgcacaacgctgaccagccactgcgtgtccgtggctgcatcctccatggtgctgcatcctccatggtgctga

SEQ ID NO: 458404 - DNA, 1367 bp, Homo sapiens
ataggctaggtacgaggctggggtgaaatcggccgagggctgtcagggccctgcggtgtgactcgcgggctcagctggtccggccgtagcacctccgcgccgtcgccatgtcgcggtttttcaccaccggttcggacagcgagtccgagtcgtccttgtccggggaggagctcgtcaccaaacctgtcggaggcaactatggcaaacagccattgttgctgagcgaggatgaagaagataccaagagagttgtccgcagtgccaaggacaagaggtttgaggagctgaccaaccttatccggaccatccgtaatgccatgaagattcgtgatgtcaccaagtgcctggaagagtttgagctcctgggaaaagcatatgggaaggccaaaagcattgtggacaaagaaggtgtcccccggttctatatccgcatcctggctgacctagaggactatcttaatgagctttgggaagataaggaagggaagaagaagatgaacaagaacaatgccaaggctctgagcaccttgcgtcagaagatccgaaaatacaaccgtgatttcgagtcccatatcacaagctacaagcagaaccccgagcagtctgcggatgaagatgctgagaaaaatgaggaggattcagaaggctcttcagatgaggatgaggatgaggacggagtcagtgctgcaactttcttgaagaagaaatcagaagctccttctggggagagtcgcaagttcctcaaaaagatggatgatgaagatgaggactcagaagattccgaagatgatgaagactgggacacaggttccacatcttccgattccgactcagaggaggaagaagggaaacaaaccgcgctggcctcaagatttcttaaaaaggcacccaccacagatgaggacaagaaggcagccgagaagaaacgggaggacaaagctaagaagaagcacgacaggaaatccaagcgcctggatgaggaggaggaggacaatgaaggcggggagtgggaaagggtccggggcggagtgccgttggttaaggagaagccaaaaatgtttgccaagggaactgagatcacccatgctgttgttatcaagaaactgaatgagatcctacaggcacgaggcaagaagggaactgatcgtgctgcccagattgagctgctgcaactgctggttcagattgcagcggaaaacaacctgggagagggcgtcattgtcaagatcaagttcaatatcatcgcctctctcttgataatcaacagcatgggtgatctcagttcccttgggaaacattttcggcttctccttaagcaacggcactccgtcccggactctttcccactccccgccttcattgtcctc

SEQ ID NO: 458405 - DNA, 956 bp, Homo sapiens
ataggctaggtacgaggctggggtgaaatcggccgagggctgtcagggccctgcggtgtgactcgcgggctcagctggtccggccgtagcacctccgcgccgtcgccatgtcgcggtttttcaccaccggttcggacagcgagtccgagtcgtccttgtccggggaggagctcgtcaccaaacctgtcggaggcaactatggcaaacagccattgttgctgagcgaggatgaagaagataccaagagagttgtccgcagtgccaaggacaagaggtttgaggagctgaccaaccttatccggaccatccgtaatgccatgaagattcgtgatgtcaccaagtgcctggaagagtttgagctcctgggaaaagcatatgggaaggccaaaagcattgtggacaaagaaggtgtcccccggttctatatccgcatcctggctgacctagaggactatcttaatgagctttgggaagataaggaagggaagaagaagatgaacaagaacaatgccaaggctctgagcaccttgcgtcagaagatccgaaaatacaaccgtgatttcgagtcccatatcacaagctacaagcagaaccccgagcagtctgcggatgaagatgctgagaaaaatgaggaggattcagaaggctcttcagatgaggatgaggatgaggacggagtcagtgctgcaactttcttgaagaagaaatcagaagctccttctggggagagtcgcaagttcctcaaaaagatggatgatgaagatgaggactcagaagattccgaagatgatgaagactgggacacaggttccacatcttccgattccgactcagaggaggaagaagggaaacaaaccgcgctggcctcaagatttcttaaaaacacccaccacagatgagacacgagttcaggggatactctagaacagccacacgcagcacggtgcactgcgcgt

SEQ ID NO: 458406 - DNA, 753 bp, Homo sapiens
  misc_feature (695)..(695): n is a, c, g, or t
  misc_feature (719)..(720): n is a, c, g, or t
ataggctaggtacgaggctggggtgaaatcggccgagggctgtcagggccctgcggtgtgactcgcgggctcagctggtccggccgtagcacctccgcgccgtcgccatgtcgcggtttttcaccaccggttcggacagcgagtccgagtcgtccttgtccggggaggagctcgtcaccaaacctgtcggaggcaactatggcaaacagccattgttgctgagcgaggatgaagaagataccaagagagttgtccgcagtgccaaggacaagaggtttgaggagctgaccaaccttatccggaccatccgtaatgccatgaagattcgtgatgtcaccaagtgcctggaagagtttgagctcctgggaaaagcatatgggaaggccaaaagcattgtggacaaagaaggtgtcccccggttctatatccgcatcctggctgacctagaggactatcttaatgagctttgggaagataaggaagggaagaagaagatgaacaagaacaatgccaaggctctgagcaccttgcgtcagaagatccgaaaatacaaccgtgatttcgagtcccatatcacaagctacaagcagaaccccgagcagtctgcggatgaagatgctgagaaaaatgaggaggattcagaaggctcttcagtatggccttagttgactgaaatatttgatcgtcaggctgtngggtttcacatgggaatttcaggnnagtgaggttgccaataagaacaagcttgtattt

SEQ ID NO: 458407 - DNA, 1212 bp, Homo sapiens
ggactctcacgtgaccaggagtcgacgtgtgcagaagtccttatagtccagggcctgtttccctgtagcagctccttattgctggagaaggagaaaagtgcccaagatcctttcaggatatttggttttttgggcgcgacacaaatcgaggtgagggaagagagaggaaaatcccctgaatccctgcaggattaatttattcaaaaaggaaataaaaaatactcaatatgcaaaagtcttgtgaagaaaatgagggaaaaccacagaacatgccaaaggccgaggaagatcgccctttggaggatgtaccacaggaggcagaaggaaatcctcaaccttccgaagaaggcgtaagccaggaagcagaaggaaaccccagaggagggccgaatcagcctggccagggatttaaagaggacacacccgttaggcatttggaccctgaagaaatgataagaggagtagatgagcttgaaaggcttagggaagagataagaagagtaagaaacaagtttgtgatgatgcattggaagcaaagacattcacgcagccgtccttatcctgtgtgctttaggccttgaattcatttttgcctaatattaaaatctggccccagctttctttctgttagcattttctgatgtatctttgacctccattttacttttaatcatctgatgaaattttgttttaggtaatttccttggtaccagcatctcattggattttggattttgacccattttccaggtctatttttcaattggaaactttcacacatttgcatgggaatatgttcattccatgttgtaaagtaaaacataacaggttatggcaaagcagcatatttaatatcagctcacatatgtaggataaaattccaaactttgtgtgtgtgcgtgtgtgtatacatacatccatataacatatatcacaaacttaaccaagcttatttctgtgtggtgtgaaattttatttgttttcttctttttgttctttttgcttatatgtactttttaatgaacacgtgtctcacacacaaaaagaattaaggattttttttacaagtaagagtcaaataatttgcaaccagcttatgagggcaatgggggcacctaaactcttgatgaaagaactttaaaaagaaatgtaaacctcaaattacctctggatctcttagccagaggaataaactggcaattattacagata

SEQ ID NO: 458408 - DNA, 1139 bp, Homo sapiens
ggactctcacgtgaccaggagtcgacgtgtgcagaagtccttatagtccagggcctgtttccctgtagcagctccttattgctggagaaggagaaaagtgcccaagatcctttcaggattaatttattcaaaaaggaaataaaaaatactcaatatgcaaaagtcttgtgaagaaaatgagggaaaaccacagaacatgccaaaggccgaggaagatcgccctttggaggatgtaccacaggaggcagaaggaaatcctcaaccttccgaagaaggcgtaagccaggaagcagaaggaaaccccagaggagggccgaatcagcctggccagggatttaaagaggacacacccgttaggcatttggaccctgaagaaatgataagaggagtagatgagcttgaaaggcttagggaagagataagaagagtaagaaacaagtttgtgatgatgcattggaagcaaagacattcacgcagccgtccttatcctgtgtgctttaggccttgaattcatttttgcctaatattaaaatctggccccagctttctttctgttagcattttctgatgtatctttgacctccattttacttttaatcatctgatgaaattttgttttaggtaatttccttggtaccagcatctcattggattttggattttgacccattttccaggtctatttttcaattggaaactttcacacatttgcatgggaatatgttcattccatgttgtaaagtaaaacataacaggttatggcaaagcagcatatttaatatcagctcacatatgtaggataaaattccaaactttgtgtgtgtgcgtgtgtgtatacatacatccatataacatatatcacaaacttaaccaagcttatttctgtgtggtgtgaaattttatttgttttcttctttttgttctttttgcttatatgtactttttaatgaacacgtgtctcacacacaaaaagaattaaggattttttttacaagtaagagtcaaataatttgcaaccagcttatgagggcaatgggggcacctaaactcttgatgaaagaactttaaaaagaaatgtaaacctcaaattacctctggatctcttagccagaggaataaactggcaattattacagata

SEQ ID NO: 458409 - DNA, 1138 bp, Homo sapiens
ggactctcacgtgaccaggagtcgacgtgtgcagaagtccttatagtccagggcctgtttccctgtagcagctccttattgctggagaaggagaaaagtgcccaagatcctttcaggatatttggttttttgggcgcgacacaaatcgaggtgagggaagagagaggaaaatcccctgaatccctgcaggattaatttattcaaaaaggaaataaaaaatactcaatatgcaaaagtctggaggcagaaggaaatcctcaaccttccgaagaaggcgtaagccaggaagcagaaggaaaccccagaggagggccgaatcagcctggccagggatttaaagaggacacacccgttaggcatttggaccctgaagaaatgataagaggagtagatgagcttgaaaggcttagggaagagataagaagagtaagaaacaagtttgtgatgatgcattggaagcaaagacattcacgcagccgtccttatcctgtgtgctttaggccttgaattcatttttgcctaatattaaaatctggccccagctttctttctgttagcattttctgatgtatctttgacctccattttacttttaatcatctgatgaaattttgttttaggtaatttccttggtaccagcatctcattggattttggattttgacccattttccaggtctatttttcaattggaaactttcacacatttgcatgggaatatgttcattccatgttgtaaagtaaaacataacaggttatggcaaagcagcatatttaatatcagctcacatatgtaggataaaattccaaactttgtgtgtgtgcgtgtgtgtatacatacatccatataacatatatcacaaacttaaccaagcttatttctgtgtggtgtgaaattttatttgttttcttctttttgttctttttgcttatatgtactttttaatgaacacgtgtctcacacacaaaaagaattaaggattttttttacaagtaagagtcaaataatttgcaaccagcttatgagggcaatgggggcacctaaactcttgatgaaagaactttaaaaagaaatgtaaacctcaaattacctctggatctcttagccagaggaataaactggcaattattacagata

SEQ ID NO: 458410 - DNA, 1109 bp, Homo sapiens
ggactctcacgtgaccaggagtcgacgtgtgcagaagtccttatagtccagggcctgtttccctgtagcagctccttattgctggagaaggagaaaagtgcccaagatcctttcaggatatttggttttttgggcgcgacacaaatcgaggtgagggaagagagaggaaaatcccctgaatccctgcaggattaatttattcaaaaaggaaataaaaaatactcaatatgcaaaagtcttgtgaagaaaatgagggaaaaccacagaacatgccaaaggccgaggaagatcgccctttggaggatgtaccacagacacacccgttaggcatttggaccctgaagaaatgataagaggagtagatgagcttgaaaggcttagggaagagataagaagagtaagaaacaagtttgtgatgatgcattggaagcaaagacattcacgcagccgtccttatcctgtgtgctttaggccttgaattcatttttgcctaatattaaaatctggccccagctttctttctgttagcattttctgatgtatctttgacctccattttacttttaatcatctgatgaaattttgttttaggtaatttccttggtaccagcatctcattggattttggattttgacccattttccaggtctatttttcaattggaaactttcacacatttgcatgggaatatgttcattccatgttgtaaagtaaaacataacaggttatggcaaagcagcatatttaatatcagctcacatatgtaggataaaattccaaactttgtgtgtgtgcgtgtgtgtatacatacatccatataacatatatcacaaacttaaccaagcttatttctgtgtggtgtgaaattttatttgttttcttctttttgttctttttgcttatatgtactttttaatgaacacgtgtctcacacacaaaaagaattaaggattttttttacaagtaagagtcaaataatttgcaaccagcttatgagggcaatgggggcacctaaactcttgatgaaagaactttaaaaagaaatgtaaacctcaaattacctctggatctcttagccagaggaataaactggcaattattacagata

SEQ ID NO: 458411 - DNA, 931 bp, Homo sapiens
ggactctcacgtgaccaggagtcgacgtgtgcagaagtccttatagtccagggcctgtttccctgtagcagctccttattgctggagaaggagaaaagtgcccaagatcctttcaggattaatttattcaaaaaggaaataaaaaatactcaatatgcaaaagtctaaatgataagaggagtagatgagcttgaaaggcttagggaagagataagaagagtaagaaacaagtttgtgatgatgcattggaagcaaagacattcacgcagccgtccttatcctgtgtgctttaggccttgaattcatttttgcctaatattaaaatctggccccagctttctttctgttagcattttctgatgtatctttgacctccattttacttttaatcatctgatgaaattttgttttaggtaatttccttggtaccagcatctcattggattttggattttgacccattttccaggtctatttttcaattggaaactttcacacatttgcatgggaatatgttcattccatgttgtaaagtaaaacataacaggttatggcaaagcagcatatttaatatcagctcacatatgtaggataaaattccaaactttgtgtgtgtgcgtgtgtgtatacatacatccatataacatatatcacaaacttaaccaagcttatttctgtgtggtgtgaaattttatttgttttcttctttttgttctttttgcttatatgtactttttaatgaacacgtgtctcacacacaaaaagaattaaggattttttttacaagtaagagtcaaataatttgcaaccagcttatgagggcaatgggggcacctaaactcttgatgaaagaactttaaaaagaaatgtaaacctcaaattacctctggatctcttagccagaggaataaactggcaattattacagata

SEQ ID NO: 458412 - DNA, 1010 bp, Homo sapiens
ggactctcacgtgaccaggagtcgacgtgtgcagaagtccttatagtccagggcctgtttccctgtagcagctccttattgctggagaaggagaaaagtgcccaagatcctttcaggatatttggttttttgggcgcgacacaaatcgaggtgagggaagagagaggaaaatcccctgaatccctgcaggattaatttattcaaaaaggaaataaaaaatactcaatatgcaaaagtctaaaaaaaaaaaaaaaaaaaaaaaaaaaaaaaaaacatttgtgggcggccctgggcccctggaaaaagttttttaaacaaatcctgttggggggggggcccccggggtggggaactgggccaacaggggggttcccaaagggaaaccccgggcgccaatggacataggcgccggggttccccaccaaaaaaaaaacagccggggggagcccggagcgtgtctgtagaacaaacacccgagagggagaggtcccggagggcccaccacggggctcctatcacacgagggagtctcaaagggagacgttcagataattacaaatacgccccggcgtagtgggaacaacgacagacacaaaacaagcgcaagacctctacaccagaaccacagcagagagcaaacgaaacaggaacagaacagccaccgacagtcagcaacagcaaacagaaaagcgcagacccacaggagcaaacaacgcagaccatcacgaaaaacacgggcggacaaacaacacacccgcgagaacaaacgcacaaggagcaaccggaccacagccacgcgcggcaccaggaaccacaacgaacacacaaaccacgcacagcgaagagacgcacgcaaaagaagagcaagagcaacaaggccacgccgaagaagacacggagcacgcgagaaagcacaaggacgaataccgagagagaaacacgaaacagagccagacacgcagagacaaaacaacgaagccgacgcacaaagaagagaccgagagagagca

SEQ ID NO: 458413 - DNA, 2369 bp, Homo sapiens
ggactctcacgtgaccaggagtcgacgtgtgcagaagtccttatagtccagggcctgtttccctgtagcagctccttattgctggagaaggagaaaagtgcccaagatcctttcaggatatttggttttttgggcgcgacacaaatcgaggtgagggaagagagaggaaaatcccctgaatccctgcaggattaatttattcaaaaaggaaataaaaaatactcaatatgcaaaagtcttgtgaagaaaatgagggaaaaccacagaacatgccaaaggccgaggaagatcgccctttggaggatgtaccacaggaggcagaaggaaatcctcaaccttccgaagaaggcgtaagccaggaagcagaaggaaaccccagaggagggccgaatcagcctggccagggatttaaagaggacacacccgttaggcatttggaccctgaagaaatgataagaggagtagatgagcttgaaaggcttagggaagagataagaagagtaagaaacaagtttgtgatgatgcattggaagcaaagacattcacgcagccgtccttatcctgtgtgctttaggccttgaattcatttttgcctaatattaaaatctggccccagctttctttctgttagcattttctgatgtatctttgacctccattttacttttaatcatctgatgaaattttgttttaggtaatttccttggtaccagcatctcattggattttggattttgacccattttccaggtctatttttcaattggaaactttcacacatttgcatgggaatatgttcattccatgttgtaaagtaaaacataacaggttatggcaaagcagcatatttaatatcagctcacatatgtaggataaaattccaaactttgtgtgtgtgcgtgtgtgtatacatacatccatataacatatatcacaaacttaaccaagcttatttctgtgtggtgtgaaattttatttgttttcttctttttgttctttttgcttatatgtactttttaatgaacacgtgtctcacacacaaaaagaattaaggattttttttacaagtaagagtcaaataatttgcaaccagcttatgagggcaatgggggcacctaaactcttgatgaaagaactttaaaaagaaatgtaaacctcaaattacctctggatctcttagccagaggaataaactggcaattattacagataaaaaaaaaaaaaaaaaaaaaaaaaaaaaaaaaaaaaaaaaaaaaaaaagaagaaaaaaaaaaaaaaaagaaaaaaagaaaaaaaaaaaagaaaagaaaaaaaaaaaggggggggggggaaaaaataagccaccgcaggaggcacaccaagcaaagacacagaccaagcactacatacaataagaaagaaaagggcggcagcaccaaaggaagagacgacgcgaaaaaataaagaaaacacgagagcgaggaaggcaaataaatacaaacacacagcgagctagaacgagagaaaaaccatagagaggcaaagaagagataattatcatggagagagcgaccaacccaccaccatttgtgagatgggggggagagaaataacataacatgagggtcgaaaacacacactaccacgacggagagagattatattaacagcacgcggaggagcgaggagcaataaataatgcgcacgagaggacagacgcatgatctcaggaaaggtggcagcggaccagcagcctcggtaatagaataatagctgtacgtagcctggctgagagcaagaacaaacgacgtggcagccgaagacgcaagcacggagcacaactaagaacgagacaagaagcaaaacaaaacttaaaaaaccacacagccggcggcgagaataccagcacgacacacaacacaaagcagacgcgcggaagcccgaaaccagaccaccggcagagcaacgccacaagcacagcagcacgaccagacggcagcagacagacagaaagacggaccgacgacccagaagccagcagcgagcgaatgcgtgaaggaggactggacatgcacgtcgagattgagaggggagatggactgacgagaatgaggatgaggatgcaaggaatgcatgtgagagatgttgagaagttaggtatacgttacagactgagggcacgcgacagagcgcgcacacaatacaacagcagcgagagacaccggacgaagagagaccagaacaaggagaccgtcagcgagacgccggagccgcgggcgaccggacccacgaagcgccaccgcaaggcaccagcgcggccaggccaacatagcgcgcaacgagccgagcggagcagagaaaaaaggaaaaaaaaaacagagaagacgaca

SEQ ID NO: 458414 - DNA, 1227 bp, Homo sapiens
tcgcataacggtcgtgaggaactctcacgtgacccgcagtcgcacgtgtgtaaatgtccttgtacttccacggtctgttacgctgatcctggttcctaatagcggtagaatgctaaccgtgcccaagaatcctggcgggatatgagcgttctggagacgctacacaatatcgatggtgaggtcataaatggggtcaatcccctgagatctcctgcaggagttcagttattcattaacggccctaacaatgatactgtgaagaaaatgagggaaaaccacagaacatgccaaaggccgaggaagatcgccctttggaggatgtaccacaggaggcagaaggaaatcctcaaccttccgaagaaggcgtaagccaggaagcagaaggaaaccccagaggagggccgaatcagcctggccagggatttaaagaggacacacccgttaggcatttggaccctgaagaaatgataagaggagtagatgagcttgaaaggcttagggaagagataagaagagtaagaaacaagtttgtgatgatgcattggaagcaaagacattcacgcagccgtccttatcctgtgtgctttaggccttgaattcatttttgcctaatattaaaatctggccccagctttctttctgttagcattttctgatgtatctttgacctccattttacttttaatcatctgatgaaattttgttttaggtaatttccttggtaccagcatctcattggattttggattttgacccattttccaggtctatttttcaattggaaactttcacacatttgcatgggaatatgttcattccatgttgtaaagtaaaacataacaggttatggcaaagcagcatatttaatatcagctcacatatgtaggataaaattccaaactttgtgtgtgtgcgtgtgtgtatacatacatccatataacatatatcacaaacttaaccaagcttatttctgtgtggtgtgaaattttatttgttttcttctttttgttctttttgcttatatgtactttttaatgaacacgtgtctcacacacaaaaagaattaaggattttttttacaagtaagagtcaaataatttgcaaccagcttatgagggcaatgggggcacctaaactcttgatgaaagaactttaaaaagaaatgtaaacctcaaattacctctggatctcttagccagaggaataaactggcaattattacagata

SEQ ID NO: 458415 - DNA, 3431 bp, Homo sapiens
ggctgcaggctcgcctcggctccatgggcctttcctaatctggttagcgggatgaaggcatcaggtagggtctgtgtggggtggagaggaggagccaggctctggatccagaaccctcttctgcccttgccagctcagcatcccacagaggggtcttcccgctcacagccacagagggttatcagggttatagagaagagtcacctacccagtgcctgtcagggcatcaggtacatcccgggtgctgccacctcacacctgcaatgtccacacggtgaaccgggttgaacagaaggcagcctcgagaggctggagaaaatacaccaagcactgacacagatgaccctgggatgtgggactataggcgatcttcatttttttcttcatacttttcttggtttctaaatcttattcagtgagcacgtgttcctttttttaattagagaaaacttgacagtagcccctttttgtgtttcacagaggagctaacattccttctgtacctgtagttcatgcgggagatggcaggggcctggcacatgacggtggagcagaaatttggcctgttttctgctgagataaaggaagcagaccccctggctgcctcggaagcaagtcaacccaaaccctgtccccccgaagtgaccccccactacatctggatcgacttcctggtgcagcggtttgagatcgccaagtactgcagctctgaccaagtggagatcttctccagcctgctgcagcgctccatgtccctgaacatcggcggggccaaggggagcatgaaccggcacgtggcggccatcgggccccgcttcaagctgctgaccctggggctgtccctcctgcatgccgatgtggttccaaatgcaaccatccgcaatgtgcttcgcgagaagatctactccactgcctttgactacttcagctgtcccccaaagttccctactcaaggagagaagcggctgcgtgaagacataagcatcatgattaaattttggaccgccatgttctcagataagaagtacctgaccgccagccagcttgttcccccagataatcaggacacccggagcaacctggacataactgtcggctctcggcaacaagccacccaaggctggatcaacacataccccctgtccagcggcatgtccaccatctccaagaaatcaggcatgtctaagaaaaccaaccggggctcccagctgcacaaatactacatgaagcgcaggacgctgctgctgtccctgctggccactgagatcgagcgtctcatcacatggtacaacccgctgtcagccccggaactggaactagaccaggccggagagaacagcgtggccaactggagatctaagtacatcagcctgagtgagaagcagtggaaggacaacgtgaacctcgcctggagcatctctccctacctagccgtgcagctgcctgccaggtttaagaacacagaagccattgggaacgaagtgacccgtctcgttcggttggacccgggagccgttagtgatgtgcctgaagcaatcaagttcctggtcacctggcacaccatcgacgccgatgctccagagctcagccatgtgctgtgctgggcgcccacggacccacccacaggcctctcctacttctccagcatgtacccgccgcaccctctcacggcgcagtacggggtgaaagtcctgcggtccttccctccggacgccatcctcttctacatcccccagattgtgcaggccctcaggtacgacaagatgggctatgtgcgggagtatattctgtgggcagcgtctaaatcccagcttctggcacaccagttcatctggaacatgaagactaacatttatctagatgaagagggccaccagaaagaccctgacatcggcgacctcctggatcagttggtagaggagatcacaggctccttgtccggcccagcgaaggacttttaccagcgggagtttgatttctttaacaagatcaccaacgtgtcggctatcatcaagccctaccctaaaggcgacgagagaaagaaggcttgtctgtcggccctgtctgaagtgaaggtgcagccgggctgctacctgcccagcaaccctgaggccattgtgctggacatcgactacaagtctgggaccccgatgcagagtgctgcaaaagccccatatctggccaagttcaaggtgaagcgatgtggagttagtgaacttgaaaaagaaggtctgcggtgccgctcagactccgaggatgagtgcagcacgcaggaggccgacggccagaagatctcctggcaggcagccatcttcaaggtgggagacgactgccggcaggacatgctggccctgcagatcatcgacctcttcaagaacatcttccagctggtcggcctggacctctttgtttttccctaccgcgtggtggccactgcccctgggtgcggggtgatcgagtgcatccccgactgcacctcccgggaccagctgggccgccagacagacttcggcatgtacgactacttcacacgccagtacggggatgagtccactctggccttccagcaggcccgctacaacttcatccgaagcatggccgcctacagcctcctgctgttcctgctgcagatcaaggacagacacaacggcaacattatgctggacaagaagggtcatatcatccacatcgactttggcttcatgtttgaaagctcgccgggcggcaatctcggctgggaacccgacatcaagctgacggatgagatggtgatgatcatggggggcaagatggaggccacacccttcaagtggttcatggagatgtgtgtccgaggctacctggctgtgcggccctacatggacgcggtcgtctccctggtcactctcatgttggacacgggcctgccctgttttcgcggccagacaatcaagctcttgaagcacaggtttagccccaacatgactgagcgcgaggctgcaaatttcatcatgaaggtcatccagagctgcttcctcagcaacaggagccggacctacgacatgatccagtactatcagaatgacatcccctactgaggaggggaccttcgagggcctctgccccatgtgccctcaaagctgtcccacaatcatggagccctgcgacctccctgccctgccgccacatgcagtggaggagaggcctgtggcccaaagaacctggtagcgcctcctggggcagcacgtgggtgcgcagccttggtaacgccatggactgcagcgacaatcaatggatggtgctgtctatgcacaggtgtgagtcctctgtttgcactggacatattccctacctgtcttatttcataggtacatgaagtattgtgtataaaaaaagagataagatttaaccaacatcaacaaaataaaaacccaaaatagtgctgtgttgga

SEQ ID NO: 458416 - DNA, 5954 bp, Homo sapiens
cgagctcggtacccctaatttcttttgaaacagatggtccacatccttgaaagagttcttcatatagacttcagtggcctccctctcactaaccctgtgcaggtccagcagctcctggagggtttctgcgggcagctgcaccttctggcccatctgctggtcatagtgggcaatagccttttgcactgcggctgagttctctatctgggccaaccccagtgctgatctctactacacttccttcagtgaccctctctacctgaccatgttcaagatgctgcgtgacactctgtactacatgcatcaggacctcccgacctcttttgtgaaggagatccatgattttgtgctggagcagttcaacacgagccagggggagctccagaagattctacatgacgcagaccggatccacaatgagctgagccccctcaaactgcgctgtcaggcgaatgctgcctgtgtggacctcatggtgtgggctgtgaaggacgagcagggtgcagaaaacctttgcatcaagctatctgagaagctgcagtccaagacgtccagcaaagtcattattgctcacttgcccctgctgatctgctgtctgcagggtttgggccgcctgtgcgagaggttcccggtggtggtgcactctgtgacaccgtccttgcgagacttcctggtcatcccgtccccagttctggtgaagctctacaagtaccacagtcagtaccacacagttgctggcaatgatataaaaatcagtgtgaccaatgagcattccgagtcaaccctgaacgtcatgtcgggtaagaagagccagccctccatgtacgagcagctccgagacatcgctattgacaacatctgcaggtgcctgaaggctggattgacggtggacccagtgattgtggaggcgttcttggccagcctgtccaaccggctctacatctctcaggagagcgacaaggacgctcacttgattcccgaccacacaatccgagccttgggacacattgcggtggccttgagggacaccccgaaggtcatggagcccattctgcagatcctacagcagaaattctgccagccaccctcccccctcgatgtgctgattattgaccagctgggctgcctggttatcaccggaaatcaatacatctatcaggaagtgtggaacctcttccagcagatcagtgtgaaggccagctccgttgtatactcagccaccaaagattacaaggaccacggctataggcattgctccctggcagtgattaatgccctggccaacatcgcggccaacatccaagacgagcacctggtggatgagctgctcatgaacctgttggagttgtttgtgcagctggggctggaggggaagcgagccagcgagagggcaagcgagaagggccctgccctaaaggcttctagcagtgcagggaacttgggagtactcattcctgtaatagctgtgctcacccgacgactgccacccatcaaagaagctaagcctcggttacagaagctcttccgagacttctggctgtattccgttctgatgggattcgctgtggagggctcaggactctggccagaagaatggtacgagggggtctgtgaaatagccactaagtcccccttgctcacctttcccagcaaggagccactgcggtccgtcctccagtataactcagccatgaagaatgacacggtcacccccgcacaggattcacatctcatttttaccatgctctctgtgccaattagggcagatcttttcactgtcattattaacacatgttgccagccactgggacctgtttgtcctgggggatgccccatgagccctcggatgtttctctccctccaggctgagctgagtgagctccgcagcactatcatcaacctgctggacccccctcccgaggtgtccgcactcatcaacaagctggacttcgccatgtccacctacctcctctctgtgtaccggctggagtacatgagggtactgcgttcaacagatcctgatcgcttccaggtaatgttctgctactttgaggataaagctattcagaaagacaaatctgggatgatgcagtgtgtgattgcagtcgcggacaaagtattcgatgccttcctgaacatgatggcggataaagccaagaccaaggagaacgaggaggagctggagcggcacgctcagttcctgttggtgaacttcaaccacatccacaagaggataaggagggtggcagacaagtatctatctggtctggtggataagtttccccacttgctctggagcgggactgtgctgaagaccatgctggacatcctgcagaccctgtcactgtcactgagcgctgatattcacaaggatcagccttactatgacatccccgacgccccctaccggatcacggttcctgacacgtacgaagcccgtgagagcattgtgaaggacttcgctgcacgctgtgggatgatcctccaggaggccatgaagtgggcacctaccgtcaccaagtcccacctgcaggaatatctgaacaaacatcagaactgggtatcgggactgtcccagcacacggggctggccatggccactgagagcatccttcactttgctggctacaacaagcagaacacaactcttgggggcaactcagctgagcgagcgcccggcctgtgtgaagaaagactactccaacttcatggcatccctgaatctgcgcaaccgctacgcgggcgaggtgtatggaatgattcggttctcaggcaccacaggccagatgtctgacctgaacaaaatgatggtccaggatctacattcagctttagaccgcagtcatcctcagcactacacgcaggccatgttcaagctgaccgcaatgctcattagcagtaaagattgtgacccgcagctccttcatcatctgtgctggggtcccctccggatgttcaatgagcatggcatggagacggccctggcctgctgggagtggctgctggctggcaaggatggagtggaagtgccgttcatgcgggagatggcaggggcctggcacatgacggtggagcagaaatttggcctgttttctgctgagataaaggaagcagaccccctggctgcctcggaagcaagtcaacccaaaccctgtccccccgaagtgaccccccactacatctggatcgacttcctggtgcagcggtttgagatcgccaagtactgcagctctgaccaagtggagatcttctccagcctgctgcagcgctccatgtccctgaacatcggcggggccaaggggagcatgaaccggcacgtggcggccatcgggccccgcttcaagctgctgaccctggggctgtccctcctgcatgccgatgtggttccaaatgcaaccatccgcaatgtgcttcgcgagaagatctactccactgcctttgactacttcagctgtcccccaaagttccctactcaaggagagaagcggctgcgtgaagacataagcatcatgattaaattttggaccgccatgttctcagataagaagtacctgaccgccagccagcttgttcccccagataatcaggacacccggagcaacctggacataactgtcggctctcggcaacaagccacccaaggctggatcaacacataccccctgtccagcggcatgtccaccatctccaagaaatcaggcatgtctaagaaaaccaaccggggctcccagctgcacaaatactacatgaagcgcaggacgctgctgctgtccctgctggccactgagatcgagcgtctcatcacatggtacaacccgctgtcagccccggaactggaactagaccaggccggagagaacagcgtggccaactggagatctaagtacatcagcctgagtgagaagcagtggaaggacaacgtgaacctcgcctggagcatctctccctacctagccgtgcagctgcctgccaggtttaagaacacagaagccattgggaacgaagtgacccgtctcgttcggttggacccgggagccgttagtgatgtgcctgaagcaatcaagttcctggtcacctggcacaccatcgacgccgatgctccagagctcagccatgtgctgtgctgggcgcccacggacccacccacaggcctctcctacttctccagcatgtacccgccgcaccctctcacggcgcagtacggggtgaaagtcctgcggtccttccctccggacgccatcctcttctacatcccccagattgtgcaggccctcaggtacgacaagatgggctatgtgcgggagtatattctgtgggcagcgtctaaatcccagcttctggcacaccagttcatctggaacatgaagactaacatttatctagatgaagagggccaccagaaagaccctgacatcggcgacctcctggatcagttggtagaggagatcacaggctccttgtccggcccagcgaaggacttttaccagcgggagtttgatttctttaacaagatcaccaacgtgtcggctatcatcaagccctaccctaaaggcgacgagagaaagaaggcttgtctgtcggccctgtctgaagtgaaggtgcagccgggctgctacctgcccagcaaccctgaggccattgtgctggacatcgactacaagtctgggaccccgatgcagagtgctgcaaaagccccatatctggccaagttcaaggtgaagcgatgtggagttagtgaacttgaaaaagaaggtctgcggtgccgctcagactccgaggatgagtgcagcacgcaggaggccgacggccagaagatctcctggcaggcagccatcttcaaggtgggagacgactgccggcaggacatgctggccctgcagatcatcgacctcttcaagaacatcttccagctggtcggcctggacctctttgtttttccctaccgcgtggtggccactgcccctgggtgcggggtgatcgagtgcatccccgactgcacctcccgggaccagctgggccgccagacagacttcggcatgtacgactacttcacacgccagtacggggatgagtccactctggccttccagcaggcccgctacaacttcatccgaagcatggccgcctacagcctcctgctgttcctgctgcagatcaaggacagacacaacggcaacattatgctggacaagaagggtcatatcatccacatcgactttggcttcatgtttgaaagctcgccgggcggcaatctcggctgggaacccgacatcaagctgacggatgagatggtgatgatcatggggggcaagatggaggccacacccttcaagtggttcatggagatgtgtgtccgaggctacctggctgtgcggccctacatggacgcggtcgtctccctggtcactctcatgttggacacgggcctgccctgttttcgcggccagacaatcaagctcttgaagcacaggtttagccccaacatgactgagcgcgaggctgcaaatttcatcatgaaggtcatccagagctgcttcctcagcaacaggagccggacctacgacatgatccagtactatcagaatgacatcccctactgaggaggggaccttcgagggcctctgccccatgtgccctcaaagctgtcccacaatcatggagccctgcgacctccctgccctgccgccacatgcagtggaggagaggcctgtggcccaaagaacctggtagcgcctcctggggcagcacgtgggtgcgcagccttggtaacgccatggactgcagcgacaatcaatggatggtgctgtctatgcacaggtgtgagtcctctgtttgcactggacatattccctacctgtcttatttcataggtacatgaagtattgtgtataaaaaaagagataagatttaaccaacatcaacaaaataaaaacccaaaatagtgctgtgttgga

SEQ ID NO: 458417 - DNA, 3252 bp, Homo sapiens
ttggggaggggtgtttaaggggttggctagggtataattgtctgggtcgcctaggaggtcgggtgagatggcaccacaggccagatgtctgacctgaacaaaatgatggtccaggatctacattcagctttagaccgcagtcatcctcagcactacacgcaggccatgttcaagctgaccgcaatgctcattagcagtaaagattgtgacccgcagctccttcatcatctgtgctggggtcccctccggatgttcaatgagcatggcatggagacggccctggcctgctgggagtggctgctggctggcaaggatggagtggaagtgccgttcatgcgggagatggcaggggcctggcacatgacggtggagcagaaatttggcctgttttctgctgagataaaggaagcagaccccctggctgcctcggaagcaagtcaacccaaaccctgtccccccgaagtgaccccccactacatctggatcgacttcctggtgcagcggtttgagatcgccaagtactgcagctctgaccaagtggagatcttctccagcctgctgcagcgctccatgtccctgaacatcggcggggccaaggggagcatgaaccggcacgtggcggccatcgggccccgcttcaagctgctgaccctggggctgtccctcctgcatgccgatgtggttccaaatgcaaccatccgcaatgtgcttcgcgagaagatctactccactgcctttgactacttcagctgtcccccaaagttccctactcaaggagagaagcggctgcgtgaagacataagcatcatgattaaattttggaccgccatgttctcagataagaagtacctgaccgccagccagcttgttcccccagataatcaggacacccggagcaacctggacataactgtcggctctcggcaacaagccacccaaggctggatcaacacataccccctgtccagcggcatgtccaccatctccaagaaatcaggcatgtctaagaaaaccaaccggggctcccagctgcacaaatactacatgaagcgcaggacgctgctgctgtccctgctggccactgagatcgagcgtctcatcacatggtacaacccgctgtcagccccggaactggaactagaccaggccggagagaacagcgtggccaactggagatctaagtacatcagcctgagtgagaagcagtggaaggacaacgtgaacctcgcctggagcatctctccctacctagccgtgcagctgcctgccaggtttaagaacacagaagccattgggaacgaagtgacccgtctcgttcggttggacccgggagccgttagtgatgtgcctgaagcaatcaagttcctggtcacctggcacaccatcgacgccgatgctccagagctcagccatgtgctgtgctgggcgcccacggacccacccacaggcctctcctacttctccagcatgtacccgccgcaccctctcacggcgcagtacggggtgaaagtcctgcggtccttccctccggacgccatcctcttctacatcccccagattgtgcaggccctcaggtacgacaagatgggctatgtgcgggagtatattctgtgggcagcgtctaaatcccagcttctggcacaccagttcatctggaacatgaagactaacatttatctagatgaagagggccaccagaaagaccctgacatcggcgacctcctggatcagttggtagaggagatcacaggctccttgtccggcccagcgaaggacttttaccagcgggagtttgatttctttaacaagatcaccaacgtgtcggctatcatcaagccctaccctaaaggcgacgagagaaagaaggcttgtctgtcggccctgtctgaagtgaaggtgcagccgggctgctacctgcccagcaaccctgaggccattgtgctggacatcgactacaagtctgggaccccgatgcagagtgctgcaaaagccccatatctggccaagttcaaggtgaagcgatgtggagttagtgaacttgaaaaagaaggtctgcggtgccgctcagactccgaggatgagtgcagcacgcaggaggccgacggccagaagatctcctggcaggcagccatcttcaaggtgggagacgactgccggcaggacatgctggccctgcagatcatcgacctcttcaagaacatcttccagctggtcggcctggacctctttgtttttccctaccgcgtggtggccactgcccctgggtgcggggtgatcgagtgcatccccgactgcacctcccgggaccagctgggccgccagacagacttcggcatgtacgactacttcacacgccagtacggggatgagtccactctggccttccagcaggcccgctacaacttcatccgaagcatggccgcctacagcctcctgctgttcctgctgcagatcaaggacagacacaacggcaacattatgctggacaagaagggtcatatcatccacatcgactttggcttcatgtttgaaagctcgccgggcggcaatctcggctgggaacccgacatcaagctgacggatgagatggtgatgatcatggggggcaagatggaggccacacccttcaagtggttcatggagatgtgtgtccgaggctacctggctgtgcggccctacatggacgcggtcgtctccctggtcactctcatgttggacacgggcctgccctgttttcgcggccagacaatcaagctcttgaagcacaggtttagccccaacatgactgagcgcgaggctgcaaatttcatcatgaaggtcatccagagctgcttcctcagcaacaggagccggacctacgacatgatccagtactatcagaatgacatcccctactgaggaggggaccttcgagggcctctgccccatgtgccctcaaagctgtcccacaatcatggagccctgcgacctccctgccctgccgccacatgcagtggaggagaggcctgtggcccaaagaacctggtagcgcctcctggggcagcacgtgggtgcgcagccttggtaacgccatggactgcagcgacaatcaatggatggtgctgtctatgcacaggtgtgagtcctctgtttgcactggacatattccctacctgtcttatttcataggtacatgaagtattgtgtataaaaaaagagataagatttaaccaacatcaacaaaataaaaacccaaaatagtgctgtgttgga

SEQ ID NO: 458418 - DNA, 5660 bp, Homo sapiens
cgagctcggtacccctaatttcttttgaaacagatggtccacatccttgaaagagttcttcatatagacttcagtggcctccctctcactaaccctgtgcaggtccagcagctcctggagggtttctgcgggcagctgcaccttctggcccatctgctggtcatagtgggcaatagccttttgcactgcggctgagttctctatctgggccaaccccagtgctgatctctactacacttccttcagtgaccctctctacctgaccatgttcaagatgctgcgtgacactctgtactacatgcatcaggacctcccgacctcttttgtgaaggagatccatgattttgtgctggagcagttcaacacgagccagggggagctccagaagattctacatgacgcagaccggatccacaatgagctgagccccctcaaactgcgctgtcaggcgaatgctgcctgtgtggacctcatggtgtgggctgtgaaggacgagcagggtgcagaaaacctttgcatcaagctatctgagaagctgcagtccaagacgtccagcaaagtcattattgctcacttgcccctgctgatctgctgtctgcagggtttgggccgcctgtgcgagaggttcccggtggtggtgcactctgtgacaccgtccttgcgagacttcctggtcatcccgtccccagttctggtgaagctctacaagtaccacagtcagtaccacacagttgctggcaatgatataaaaatcagtgtgaccaatgagcattccgagtcaaccctgaacgtcatgtcgggtaagaagagccagccctccatgtacgagcagctccgagacatcgctattgacaacatctgcaggtgcctgaaggctggattgacggtggacccagtgattgtggaggcgttcttggccagcctgtccaaccggctctacatctctcaggagagcgacaaggacgctcacttgattcccgaccacacaatccgagccttgggacacattgcggtggccttgagggacaccccgaaggtcatggagcccattctgcagatcctacagcagaaattctgccagccaccctcccccctcgatgtgctgattattgaccagctgggctgcctggttatcaccggaaatcaatacatctatcaggaagtgtggaacctcttccagcagatcagtgtgaaggccagctccgttgtatactcagccaccaaagattacaaggaccacggctataggcattgctccctggcagtgattaatgccctggccaacatcgcggccaacatccaagacgagcacctggtggatgagctgctcatgaacctgttggagttgtttgtgcagctggggctggaggggaagcgagccagcgagagggcaagcgagaagggccctgccctaaaggcttctagcagtgcagggaacttgggagtactcattcctgtaatagctgtgctcacccgacgactgccacccatcaaagaagctaagcctcggttacagaagctcttccgagacttctggctgtattccgttctgatgggattcgctgtggagggctcaggactctggccagaagaatggtacgagggggtctgtgaaatagccactaagtcccccttgctcacctttcccagcaaggagccactgcggtccgtcctccagtataactcagccatgaagaatgacacggtcacccccgctgagctgagtgagctccgcagcactatcatcaacctgctggacccccctcccgaggtgtccgcactcatcaacaagctggacttcgccatgtccacctacctcctctctgtgtaccggctggagtacatgagggtactgcgttcaacagatcctgatcgcttccaggtaatgttctgctactttgaggataaagctattcagaaagacaaatctgggatgatgcagtgtgtgattgcagtcgcggacaaagtattcgatgccttcctgaacatgatggcggataaagccaagaccaaggagaacgaggaggagctggagcggcacgctcagttcctgttggtgaacttcaaccacatccacaagaggataaggagggtggcagacaagtatctatctggtctggtggataagtttccccacttgctctggagcgggactgtgctgaagaccatgctggacatcctgcagaccctgtcactgtcactgagcgctgatattcacaaggatcagccttactatgacatccccgacgccccctaccggatcacggttcctgacacgtacgaagcccgtgagagcattgtgaaggacttcgctgcacgctgtgggatgatcctccaggaggccatgaagtgggcacctaccgtcaccaagtcccacctgcaggaatatctgaacaaacatcagaactgggtatcgggactgtcccagcacacggggctggccatggccactgagagcatccttcactttgctggctacaacaagcagaacacaactcttgggggcaactcagctgagcgagcgcccggcctgtgtgaagaaagactactccaacttcatggcatccctgaatctgcgcaaccgctacgcgggcgaggtgtatggaatgattcggttctcaggcaccacaggccagatgtctgacctgaacaaaatgatggtccaggatctacattcagctttagaccgcagtcatcctcagcactacacgcaggccatgttcaagctgaccgcaatgctcattagcagtaaagattgtgacccgcagctccttcatcatctgtgctggggtcccctccggatgttcaatgagcatggcatggagacggccctggcctgctgggagtggctgctggctggcaaggatggagtggaagtgccgttcatgcgggagatggcaggggcctggcacatgacggtggagcagaaatttggcctgttttctgctgagataaaggaagcagaccccctggctgcctcggaagcaagtcaacccaaaccctgtccccccgaagtgaccccccactacatctggatcgacttcctggtgcagcggtttgagatcgccaagtactgcagctctgaccaagtggagatcttctccagcctgctgcagcgctccatgtccctgaacatcggcggggccaaggggagcatgaaccggcacgtggcggccatcgggccccgcttcaagctgctgaccctggggctgtccctcctgcatgccgatgtggttccaaatgcaaccatccgcaatgtgcttcgcgagaagatctactccactgcctttgactacttcagctgtcccccaaagttccctactcaaggagagaagcggctgcgtgaagacataagcatcatgattaaattttggaccgccatgttctcagataagaagtacctgaccgccagccagcttgttcccccagataatcaggacacccggagcaacctggacataactgtcggctctcggcaacaagccacccaaggctggatcaacacataccccctgtccagcggcatgtccaccatctccaagaaatcaggcatgtctaagaaaaccaaccggggctcccagctgcacaaatactacatgaagcgcaggacgctgctgctgtccctgctggccactgagatcgagcgtctcatcacatggtacaacccgctgtcagccccggaactggaactagaccaggccggagagaacagcgtggccaactggagatctaagtacatcagcctgagtgagaagcagtggaaggacaacgtgaacctcgcctggagcatctctccctacctagccgtgcagctgcctgccaggtttaagaacacagaagccattgggaacgaagtgacccgtctcgttcggttggacccgggagccgttagtgatgtgcctgaagcaatcaagttcctggtcacctggcacaccatcgacgccgatgctccagagctcagccatgtgctgtgctgggcgcccacggacccacccacaggcctctcctacttctccagcatgtacccgccgcaccctctcacggcgcagtacggggtgaaagtcctgcggtccttccctccggacgccatcctcttctacatcccccagattgtgcaggccctcaggtacgacaagatgggctatgtgcgggagtatattctgtgggcagcgtctaaatcccagcttctggcacaccagttcatctggaacatgaagactaacatttatctagatgaagagggccaccagaaagaccctgacatcggcgacctcctggatcagttggtagaggagatcacaggctccttgtccggcccagcgaaggacttttaccagcgggagtttgatttctttaacaagatcaccaacgtgtcggctatcatcaagccctaccctaaaggcgacgagagaaagaaggcttgtctgtcggccctgtctgaagtgaaggtgcagccgggtctgcggtgccgctcagactccgaggatgagtgcagcacgcaggaggccgacggccagaagatctcctggcaggcagccatcttcaaggtgggagacgactgccggcaggacatgctggccctgcagatcatcgacctcttcaagaacatcttccagctggtcggcctggacctctttgtttttccctaccgcgtggtggccactgcccctgggtgcggggtgatcgagtgcatccccgactgcacctcccgggaccagctgggccgccagacagacttcggcatgtacgactacttcacacgccagtacggggatgagtccactctggccttccagcaggcccgctacaacttcatccgaagcatggccgcctacagcctcctgctgttcctgctgcagatcaaggacagacacaacggcaacattatgctggacaagaagggtcatatcatccacatcgactttggcttcatgtttgaaagctcgccgggcggcaatctcggctgggaacccgacatcaagctgacggatgagatggtgatgatcatggggggcaagatggaggccacacccttcaagtggttcatggagatgtgtgtccgaggctacctggctgtgcggccctacatggacgcggtcgtctccctggtcactctcatgttggacacgggcctgccctgttttcgcggccagacaatcaagctcttgaagcacaggtttagccccaacatgactgagcgcgaggctgcaaatttcatcatgaaggtcatccagagctgcttcctcagcaacaggagccggacctacgacatgatccagtactatcagaatgacatcccctactgaggaggggaccttcgagggcctctgccccatgtgccctcaaagctgtcccacaatcatggagccctgcgacctccctgccctgccgccacatgcagtggaggagaggcctgtggcccaaagaacctggtagcgcctcctggggcagcacgtgggtgcgcagccttggtaacgccatggactgcagcgacaatcaatggatggtgctgtctatgcacaggtgtgagtcctctgtttgcactggacatattccctacctgtcttatttcataggtacatgaagtattgtgtataaaaaaagagataagatttaaccaacatcaacaaaataaaaacccaaaatagtgctgtgttgga

SEQ ID NO: 458419 - DNA, 5991 bp, Homo sapiens
cgagctcggtacccctaatttcttttgaaacagatggtccacatccttgaaagagttcttcatatagacttcagtggcctccctctcactaaccctgtgcaggtccagcagctcctggagggtttctgcgggcagctgcaccttctggcccatctgctggtcatagtgggcaatagccttttgcactgcggctgagttctctatctgggccaaccccagtgctgatctctactacacttccttcagtgaccctctctacctgaccatgttcaagatgctgcgtgacactctgtactacatgcatcaggacctcccgacctcttttgtgaaggagatccatgattttgtgctggagcagttcaacacgagccagggggagctccagaagattctacatgacgcagaccggatccacaatgagctgagccccctcaaactgcgctgtcaggcgaatgctgcctgtgtggacctcatggtgtgggctgtgaaggacgagcagggtgcagaaaacctttgcatcaagctatctgagaagctgcagtccaagacgtccagcaaagtcattattgctcacttgcccctgctgatctgctgtctgcagggtttgggccgcctgtgcgagaggttcccggtggtggtgcactctgtgacaccgtccttgcgagacttcctggtcatcccgtccccagttctggtgaagctctacaagtaccacagtcagtaccacacagttgctggcaatgatataaaaatcagtgtgaccaatgagcattccgagtcaaccctgaacgtcatgtcgggtaagaagagccagccctccatgtacgagcagctccgagacatcgctattgacaacatctgcaggtgcctgaaggctggattgacggtggacccagtgattgtggaggcgttcttggccagcctgtccaaccggctctacatctctcaggagagcgacaaggacgctcacttgattcccgaccacacaatccgagccttgggacacattgcggtggccttgagggacaccccgaaggtcatggagcccattctgcagatcctacagcagaaattctgccagccaccctcccccctcgatgtgctgattattgaccagctgggctgcctggttatcaccggaaatcaatacatctatcaggaagtgtggaacctcttccagcagatcagtgtgaaggccagctccgttgtatactcagccaccaaagattacaaggaccacggctataggcattgctccctggcagtgattaatgccctggccaacatcgcggccaacatccaagacgagcacctggtggatgagctgctcatgaacctgttggagttgtttgtgcagctggggctggaggggaagcgagccagcgagagggcaagcgagaagggccctgccctaaaggcttctagcagtgcagggaacttgggagtactcattcctgtaatagctgtgctcacccgacgactgccacccatcaaagaagctaagcctcggttacagaagctcttccgagacttctggctgtattccgttctgatgggattcgctgtggagggctcaggactctggccagaagaatggtacgagggggtctgtgaaatagccactaagtcccccttgctcacctttcccagcaaggagccactgcggtccgtcctccagtataactcagccatgaagaatgacacggtcacccccgctgagctgagtgagctccgcagcactatcatcaacctgctggacccccctcccgaggtgtccgcactcatcaacaagctggacttcgccatgtccacctacctcctctctgtgtaccggctggagtacatgagggtactgcgttcaacagatcctgatcgcttccaggtaatgttctgctactttgaggataaagctattcagaaagacaaatctgggatgatgcagtgtgtgattgcagtcgcggacaaagtattcgatgccttcctgaacatgatggcggataaagccaagaccaaggagaacgaggaggagctggagcggcacgctcagttcctgttggtgaacttcaaccacatccacaagaggataaggagggtggcagacaagtatctatctggtctggtggataagtttccccacttgctctggagcgggactgtgctgaagaccatgctggacatcctgcagaccctgtcactgtcactgagcgctgatattcacaaggatcagccttactatgacatccccgacgccccctaccggatcacggttcctgacacgtacgaagcccgtgagagcattgtgaaggacttcgctgcacgctgtgggatgatcctccaggaggccatgaagtgggcacctaccgtcaccaagtcccacctgcaggaatatctgaacaaacatcagaactgggtatcgggactgtcccagcacacggggctggccatggccactgagagcatccttcactttgctggctacaacaagcagaacacaactcttgggggcaactcagctgagcgagcgcccggcctgtgtgaagaaagactactccaacttcatggcatccctgaatctgcgcaaccgctacgcgggcgaggtgtatggaatgattcggttctcaggcaccacaggccagatgtctgacctgaacaaaatgatggtccaggatctacattcagctttagaccgcagtcatcctcagcactacacgcaggccatgttcaagctgaccgcaatgctcattagcagtaaagattgtgacccgcagctccttcatcatctgtgctggggtcccctccggatgttcaatgagcatggcatggagacggccctggcctgctgggagtggctgctggctggcaaggatggagtggaagtgccgttcatgcgggagatggcaggggcctggcacatgacggtggagcagaaatttggcctgttttctgctgagataaaggaagcagaccccctggctgcctcggaagcaagtcaacccaaaccctgtccccccgaagtgaccccccactacatctggatcgacttcctggtgcagcggtttgagatcgccaagtactgcagctctgaccaagtggagatcttctccagcctgctgcagcgctccatgtccctgaacatcggcggggccaaggggagcatgaaccggcacgtggcggccatcgggccccgcttcaagctgctgaccctggggctgtccctcctgcatgccgatgtggttccaaatgcaaccatccgcaatgtgcttcgcgagaagatctactccactgcctttgactacttcagctgtcccccaaagttccctactcaaggagagaagcggctgcgtgaagacataagcatcatgattaaattttggaccgccatgttctcagataagaagtacctgaccgccagccagcttgttcccccagataatcaggacacccggagcaacctggacataactgtcggctctcggcaacaagccacccaaggctggatcaacacataccccctgtccagcggcatgtccaccatctccaagaaatcaggcatgtctaagaaaaccaaccggggctcccagctgcacaaatactacatgaagcgcaggacgctgctgctgtccctgctggccactgagatcgagcgtctcatcacatggtacaacccgctgtcagccccggaactggaactagaccaggccggagagaacagcgtggccaactggagatctaagtacatcagcctgagtgagaagcagtggaaggacaacgtgaacctcgcctggagcatctctccctacctagccgtgcagctgcctgccaggtttaagaacacagaagccattgggaacgaagtgacccgtctcgttcggttggacccgggagccgttagtgatgtgcctgaagcaatcaagttcctggtcacctggcacaccatcgacgccgatgctccagagctcagccatgtgctgtgctgggcgcccacggacccacccacaggcctctcctacttctccagcatgtacccgccgcaccctctcacggcgcagtacggggtgaaagtcctgcggtccttccctccggacgccatcctcttctacatcccccagattgtgcaggccctcaggtacgacaagatgggctatgtgcgggagtatattctgtgggcagcgtctaaatcccagcttctggcacaccagttcatctggaacatgaagactaacatttatctagatgaagagggccaccagaaagaccctgacatcggcgacctcctggatcagttggtagaggagatcacaggctccttgtccggcccagcgaaggacttttaccagcgggagtttgatttctttaacaagatcaccaacgtgtcggctatcatcaagccctaccctaaaggcgacgagagaaagaaggcttgtctgtcggccctgtctgaagtgaaggtgcagccgggctgctacctgcccagcaaccctgaggccattgtgctggacatcgactacaagtctgggaccccgatgcagagtgctgcaaaagccccatatctggccaagttcaaggtgaagcgatgtggagttagtgaacttgaaaaagaaggtctgcggtgccgctcagactccgaggatgagtgcagcacgcaggaggccgacggccagaagatctcctggcaggcagccatcttcaaggtgggagacgactgccggcaggacatgctggccctgcagatcatcgacctcttcaagaacatcttccagctggtcggcctggacctctttgtttttccctaccgcgtggtggccactgcccctgggtgcggggtgatcgagtgcatccccgactgcacctcccgggaccagctgggccgccagacagacttcggcatgtacgactacttcacacgccagtacggggatgagtccactctggccttccagcaggcccgctacaacttcatccgaagcatggccgcctacagcctcctgctgttcctgctgcagatcaaggacagacacaacggcaacattatgctggacaagaagggtcatatcatccacatcgactttggcttcatgtttgaaagctcgccgggcggcaatctcggctgggaacccgacatcaagctgacggatgagatggtgatgatcatggggggcaagatggaggccacacccttcaagtggttcatggagatgtgtgtccgaggctacctggctgtgcggccctacatggacgcggtcgtctccctggtcactctcatgttggacacgggcctgccctgttttcgcggccagacaatcaagctcttgaagcacaggtttagccccaacatgactgagcgcgaggctgcaaatttcatcatgaaggtcatccagagctgcttcctcagcaacaggagccggacctacgacatgatccagtactatcagaatgacatcccctactgaggaggggaccttcgagggcctctgccccatgtgccctcaaagctgtcccacaatcatggagccctgcgacctccctgccctgccgccacatgcagtggaggagaggcctgtggcccaaagaacctggtagcgcctcctggggcagcacgtgggtgcgcagccttggtaacgccatggactgcagcgacaatcaatggatggtgctgtctatgcacaggtgtgagtcctctgtttgcactggacatattccctacctgtcttatttcataggtacatgaagtattgtgtataaaaaaagagataagatttaaccaacatcaacaaaataaaaacccaaaatagtgctgtgttggaaaaaaaaaagttttgtgtcaagtcctaagtccaccttcagccaaagggcagttcctggatttgcccctagagaggggggcccagtgttggctgcactcataggctggggcccaggagcacgggttgtggcttaacaaacatgagattcccacaatctcaccacggcataggtgcaccaaaacacaca

SEQ ID NO: 458420 - DNA, 5682 bp, Homo sapiens
cgagctcggtacccctaatttcttttgaaacagatggtccacatccttgaaagagttcttcatatagacttcagtggcctccctctcactaaccctgtgcaggtccagcagctcctggagggtttctgcgggcagctgcaccttctggcccatctgctggtcatagtgggcaatagccttttgcactgcggctgagttctctatctgggccaaccccagtgctgatctctactacacttccttcagtgaccctctctacctgaccatgttcaagatgctgcgtgacactctgtactacatgcatcaggacctcccgacctcttttgtgaaggagatccatgattttgtgctggagcagttcaacacgagccagggggagctccagaagattctacatgacgcagaccggatccacaatgagctgagccccctcaaactgcgctgtcaggcgaatgctgcctgtgtggacctcatggtgtgggctgtgaaggacgagcagggtgcagaaaacctttgcatcaagctatctgagaagctgcagtccaagacgtccagcaaagtcattattgctcacttgcccctgctgatctgctgtctgcagggtttgggccgcctgtgcgagaggttcccggtggtggtgcactctgtgacaccgtccttgcgagacttcctggtcatcccgtccccagttctggtgaagctctacaagtaccacagtcagtaccacacagttgctggcaatgatataaaaatcagtgtgaccaatgagcattccgagtcaaccctgaacgtcatgtcgggtaagaagagccagccctccatgtacgagcagctccgagacatcgctattgacaacatctgcaggtgcctgaaggctggattgacggtggacccagtgattgtggaggcgttcttggccagcctgtccaaccggctctacatctctcaggagagcgacaaggacgctcacttgattcccgaccacacaatccgagccttgggacacattgcggtggccttgagggacaccccgaaggtcatggagcccattctgcagatcctacagcagaaattctgccagccaccctcccccctcgatgtgctgattattgaccagctgggctgcctggttatcaccggaaatcaatacatctatcaggaagtgtggaacctcttccagcagatcagtgtgaaggccagctccgttgtatactcagccaccaaagattacaaggaccacggctataggcattgctccctggcagtgattaatgccctggccaacatcgcggccaacatccaagacgagcacctggtggatgagctgctcatgaacctgttggagttgtttgtgcagctggggctggaggggaagcgagccagcgagagggcaagcgagaagggccctgccctaaaggcttctagcagtgcagggaacttgggagtactcattcctgtaatagctgtgctcacccgacgactgccacccatcaaagaagctaagcctcggttacagaagctcttccgagacttctggctgtattccgttctgatgggattcgctgtggagggctcaggactctggccagaagaatggtacgagggggtctgtgaaatagccactaagtcccccttgctcacctttcccagcaaggagccactgcggtccgtcctccagtataactcagccatgaagaatgacacggtcacccccgctgagctgagtgagctccgcagcactatcatcaacctgctggacccccctcccgaggtgtccgcactcatcaacaagctggacttcgccatgtccacctacctcctctctgtgtaccggctggagtacatgagggtactgcgttcaacagatcctgatcgcttccaggtaatgttctgctactttgaggataaagctattcagaaagacaaatctgggatgatgcagtgtgtgattgcagtcgcggacaaagtattcgatgccttcctgaacatgatggcggataaagccaagaccaaggagaacgaggaggagctggagcggcacgctcagttcctgttggtgaacttcaaccacatccacaagaggataaggagggtggcagacaagtatctatctggtctggtggataagtttccccacttgctctggagcgggactgtgctgaagaccatgctggacatcctgcagaccctgtcactgtcactgagcgctgatattcacaaggatcagccttactatgacatccccgacgccccctaccggatcacggttcctgacacgtacgaagcccgtgagagcattgtgaaggacttcgctgcacgctgtgggatgatcctccaggaggccatgaagtgggcacctaccgtcaccaagtcccacctgcaggaatatctgaacaaacatcagaactgggtatcgggactgtcccagcacacggggctggccatggccactgagagcatccttcactttgctggctacaacaagcagaacacaactcttgggggcaactcagctgagcgagcgcccggcctgtgtgaagaaagactactccaacttcatggcatccctgaatctgcgcaaccgctacgcgggcgaggtgtatggaatgattcggttctcaggcaccacaggccagatgtctgacctgaacaaaatgatggtccaggatctacattcagctttagaccgcagtcatcctcagcactacacgcaggccatgttcaagctgaccgcaatgctcattagcagtaaagattgtgacccgcagctccttcatcatctgtgctggggtcccctccggatgttcaatgagcatggcatggagacggccctggcctgctgggagtggctgctggctggcaaggatggagtggaagtgccgttcatgcgggagatggcaggggcctggcacatgacggtggagcagaaatttggcctgttttctgctgagataaaggaagcagaccccctggctgcctcggaagcaagtcaacccaaaccctgtccccccgaagtgaccccccactacatctggatcgacttcctggtgcagcggtttgagatcgccaagtactgcagctctgaccaagtggagatcttctccagcctgctgcagcgctccatgtccctgaacatcggcggggccaaggggagcatgaaccggcacgtggcggccatcgggccccgcttcaagctgctgaccctggggctgtccctcctgcatgccgatgtggttccaaatgcaaccatccgcaatgtgcttcgcgagaagatctactccactgcctttgactacttcagctgtcccccaaagttccctactcaaggagagaagcggctgcgtgaagacataagcatcatgattaaattttggaccgccatgttctcagataagaagtacctgaccgccagccagcttgttcccccagataatcaggacacccggagcaacctggacataactgtcggctctcggcaacaagccacccaaggctggatcaacacataccccctgtccagcggcatgtccaccatctccaagaaatcaggcatgtctaagaaaaccaaccggggctcccagctgcacaaatactacatgaagcgcaggacgctgctgctgtccctgctggccactgagatcgagcgtctcatcacatggtacaacccgctgtcagccccggaactggaactagaccaggccggagagaacagcgtggccaactggagatctaagtacatcagcctgagtgagaagcagtggaaggacaacgtgaacctcgcctggagcatctctccctacctagccgtgcagctgcctgccaggtttaagaacacagaagccattgggaacgaagtgacccgtctcgttcggttggacccgggagccgttagtgatgtgcctgaagcaatcaagttcctggtcacctggcacaccatcgacgccgatgctccagagctcagccatgtgctgtgctgggcgcccacggacccacccacaggcctctcctacttctccagcatgtacccgccgcaccctctcacggcgcagtacggggtgaaagtcctgcggtccttccctccggacgccatcctcttctacatcccccagattgtgcaggccctcaggtacgacaagatgggctatgtgcgggagtatattctgtgggcagcgtctaaatcccagcttctggcacaccagttcatctggaacatgaagactaacatttatctagatgaagagggccaccagaaagaccctgacatcggcgacctcctggatcagttggtagaggagatcacaggctccttgtccggcccagcgaaggacttttaccagcgggagtttgatttctttaacaagatcaccaacgtgtcggctatcatcaagccctaccctaaaggcgacgagagaaagaaggcttgtctgtcggccctgtctgaagtgaaggtgcagccgggctgctacctgcccagcaaccctgaggccattgtgctggacatcgactacaagtctgggaccccgatgcagagtgctgcaaaagccccatatctggccaagttcaaggtgaagcgatgtggagttagtgaacttgaaaaagaaggtctgcggtgccgctcagactccgaggatgagtgcagcacgcaggaggccgacggccagaagatctcctggcaggcagccatcttcaaggtgggagacgactgccggcaggacatgctggccctgcagatcatcgacctcttcaagaacatcttccagctggtcggcctggacctctttgtttttccctaccgcgtggtggccactgcccctgggtgcggggtgatcgagtgcatccccgactgcacctcccgggaccagctgggccgccagacagacttcggcatgtacgactacttcacacgccagtacggggatgagtccactctggccttccagcaggcccgctacaacttcatccgaagcatggccgcctacagcctcctgctgttcctgctgcagatcaaggacagacacaacggcaacattatgctggacaagaagggtcatatcatccacatcgactttggcttcatgtttgaaagctcgccgggcggcaatctcggctgggaacccgacatcaagctgacggatgagatggtgatgatcatggggggcaagatggaggccacacccttcaagtggttcatggagatgtgtgtccgaggctacctggctgtgcggccctacatggacgcggtcgtctccctggtcactctcatgttggacacgggcctgccctgttttcgcggccagacaatcaagctcttgaagcacaggtttagccccaacatgactgagcgcgaggctgcaaatttcatcatgaaggtcatccagagctgcttcctcagcaacaggagccggacctacgacatgatccagtactatcagaatgacatcccctactgaggaggggaccttcgagggcctctgccccatgtgccctcaaagctgtcccacaatcatggagccctgcgacctccctgccctgccgccacatgcagtggaggagaggcctgtggcccaaagaacctggtagcgcctcctctgtgctgtccggcaactgactagttcccctaataatcggtgcccccgatatggcgtttccccgcataaacaacataagcttctgactcttacc

SEQ ID NO: 458421 - DNA, 1483 bp, Homo sapiens
ctgggctgtcccccagcagccagttcctccaggagacaaagcaagaatttctttcctgtttctcaggccctaccctaaaggcgacgagagaaagaaggcttgtctgtcggccctgtctgaagtgaaggtgcagccgggctgctacctgcccagcaaccctgaggccattgtgctggacatcgactacaagtctgggaccccgatgcagagtgctgcaaaagccccatatctggccaagttcaaggtgaagcgatgtggagttagtgaacttgaaaaagaaggtctgcggtgccgctcagactccgaggatgagtgcagcacgcaggaggccgacggccagaagatctcctggcaggcagccatcttcaaggtgggagacgactgccggcaggacatgctggccctgcagatcatcgacctcttcaagaacatcttccagctggtcggcctggacctctttgtttttccctaccgcgtggtggccactgcccctgggtgcggggtgatcgagtgcatccccgactgcacctcccgggaccagctgggccgccagacagacttcggcatgtacgactacttcacacgccagtacggggatgagtccactctggccttccagcaggcccgctacaacttcatccgaagcatggccgcctacagcctcctgctgttcctgctgcagatcaaggacagacacaacggcaacattatgctggacaagaagggtcatatcatccacatcgactttggcttcatgtttgaaagctcgccgggcggcaatctcggctgggaacccgacatcaagctgacggatgagatggtgatgatcatggggggcaagatggaggccacacccttcaagtggttcatggagatgtgtgtccgaggctacctggctgtgcggccctacatggacgcggtcgtctccctggtcactctcatgttggacacgggcctgccctgttttcgcggccagacaatcaagctcttgaagcacaggtttagccccaacatgactgagcgcgaggctgcaaatttcatcatgaaggtcatccagagctgcttcctcagcaacaggagccggacctacgacatgatccagtactatcagaatgacatcccctactgaggaggggaccttcgagggcctctgccccatgtgccctcaaagctgtcccacaatcatggagccctgcgacctccctgccctgccgccacatgcagtggaggagaggcctgtggcccaaagaacctggtagcgcctcctggggcagcacgtgggtgcgcagccttggtaacgccatggactgcagcgacaatcaatggatggtgctgtctatgcacaggtgtgagtcctctgtttgcactggacatattccctacctgtcttatttcataggtacatgaagtattgtgtataaaaaaagagataagatttaaccaacatcaacaaaataaaaacccaaaatagtgctgtgttgga

SEQ ID NO: 458422 - DNA, 1440 bp, Homo sapiens
gtaaattagggcttctgcaaaacccagaggcctctccttccagcccctttcccactgtccccgccatgccagtgcccacctgagggaactgtccaggggttgggtgccttatctcacacaccccaccagacagctcagcctcatgctcagcccagggcctggtggtcccagcagcctgagtccagcccccggtggtcagaaaggaaggccttccagactcttgctcggctgtggtctccccacctcactccatctctgggtgcttggcttttgccctgcatgagccagaagagctgctggggtgcaaggacgccaactgaccgcatcctgcgcctcccggcttcccaggacatgctggccctgcagatcatcgacctcttcaagaacatcttccagctggtcggcctggacctctttgtttttccctaccgcgtggtggccactgcccctgggtgcggggtgatcgagtgcatccccgactgcacctcccgggaccagctgggccgccagacagacttcggcatgtacgactacttcacacgccagtacggggatgagtccactctggccttccagcaggcccgctacaacttcatccgaagcatggccgcctacagcctcctgctgttcctgctgcagatcaaggacagacacaacggcaacattatgctggacaagaagggtcatatcatccacatcgactttggcttcatgtttgaaagctcgccgggcggcaatctcggctgggaacccgacatcaagctgacggatgagatggtgatgatcatggggggcaagatggaggccacacccttcaagtggttcatggagatgtgtgtccgaggctacctggctgtgcggccctacatggacgcggtcgtctccctggtcactctcatgttggacacgggcctgccctgttttcgcggccagacaatcaagctcttgaagcacaggtttagccccaacatgactgagcgcgaggctgcaaatttcatcatgaaggtcatccagagctgcttcctcagcaacaggagccggacctacgacatgatccagtactatcagaatgacatcccctactgaggaggggaccttcgagggcctctgccccatgtgccctcaaagctgtcccacaatcatggagccctgcgacctccctgccctgccgccacatgcagtggaggagaggcctgtggcccaaagaacctggtagcgcctcctggggcagcacgtgggtgcgcagccttggtaacgccatggactgcagcgacaatcaatggatggtgctgtctatgcacaggtgtgagtcctctgtttgcactggacatattccctacctgtcttatttcataggtacatgaagtattgtgtataaaaaaagagataagatttaaccaacatcaacaaaataaaaacccaaaatagtgctgtgttgga

SEQ ID NO: 458423 - DNA, 4308 bp, Homo sapiens
cgagctcggtacccctaatttcttttgaaacagatggtccacatccttgaaagagttcttcatatagacttcagtggcctccctctcactaaccctgtgcaggtccagcagctcctggagggtttctgcgggcagctgcaccttctggcccatctgctggtcatagtgggcaatagccttttgcactgcggctgagttctctatctgggccaaccccagtgctgatctctactacacttccttcagtgaccctctctacctgaccatgttcaagatgctgcgtgacactctgtactacatgcatcaggacctcccgacctcttttgtgaaggagatccatgattttgtgctggagcagttcaacacgagccagggggagctccagaagattctacatgacgcagaccggatccacaatgagctgagccccctcaaactgcgctgtcaggcgaatgctgcctgtgtggacctcatggtgtgggctgtgaaggacgagcagggtgcagaaaacctttgcatcaagctatctgagaagctgcagtccaagacgtccagcaaagtcattattgctcacttgcccctgctgatctgctgtctgcagggtttgggccgcctgtgcgagaggttcccggtggtggtgcactctgtgacaccgtccttgcgagacttcctggtcatcccgtccccagttctggtgaagctctacaagtaccacagtcagtaccacacagttgctggcaatgatataaaaatcagtgtgaccaatgagcattccgagtcaaccctgaacgtcatgtcgggtaagaagagccagccctccatgtacgagcagctccgagacatcgctattgacaacatctgcaggtgcctgaaggctggattgacggtggacccagtgattgtggaggcgttcttggccagcctgtccaaccggctctacatctctcaggagagcgacaaggacgctcacttgattcccgaccacacaatccgagccttgggacacattgcggtggccttgagggacaccccgaaggtcatggagcccattctgcagatcctacagcagaaattctgccagccaccctcccccctcgatgtgctgattattgaccagctgggctgcctggttatcaccggaaatcaatacatctatcaggaagtgtggaacctcttccagcagatcagtgtgaaggccagctccgttgtatactcagccaccaaagattacaaggaccacggctataggcattgctccctggcagtgattaatgccctggccaacatcgcggccaacatccaagacgagcacctggtggatgagctgctcatgaacctgttggagttgtttgtgcagctggggctggaggggaagcgagccagcgagagggcaagcgagaagggccctgccctaaaggcttctagcagtgcagggaacttgggagtactcattcctgtaatagctgtgctcacccgacgactgccacccatcaaagaagctaagcctcggttacagaagctcttccgagacttctggctgtattccgttctgatgggattcgctgtggagggctcaggactctggccagaagaatggtacgagggggtctgtgaaatagccactaagtcccccttgctcacctttcccagcaaggagccactgcggtccgtcctccagtataactcagccatgaagaatgacacggtcacccccgctgagctgagtgagctccgcagcactatcatcaacctgctggacccccctcccgaggtgtccgcactcatcaacaagctggacttcgccatgtccacctacctcctctctgtgtaccggctggagtacatgagggtactgcgttcaacagatcctgatcgcttccaggtaatgttctgctactttgaggataaagctattcagaaagacaaatctgggatgatgcagtgtgtgattgcagtcgcggacaaagtattcgatgccttcctgaacatgatggcggataaagccaagaccaaggagaacgaggaggagctggagcggcacgctcagttcctgttggtgaacttcaaccacatccacaagaggataaggagggtggcagacaagtatctatctggtctggtggataagtttccccacttgctctggagcgggactgtgctgaagaccatgctggacatcctgcagaccctgtcactgtcactgagcgctgatattcacaaggatcagccttactatgacatccccgacgccccctaccggatcacggttcctgacacgtacgaagcccgtgagagcattgtgaaggacttcgctgcacgctgtgggatgatcctccaggaggccatgaagtgggcacctaccgtcaccaagtcccacctgcaggaatatctgaacaaacatcagaactgggtatcgggactgtcccagcacacggggctggccatggccactgagagcatccttcactttgctggctacaacaagcagaacacaactcttgggggcaactcagctgagcgagcgcccggcctgtgtgaagaaagactactccaacttcatggcatccctgaatctgcgcaaccgctacgcgggcgaggtgtatggaatgattcggttctcaggcaccacaggccagatgtctgacctgaacaaaatgatggtccaggatctacattcagctttagaccgcagtcatcctcagcactacacgcaggccatgttcaagctgaccgcaatgctcattagcagtaaagattgtgacccgcagctccttcatcatctgtgctggggtcccctccggatgttcaatgagcatggcatggagacggccctggcctgctgggagtggctgctggctggcaaggatggagtggaagtgccgttcatgcgggagatggcaggggcctggcacatgacggtggagcagaaatttggcctgttttctgctgagataaaggaagcagaccccctggctgcctcggaagcaagtcaacccaaaccctgtccccccgaagtgaccccccactacatctggatcgacttcctggtgcagcggtttgagatcgccaagtactgcagctctgaccaagtggagatcttctccagcctgctgcagcgctccatgtccctgaacatcggcggggccaaggggagcatgaaccggcacgtggcggccatcgggccccgcttcaagctgctgaccctggggctgtccctcctgcatgccgatgtggttccaaatgcaaccatccgcaatgtgcttcgcgagaagatctactccactgcctttgactacttcagctgtcccccaaagttccctactcaaggagagaagcggctgcgtgaagacataagcatcatgattaaattttggaccgccatgttctcagataagaagtacctgaccgccagccagcttgttcccccagataatcaggacacccggagcaacctggacataactgtcggctctcggcaacaagccacccaaggctggatcaacacataccccctgtccagcggcatgtccaccatctccaagaaatcaggcatgtctaagaaaaccaaccggggctcccagctgcacaaatactacatgaagcgcaggacgctgctgctgtccctgctggccactgagatcgagcgtctcatcacatggtacaacccgctgtcagccccggaactggaactagaccaggccggagagaacagcgtggccaactggagatctaagtacatcagcctgagtgagaagcagtggaaggacaacgtgaacctcgcctggagcatctctccctacctagccgtgcagctgcctgccaggtttaagaacacagaagccattgggaacgaagtgacccgtctcgttcggttggacccgggagccgttagtgatgtgcctgaagcaatcaagttcctggtcacctggcacaccatcgacgccgatgctccagagctcagccatgtgctgtgctgggcgcccacggacccacccacaggcctctcctacttctccagcatgtacccgccgcaccctctcacggcgcagtacggggtgaaagtcctgcggtccttccctccggacgccatcctcttctacatcccccagattgtgcaggccctcaggtacgacaaggtaagcctgcacctgcatggccgtcctcttcactcacagagtgtgttccacaccagcttgtgcccggtctgtccccagccctcacaggctcctcagagcctcctcaggggcagggctgcccagcagtccccttgctccccctaccccaggccctgtgattgtcccttgatac

SEQ ID NO: 458424 - DNA, 3482 bp, Homo sapiens
cgagctcggtacccctaatttcttttgaaacagatggtccacatccttgaaagagttcttcatatagacttcagtggcctccctctcactaaccctgtgcaggtccagcagctcctggagggtttctgcgggcagctgcaccttctggcccatctgctggtcatagtgggcaatagccttttgcactgcggctgagttctctatctgggccaaccccagtgctgatctctactacacttccttcagtgaccctctctacctgaccatgttcaagatgctgcgtgacactctgtactacatgcatcaggacctcccgacctcttttgtgaaggagatccatgattttgtgctggagcagttcaacacgagccagggggagctccagaagattctacatgacgcagaccggatccacaatgagctgagccccctcaaactgcgctgtcaggcgaatgctgcctgtgtggacctcatggtgtgggctgtgaaggacgagcagggtgcagaaaacctttgcatcaagctatctgagaagctgcagtccaagacgtccagcaaagtcattattgctcacttgcccctgctgatctgctgtctgcagggtttgggccgcctgtgcgagaggttcccggtggtggtgcactctgtgacaccgtccttgcgagacttcctggtcatcccgtccccagttctggtgaagctctacaagtaccacagtcagtaccacacagttgctggcaatgatataaaaatcagtgtgaccaatgagcattccgagtcaaccctgaacgtcatgtcgggtaagaagagccagccctccatgtacgagcagctccgagacatcgctattgacaacatctgcaggtgcctgaaggctggattgacggtggacccagtgattgtggaggcgttcttggccagcctgtccaaccggctctacatctctcaggagagcgacaaggacgctcacttgattcccgaccacacaatccgagccttgggacacattgcggtggccttgagggacaccccgaaggtcatggagcccattctgcagatcctacagcagaaattctgccagccaccctcccccctcgatgtgctgattattgaccagctgggctgcctggttatcaccggaaatcaatacatctatcaggaagtgtggaacctcttccagcagatcagtgtgaaggccagctccgttgtatactcagccaccaaagattacaaggaccacggctataggcattgctccctggcagtgattaatgccctggccaacatcgcggccaacatccaagacgagcacctggtggatgagctgctcatgaacctgttggagttgtttgtgcagctggggctggaggggaagcgagccagcgagagggcaagcgagaagggccctgccctaaaggcttctagcagtgcagggaacttgggagtactcattcctgtaatagctgtgctcacccgacgactgccacccatcaaagaagctaagcctcggttacagaagctcttccgagacttctggctgtattccgttctgatgggattcgctgtggagggctcaggactctggccagaagaatggtacgagggggtctgtgaaatagccactaagtcccccttgctcacctttcccagcaaggagccactgcggtccgtcctccagtataactcagccatgaagaatgacacggtcacccccgctgagctgagtgagctccgcagcactatcatcaacctgctggacccccctcccgaggtgtccgcactcatcaacaagctggacttcgccatgtccacctacctcctctctgtgtaccggctggagtacatgagggtactgcgttcaacagatcctgatcgcttccaggtaatgttctgctactttgaggataaagctattcagaaagacaaatctgggatgatgcagtgtgtgattgcagtcgcggacaaagtattcgatgccttcctgaacatgatggcggataaagccaagaccaaggagaacgaggaggagctggagcggcacgctcagttcctgttggtgaacttcaaccacatccacaagaggataaggagggtggcagacaagtatctatctggtctggtggataagtttccccacttgctctggagcgggactgtgctgaagaccatgctggacatcctgcagaccctgtcactgtcactgagcgctgatattcacaaggatcagccttactatgacatccccgacgccccctaccggatcacggttcctgacacgtacgaagcccgtgagagcattgtgaaggacttcgctgcacgctgtgggatgatcctccaggaggccatgaagtgggcacctaccgtcaccaagtcccacctgcaggaatatctgaacaaacatcagaactgggtatcgggactgtcccagcacacggggctggccatggccactgagagcatccttcactttgctggctacaacaagcagaacacaactcttgggggcaactcagctgagcgagcgcccggcctgtgtgaagaaagactactccaacttcatggcatccctgaatctgcgcaaccgctacgcgggcgaggtgtatggaatgattcggttctcaggcaccacaggccagatgtctgacctgaacaaaatgatggtccaggatctacattcagctttagaccgcagtcatcctcagcactacacgcaggccatgttcaagctgaccgcaatgctcattagcagtaaagattgtgacccgcagctccttcatcatctgtgctggggtcccctccggatgttcaatgagcatggcatggagacggccctggcctgctgggagtggctgctggctggcaaggatggagtggaagtgccgttcatgcgggagatggcaggggcctggcacatgacggtggagcagaaatttggcctgttttctgctgagataaaggaagcagaccccctggctgcctcggaagcaagtcaacccaaaccctgtccccccgaagtgaccccccactacatctggatcgacttcctggtgcagcggtttgagatcgccaagtactgcagctctgaccaagtggagatcttctccagcctgctgcagcgctccatgtccctgaacatcggcggggccaaggggagcatgaaccggcacgtggcggccatcgggccccgcttcaagctgctgaccctggggctgtccctcctgcatgccgatgtggttccaaatgcaaccatccgcaatgtgcttcgcgagaagatctactccactgcctttgactacttcagctgtcccccaaagttccctactcaaggagagaagcggctgcgtgaagacataagcatcatgattaaattttggaccgccatgttctcagataagaagtacctgaccgccagccagcttgttcccccagataatcaggacacgtagcgagttccaggtaggcgggatactctagataagcca

SEQ ID NO: 458425 - DNA, 2968 bp, Homo sapiens
cgagctcggtacccctaatttcttttgaaacagatggtccacatccttgaaagagttcttcatatagacttcagtggcctccctctcactaaccctgtgcaggtccagcagctcctggagggtttctgcgggcagctgcaccttctggcccatctgctggtcatagtgggcaatagccttttgcactgcggctgagttctctatctgggccaaccccagtgctgatctctactacacttccttcagtgaccctctctacctgaccatgttcaagatgctgcgtgacactctgtactacatgcatcaggacctcccgacctcttttgtgaaggagatccatgattttgtgctggagcagttcaacacgagccagggggagctccagaagattctacatgacgcagaccggatccacaatgagctgagccccctcaaactgcgctgtcaggcgaatgctgcctgtgtggacctcatggtgtgggctgtgaaggacgagcagggtgcagaaaacctttgcatcaagctatctgagaagctgcagtccaagacgtccagcaaagtcattattgctcacttgcccctgctgatctgctgtctgcagggtttgggccgcctgtgcgagaggttcccggtggtggtgcactctgtgacaccgtccttgcgagacttcctggtcatcccgtccccagttctggtgaagctctacaagtaccacagtcagtaccacacagttgctggcaatgatataaaaatcagtgtgaccaatgagcattccgagtcaaccctgaacgtcatgtcgggtaagaagagccagccctccatgtacgagcagctccgagacatcgctattgacaacatctgcaggtgcctgaaggctggattgacggtggacccagtgattgtggaggcgttcttggccagcctgtccaaccggctctacatctctcaggagagcgacaaggacgctcacttgattcccgaccacacaatccgagccttgggacacattgcggtggccttgagggacaccccgaaggtcatggagcccattctgcagatcctacagcagaaattctgccagccaccctcccccctcgatgtgctgattattgaccagctgggctgcctggttatcaccggaaatcaatacatctatcaggaagtgtggaacctcttccagcagatcagtgtgaaggccagctccgttgtatactcagccaccaaagattacaaggaccacggctataggcattgctccctggcagtgattaatgccctggccaacatcgcggccaacatccaagacgagcacctggtggatgagctgctcatgaacctgttggagttgtttgtgcagctggggctggaggggaagcgagccagcgagagggcaagcgagaagggccctgccctaaaggcttctagcagtgcagggaacttgggagtactcattcctgtaatagctgtgctcacccgacgactgccacccatcaaagaagctaagcctcggttacagaagctcttccgagacttctggctgtattccgttctgatgggattcgctgtggagggctcaggactctggccagaagaatggtacgagggggtctgtgaaatagccactaagtcccccttgctcacctttcccagcaaggagccactgcggtccgtcctccagtataactcagccatgaagaatgacacggtcacccccgctgagctgagtgagctccgcagcactatcatcaacctgctggacccccctcccgaggtgtccgcactcatcaacaagctggacttcgccatgtccacctacctcctctctgtgtaccggctggagtacatgagggtactgcgttcaacagatcctgatcgcttccaggtaatgttctgctactttgaggataaagctattcagaaagacaaatctgggatgatgcagtgtgtgattgcagtcgcggacaaagtattcgatgccttcctgaacatgatggcggataaagccaagaccaaggagaacgaggaggagctggagcggcacgctcagttcctgttggtgaacttcaaccacatccacaagaggataaggagggtggcagacaagtatctatctggtctggtggataagtttccccacttgctctggagcgggactgtgctgaagaccatgctggacatcctgcagaccctgtcactgtcactgagcgctgatattcacaaggatcagccttactatgacatccccgacgccccctaccggatcacggttcctgacacgtacgaagcccgtgagagcattgtgaaggacttcgctgcacgctgtgggatgatcctccaggaggccatgaagtgggcacctaccgtcaccaagtcccacctgcaggaatatctgaacaaacatcagaactgggtatcgggactgtcccagcacacggggctggccatggccactgagagcatccttcactttgctggctacaacaagcagaacacaactcttgggggcaactcagctgagcgagcgcccggcctgtgtgaagaaagactactccaacttcatggcatccctgaatctgcgcaaccgctacgcgggcgaggtgtatggaatgattcggttctcaggcaccacaggccagatgtctgacctgaacaaaatgatggtccaggatctacattcagctttagaccgcagtcatcctcagcactacacgcaggccatgttcaagctgaccgcaatgctcattagcagtaaagattgtgacccgcagctccttcatcatctgtgctggggtcccctccggatgttcaatgagcatggcatggagacggccctggcctgctgggagtggctgctggctggcaaggatggagtggaagtgccggtaggaccctgacctcgggttggcagtgaggatgggatgggataacagacgggaagagccttccctggtgccgccaccaccaagca

SEQ ID NO: 458426 - DNA, 2334 bp, Homo sapiens
cgagctcggtacccctaatttcttttgaaacagatggtccacatccttgaaagagttcttcatatagacttcagtggcctccctctcactaaccctgtgcaggtccagcagctcctggagggtttctgcgggcagctgcaccttctggcccatctgctggtcatagtgggcaatagccttttgcactgcggctgagttctctatctgggccaaccccagtgctgatctctactacacttccttcagtgaccctctctacctgaccatgttcaagatgctgcgtgacactctgtactacatgcatcaggacctcccgacctcttttgtgaaggagatccatgattttgtgctggagcagttcaacacgagccagggggagctccagaagattctacatgacgcagaccggatccacaatgagctgagccccctcaaactgcgctgtcaggcgaatgctgcctgtgtggacctcatggtgtgggctgtgaaggacgagcagggtgcagaaaacctttgcatcaagctatctgagaagctgcagtccaagacgtccagcaaagtcattattgctcacttgcccctgctgatctgctgtctgcagggtttgggccgcctgtgcgagaggttcccggtggtggtgcactctgtgacaccgtccttgcgagacttcctggtcatcccgtccccagttctggtgaagctctacaagtaccacagtcagtaccacacagttgctggcaatgatataaaaatcagtgtgaccaatgagcattccgagtcaaccctgaacgtcatgtcgggtaagaagagccagccctccatgtacgagcagctccgagacatcgctattgacaacatctgcaggtgcctgaaggctggattgacggtggacccagtgattgtggaggcgttcttggccagcctgtccaaccggctctacatctctcaggagagcgacaaggacgctcacttgattcccgaccacacaatccgagccttgggacacattgcggtggccttgagggacaccccgaaggtcatggagcccattctgcagatcctacagcagaaattctgccagccaccctcccccctcgatgtgctgattattgaccagctgggctgcctggttatcaccggaaatcaatacatctatcaggaagtgtggaacctcttccagcagatcagtgtgaaggccagctccgttgtatactcagccaccaaagattacaaggaccacggctataggcattgctccctggcagtgattaatgccctggccaacatcgcggccaacatccaagacgagcacctggtggatgagctgctcatgaacctgttggagttgtttgtgcagctggggctggaggggaagcgagccagcgagagggcaagcgagaagggccctgccctaaaggcttctagcagtgcagggaacttgggagtactcattcctgtaatagctgtgctcacccgacgactgccacccatcaaagaagctaagcctcggttacagaagctcttccgagacttctggctgtattccgttctgatgggattcgctgtggagggctcaggactctggccagaagaatggtacgagggggtctgtgaaatagccactaagtcccccttgctcacctttcccagcaaggagccactgcggtccgtcctccagtataactcagccatgaagaatgacacggtcacccccgctgagctgagtgagctccgcagcactatcatcaacctgctggacccccctcccgaggtgtccgcactcatcaacaagctggacttcgccatgtccacctacctcctctctgtgtaccggctggagtacatgaggtacacgtgccttcaccaccatgcacatgcacatccacatttgagcagggttttcatttttgtgccctcgtaagcatgagacttttttcaacttctcccaagacatgcaaactttctgaaaaaccaagcaaaaacaccctctacttttctcgtatgcccctccttcatgaccaccagacaccacgtatagtaacacctcccagtatctaagctccgcatcatcttctctctgataggaaacaggcttctgagcagttgcagtcagtgttgtgaactcagcccacggactgagcgaggcccttctgaggacccagcctcgctgagtgcgtgtctaggacactcactgagctgtttcccaggaccatggttgagtacaaacagcaaatgcgacatggggtggggccggctccaaaacagtcctgcatgtggcccgatgctcaggacacatctgtggccacagcagtcctgtggcagtacggtagtgac

SEQ ID NO: 458427 - DNA, 1300 bp, Homo sapiens
cgagctcggtacccctaatttcttttgaaacagatggtccacatccttgaaagagttcttcatatagacttcagtggcctccctctcactaaccctgtgcaggtccagcagctcctggagggtttctgcgggcagctgcaccttctggcccatctgctggtcatagtgggcaatagccttttgcactgcggctgagttctctatctgggccaaccccagtgctgatctctactacacttccttcagtgaccctctctacctgaccatgttcaagatgctgcgtgacactctgtactacatgcatcaggacctcccgacctcttttgtgaaggagatccatgattttgtgctggagcagttcaacacgagccagggggagctccagaagattctacatgacgcagaccggatccacaatgagctgagccccctcaaactgcgctgtcaggcgaatgctgcctgtgtggacctcatggtgtgggctgtgaaggacgagcagggtgcagaaaacctttgcatcaagctatctgagaagctgcagtccaagacgtccagcaaagtcattattgctcacttgcccctgctgatctgctgtctgcagggtttgggccgcctgtgcgagaggttcccggtggtggtgcactctgtgacaccgtccttgcgagacttcctggtcatcccgtccccagttctggtgaagctctacaagtaccacagtcagtaccacacagttgctggcaatgatataaaaatcagtgtgaccaatgagcattccgagtcaaccctgaacgtcatgtcgggtaagaagagccagccctccatgtacgagcagctccgagacatcgctattgacaacatctgcaggtgcctgaaggctggattgacggtggacccagtgattgtggaggcgttcttggccagcctgtccaaccggctctacatctctcaggagagcgacaaggacgctcacttgattcccgaccacacaatccgagccttgggacacattgcggtggccttgagggacaccccgaaggtcatggagcccattctgcagatcctacagcagaaattctgccagccaccctcccccctcgatgtgctgattattgaccagctgggctgcctggttatcaccggaaatgtaagggaggccagagccagaacaccactaaccctgtgcaagctacgttaaactcttgactataagggatgtacaaatacagattaaatataccttgcagatgagctaaatgctgacaacggttttaatgcggagtagtaagaatagtgtaagatg

SEQ ID NO: 458428 - DNA, 1228 bp, Homo sapiens
gtaaattagggcttctgcaaaacccagaggcctctccttccagcccctttcccactgtccccgccatgccagtgcccacctgagggaactgtccaggggttgggtgccttatctcacacaccccaccagacagctcagcctcatgctcagcccagggcctggtggtcccagcagcctgagtccagcccccggtggtcagaaaggaaggccttccagactcttgctcggctgtggtctccccacctcactccatctctgggtgcttggcttttgccctgcatgagccagaagagctgctggggtgcaaggacgccaactgaccgcatcctgcgcctcccggcttcccaggacatgctggccctgcagatcatcgacctcttcaagaacatcttccagctggtcggcctggacctctttgtttttccctaccgcgtggtggccactgcccctgggtgcggggtgatcgagtgcatccccgactgcacctcccgggaccagctgggccgccagacagacttcggcatgtacgactacttcacacgccagtacggggatgagtccactctggccttccagcaggcccgctacaacttcatccgaagcatggccgcctacagcctcctgctgttcctgctgcagatcaaggacagacacaacggcaacattatgctggacaagaagggtcatatcatccacatcggtcagccagccacagcgccaccctcctctcccttcacccctggcacccaggggtggatagggatccccaccccacagagaggagaatgcccaggaccaccctgccaggagtgtcagggtccagctctgaggtccgaactgtcggccaccaagctgttctgctgtagagggtgcctggccccggccccagggagctagggcgagagccgccattgctctgagtcagaagctggagctgggcggagtggggctggtccaggttcagtgccccagcttggctccttcctccacttcctcccttctctttctctgcctgctgccccaccacccaccccatcactgtctccaagaaaacacaacctgcctgttgggggtggagggggtgctcaaagttacaggatcctgcatatgctaatacagtccaagatgcctagttctaaggctcattcttgcgctgtaacactgagagtatccttatgaggcctgattgtctgtacattggtatttaagctctatggaacatgcagca

SEQ ID NO: 458429 - DNA, 448 bp, Homo sapiens
aggcgacgagagaaagaaggcttgtctgtcggccctgtctgaagtgaaggtgcagccgggtgagcaggtggcttctggaggctcagaccaacctcttcctgcaggcgggcggcggggcgtgaaggctgctgccctctccaggcactgcaggatgtggacacagtggcttggccagccccacacctgcttgggcccacggtgcctggtgccccaggaccccagcccctccccagaatctgccgctagtgagcgggagctgctcgtcagtgggtgcccttcatcttccttgctgcctgctgtttttctggaggctgacagtgacctcagtagctgttactctagaagagggttcctaggctccagcattacaggagcaggtcacacagacgaggggatggcgggcccagtgtgggacggctcaggtgtgctgggacccatcagcaccacc

SEQ ID NO: 458430 - DNA, 428 bp, Homo sapiens
ccaccctcctctcccttcacccctggcacccaggggtggatagggatccccaccccacagagaggagaatgcccaggaccaccctgccaggagtgtcagggtccagctctgaggtccgaactgtcggccaccaagctgttctgctgtagagggtgcctggccccggccccagggagctagggcgagagccgccattgctctgagtcagaagctggagctgggcggagtggggctggtccaggttcagtgccccagcttggctccttcctccacttcctcccttctctttctctgcctgctgccccaccacccaccccatcactgtctccaagaaaacacaacctgcctgttgggggtggagggggtgctcctgttgcagtccttttccactcctcaaaacagaccacttgtccttgcccgccctggct

SEQ ID NO: 458431 - DNA, 695 bp, Homo sapiens
ttgatttgggtgtgccatgaatagatgaagaccttccaagcagggcagctgggtgtgttgaagtcatagtctgaagttgttaatgacaggttgaagataccacttgtcagcccttggggtggaccccattattgtggcttattttgaaccttcacagttattagtgggtgggttgtgaaatcttagtcaatgttacaagttagtacttactatatgactctatcaggatactttcttatattgtaacgttttcacttgatcttctagaatacctttgcaagtatgctatcccatgcctgataggaatctcgcgagcatttgggcgttacagcaacatggaagagtctctcctctcaaagctctttcccaaaatccctcctcattccctccgtgtcctggaagagcttgaaggtgttcgaaggcgttcctttaatgacttccgctccatcctccccagcaatctgctgactgtctgtcaggagggtaccctgaagaggaaaaccagcagtgtgtccagcatctctcaggtgggcctgggctactggggaaagagcagaggagaaagaccctgttaagctcccctgcgaagaaaatccctcttctttgtagttggagtaaacttaagtaacgtgaaatgtttcactagaattctctttaatacaaagacttgtcttgtccctcttaagatgttgggg

SEQ ID NO: 458432 - DNA, 454 bp, Homo sapiens
ttgcaaaggcctatttaccagtagcagaaactgccttccagagacttttttttttaatttcttatggaacatatcaaactgctgggtattctaaaatattttgctttattaacttgccagcagtgaagatttttattaatagtaacccccagacccgagtgtgactgcttcattgggtttaggcttagccatggtaaacacgaggaaaggatagtgctgccatagtctacaataatggttatctgtctgtaggcaactcagctgagcgagcgcccggcctgtgtgaagaaagactactccaacttcatggcatccctgaatctgcgcaaccgctacgcgggcgaggtgcttctcttgtccttgcgccctagggcctttaacgtgtcctcttgttttgaggcctgttggccgcttcctagtggaaaatgaacaaagcgtcccggtgatgtggaat

SEQ ID NO: 458433 - DNA, 409 bp, Homo sapiens
attgtgcgtatgcatgcctctgtccttatctccttgtctcagagcataggcatgtatcagggttgtcacaagatttaaggtgaagcccaccttggattgtacttcctggaccactgtgtggaagtcgagaaagatctttgtcatccagactagtgcctggggcttatgtttctgcccgtggttaaaatcctgggctgtcagtttcagatgaacactgcatcaagactgttatgaaattaaggtctagatcgtagtctctgggtactgtttcactactgcatgctggagggactgttgctaaggcgcttctgttcttccttctgtagggacgctcacttgattcccgaccacacaatccgagccttgggacacattgcggtggccttgagggacaccccgaaggtcatgg

SEQ ID NO: 458434 - DNA, 344 bp, Homo sapiens
ggtttgggccgcctgtgcgagaggttcccggtggtggtgcactctgtgacaccgtccttgcgagacttcctggtcatcccgtccccagttctggtgaagctctacaagtaccacagtcagtaccacacaggtaataacagactatgtgcccttcaggccctgagaaaggggctctgtgactgtgtgtgagcctcacacaggtttcatgactgtacctgggtgcattccttcgccacacctttccttctgtctttccctttgcgtcccctccaagctccaggcctttcttccccggccttctctcatcctgtattcctgttacaccaaaggccccttcaagtcct

SEQ ID NO: 458435 - DNA, 6493 bp, Homo sapiens
  misc_feature (6)..(6): n is a, c, g, or t
  misc_feature (12)..(12): n is a, c, g, or t
  misc_feature (18)..(18): n is a, c, g, or t
atgtgnccagtngatttncatgggatcttccagttagatgaaagacggagagatgcagtgattgcattgggcatttttctgattgaatctgatcttcagcacaaagattgtgtggttccttaccttcttcgacttctcaaaggtcttccaaaagtgtattgggtagaagaaagcacagctcggaaaggcagaggtgccctcccggttgcagagagcttcagcttctgcttggtaactctgctgtctgatgtggcctatagggatccttcacttagggatgagattttagaggtgcttttgcaggttttgcatgtcctcttggggatgtgccaggccttggagattcaagacaaagaatacctttgcaagtatgctatcccatgcctgataggaatctcgcgagcatttgggcgttacagcaacatggaagagtctctcctctcaaagctctttcccaaaatccctcctcattccctccgtgtcctggaagagcttgaaggtgttcgaaggcgttcctttaatgacttccgctccatcctccccagcaatctgctgactgtctgtcaggagggtaccctgaagaggaaaaccagcagtgtgtccagcatctctcaggtcagccctgaacgcggcatgccccctcccagttcccctggaggatctgcctttcactactttgaagcctcctgtttgcccgatgggactgccctagagcctgagtactacttttcaaccatcagctccagcttctcagtctctccccttttcaacggtgtcacatataaggagtttaacattccattggaaatgcttcgggaactcttaaacctggtgaagaagatcgttgaggaggctgttctcaaatctttggatgccattgtagccagtgtgatggaggccaaccccagtgctgatctctactacacttccttcagtgaccctctctacctgaccatgttcaagatgctgcgtgacactctgtactacatgcatcaggacctcccgacctcttttgtgaaggagatccatgattttgtgctggagcagttcaacacgagccagggggagctccagaagattctacatgacgcagaccggatccacaatgagctgagccccctcaaactgcgctgtcaggcgaatgctgcctgtgtggacctcatggtgtgggctgtgaaggacgagcagggtgcagaaaacctttgcatcaagctatctgagaagctgcagtccaagacgtccagcaaagtcattattgctcacttgcccctgctgatctgctgtctgcagggtttgggccgcctgtgcgagaggttcccggtggtggtgcactctgtgacaccgtccttgcgagacttcctggtcatcccgtccccagttctggtgaagctctacaagtaccacagtcagtaccacacagttgctggcaatgatataaaaatcagtgtgaccaatgagcattccgagtcaaccctgaacgtcatgtcgggtaagaagagccagccctccatgtacgagcagctccgagacatcgctattgacaacatctgcaggtgcctgaaggctggattgacggtggacccagtgattgtggaggcgttcttggccagcctgtccaaccggctctacatctctcaggagagcgacaaggacgctcacttgattcccgaccacacaatccgagccttgggacacattgcggtggccttgagggacaccccgaaggtcatggagcccattctgcagatcctacagcagaaattctgccagccaccctcccccctcgatgtgctgattattgaccagctgggctgcctggttatcaccggaaatcaatacatctatcaggaagtgtggaacctcttccagcagatcagtgtgaaggccagctccgttgtatactcagccaccaaagattacaaggaccacggctataggcattgctccctggcagtgattaatgccctggccaacatcgcggccaacatccaagacgagcacctggtggatgagctgctcatgaacctgttggagttgtttgtgcagctggggctggaggggaagcgagccagcgagagggcaagcgagaagggccctgccctaaaggcttctagcagtgcagggaacttgggagtactcattcctgtaatagctgtgctcacccgacgactgccacccatcaaagaagctaagcctcggttacagaagctcttccgagacttctggctgtattccgttctgatgggattcgctgtggagggctcaggactctggccagaagaatggtacgagggggtctgtgaaatagccactaagtcccccttgctcacctttcccagcaaggagccactgcggtccgtcctccagtataactcagccatgaagaatgacacggtcacccccgctgagctgagtgagctccgcagcactatcatcaacctgctggacccccctcccgaggtgtccgcactcatcaacaagctggacttcgccatgtccacctacctcctctctgtgtaccggctggagtacatgagggtactgcgttcaacagatcctgatcgcttccaggtaatgttctgctactttgaggataaagctattcagaaagacaaatctgggatgatgcagtgtgtgattgcagtcgcggacaaagtattcgatgccttcctgaacatgatggcggataaagccaagaccaaggagaacgaggaggagctggagcggcacgctcagttcctgttggtgaacttcaaccacatccacaagaggataaggagggtggcagacaagtatctatctggtctggtggataagtttccccacttgctctggagcgggactgtgctgaagaccatgctggacatcctgcagaccctgtcactgtcactgagcgctgatattcacaaggatcagccttactatgacatccccgacgccccctaccggatcacggttcctgacacgtacgaagcccgtgagagcattgtgaaggacttcgctgcacgctgtgggatgatcctccaggaggccatgaagtgggcacctaccgtcaccaagtcccacctgcaggaatatctgaacaaacatcagaactgggtatcgggactgtcccagcacacggggctggccatggccactgagagcatccttcactttgctggctacaacaagcagaacacaactcttgggggcaactcagctgagcgagcgcccggcctgtgtgaagaaagactactccaacttcatggcatccctgaatctgcgcaaccgctacgcgggcgaggtgtatggaatgattcggttctcaggcaccacaggccagatgtctgacctgaacaaaatgatggtccaggatctacattcagctttagaccgcagtcatcctcagcactacacgcaggccatgttcaagctgaccgcaatgctcattagcagtaaagattgtgacccgcagctccttcatcatctgtgctggggtcccctccggatgttcaatgagcatggcatggagacggccctggcctgctgggagtggctgctggctggcaaggatggagtggaagtgccgttcatgcgggagatggcaggggcctggcacatgacggtggagcagaaatttggcctgttttctgctgagataaaggaagcagaccccctggctgcctcggaagcaagtcaacccaaaccctgtccccccgaagtgaccccccactacatctggatcgacttcctggtgcagcggtttgagatcgccaagtactgcagctctgaccaagtggagatcttctccagcctgctgcagcgctccatgtccctgaacatcggcggggccaaggggagcatgaaccggcacgtggcggccatcgggccccgcttcaagctgctgaccctggggctgtccctcctgcatgccgatgtggttccaaatgcaaccatccgcaatgtgcttcgcgagaagatctactccactgcctttgactacttcagctgtcccccaaagttccctactcaaggagagaagcggctgcgtgaagacataagcatcatgattaaattttggaccgccatgttctcagataagaagtacctgaccgccagccagcttgttcccccagataatcaggacacccggagcaacctggacataactgtcggctctcggcaacaagccacccaaggctggatcaacacataccccctgtccagcggcatgtccaccatctccaagaaatcaggcatgtctaagaaaaccaaccggggctcccagctgcacaaatactacatgaagcgcaggacgctgctgctgtccctgctggccactgagatcgagcgtctcatcacatggtacaacccgctgtcagccccggaactggaactagaccaggccggagagaacagcgtggccaactggagatctaagtacatcagcctgagtgagaagcagtggaaggacaacgtgaacctcgcctggagcatctctccctacctagccgtgcagctgcctgccaggtttaagaacacagaagccattgggaacgaagtgacccgtctcgttcggttggacccgggagccgttagtgatgtgcctgaagcaatcaagttcctggtcacctggcacaccatcgacgccgatgctccagagctcagccatgtgctgtgctgggcgcccacggacccacccacaggcctctcctacttctccagcatgtacccgccgcaccctctcacggcgcagtacggggtgaaagtcctgcggtccttccctccggacgccatcctcttctacatcccccagattgtgcaggccctcaggtacgacaagatgggctatgtgcgggagtatattctgtgggcagcgtctaaatcccagcttctggcacaccagttcatctggaacatgaagactaacatttatctagatgaagagggccaccagaaagaccctgacatcggcgacctcctggatcagttggtagaggagatcacaggctccttgtccggcccagcgaaggacttttaccagcgggagtttgatttctttaacaagatcaccaacgtgtcggctatcatcaagccctaccctaaaggcgacgagagaaagaaggcttgtctgtcggccctgtctgaagtgaaggtgcagccgggctgctacctgcccagcaaccctgaggccattgtgctggacatcgactacaagtctgggaccccgatgcagagtgctgcaaaagccccatatctggccaagttcaaggtgaagcgatgtggagttagtgaacttgaaaaagaaggtctgcggtgccgctcagactccgaggatgagtgcagcacgcaggaggccgacggccagaagatctcctggcaggcagccatcttcaaggtgggagacgactgccggcaggacatgctggccctgcagatcatcgacctcttcaagaacatcttccagctggtcggcctggacctctttgtttttccctaccgcgtggtggccactgcccctgggtgcggggtgatcgagtgcatccccgactgcacctcccgggaccagctgggccgccagacagacttcggcatgtacgactacttcacacgccagtacggggatgagtccactctggccttccagcaggcccgctacaacttcatccgaagcatggccgcctacagcctcctgctgttcctgctgcagatcaaggacagacacaacggcaacattatgctggacaagaagggtcatatcatccacatcgactttggcttcatgtttgaaagctcgccgggcggcaatctcggctgggaacccgacatcaagctgacggatgagatggtgatgatcatggggggcaagatggaggccacacccttcaagtggttcatggagatgtgtgtccgaggctacctggctgtgcggccctacatggacgcggtcgtctccctggtcactctcatgttggacacgggcctgccctgttttcgcggccagacaatcaagctcttgaagcacaggtttagccccaacatgactgagcgcgaggctgcaaatttcatcatgaaggtcatccagagctgcttcctcagcaacaggagccggacctacgacatgatccagtactatcagaatgacatcccctactgaggaggggaccttcgagggcctctgccccatgtgccctcaaagctgtcccacaatcatggagccctgcgacctccctgccctgccgccacatgcagtggaggagaggcctgtggcccaaagaacctggtagcgcctcctggggcagcacgtgggtgcgcagccttggtaacgccatggactgcagcgacaatcaatggatggtgctgtctatgcacaggtgtgagtcctctgtttgcactggacatattccctacctgtcttatttcataggtacatgaagtattgtgtataaaaaaagagataagatttaaccaacatcaacaaaataaaaacccaaaatagtgctgtgttgga

SEQ ID NO: 458436 - DNA, 5804 bp, Homo sapiens
cgagctcggtacccctaatttcttttgaaacagatggtccacatccttgaaagagttcttcatatagacttcagtggcctccctctcactaaccctgtgcaggtccagcagctcctggagggtttctgcgggcagctgcaccttctggcccatctgctggtcatagtgggcaatagccttttgcactgcggctgagttctctatctgggccaaccccagtgctgatctctactacacttccttcagtgaccctctctacctgaccatgttcaagatgctgcgtgacactctgtactacatgcatcaggacctcccgacctcttttgtgaaggagatccatgattttgtgctggagcagttcaacacgagccagggggagctccagaagattctacatgacgcagaccggatccacaatgagctgagccccctcaaactgcgctgtcaggcgaatgctgcctgtgtggacctcatggtgtgggctgtgaaggacgagcagggtgcagaaaacctttgcatcaagctatctgagaagctgcagtccaagacgtccagcaaagtcattattgctcacttgcccctgctgatctgctgtctgcagggtttgggccgcctgtgcgagaggttcccggtggtggtgcactctgtgacaccgtccttgcgagacttcctggtcatcccgtccccagttctggtgaagctctacaagtaccacagtcagtaccacacagttgctggcaatgatataaaaatcagtgtgaccaatgagcattccgagtcaaccctgaacgtcatgtcgggtaagaagagccagccctccatgtacgagcagctccgagacatcgctattgacaacatctgcaggtgcctgaaggctggattgacggtggacccagtgattgtggaggcgttcttggccagcctgtccaaccggctctacatctctcaggagagcgacaaggacgctcacttgattcccgaccacacaatccgagccttgggacacattgcggtggccttgagggacaccccgaaggtcatggagcccattctgcagatcctacagcagaaattctgccagccaccctcccccctcgatgtgctgattattgaccagctgggctgcctggttatcaccggaaatcaatacatctatcaggaagtgtggaacctcttccagcagatcagtgtgaaggccagctccgttgtatactcagccaccaaagattacaaggaccacggctataggcattgctccctggcagtgattaatgccctggccaacatcgcggccaacatccaagacgagcacctggtggatgagctgctcatgaacctgttggagttgtttgtgcagctggggctggaggggaagcgagccagcgagagggcaagcgagaagggccctgccctaaaggcttctagcagtgcagggaacttgggagtactcattcctgtaatagctgtgctcacccgacgactgccacccatcaaagaagctaagcctcggttacagaagctcttccgagacttctggctgtattccgttctgatgggattcgctgtggagggctcaggactctggccagaagaatggtacgagggggtctgtgaaatagccactaagtcccccttgctcacctttcccagcaaggagccactgcggtccgtcctccagtataactcagccatgaagaatgacacggtcacccccgctgagctgagtgagctccgcagcactatcatcaacctgctggacccccctcccgaggtgtccgcactcatcaacaagctggacttcgccatgtccacctacctcctctctgtgtaccggctggagtacatgagggtactgcgttcaacagatcctgatcgcttccaggtaatgttctgctactttgaggataaagctattcagaaagacaaatctgggatgatgcagtgtgtgattgcagtcgcggacaaagtattcgatgccttcctgaacatgatggcggataaagccaagaccaaggagaacgaggaggagctggagcggcacgctcagttcctgttggtgaacttcaaccacatccacaagaggataaggagggtggcagacaagtatctatctggtctggtggataagtttccccacttgctctggagcgggactgtgctgaagaccatgctggacatcctgcagaccctgtcactgtcactgagcgctgatattcacaaggatcagccttactatgacatccccgacgccccctaccggatcacggttcctgacacgtacgaagcccgtgagagcattgtgaaggacttcgctgcacgctgtgggatgatcctccaggaggccatgaagtgggcacctaccgtcaccaagtcccacctgcaggaatatctgaacaaacatcagaactgggtatcgggactgtcccagcacacggggctggccatggccactgagagcatccttcactttgctggctacaacaagcagaacacaactcttgggggcaactcagctgagcgagcgcccggcctgtgtgaagaaagactactccaacttcatggcatccctgaatctgcgcaaccgctacgcgggcgaggtgtatggaatgattcggttctcaggcaccacaggccagatgtctgacctgaacaaaatgatggtccaggatctacattcagctttagaccgcagtcatcctcagcactacacgcaggccatgttcaagctgaccgcaatgctcattagcagtaaagattgtgacccgcagctccttcatcatctgtgctggggtcccctccggatgttcaatgagcatggcatggagacggccctggcctgctgggagtggctgctggctggcaaggatggagtggaagtgccgttcatgcgggagatggcaggggcctggcacatgacggtggagcagaaatttggcctgttttctgctgagataaaggaagcagaccccctggctgcctcggaagcaagtcaacccaaaccctgtccccccgaagtgaccccccactacatctggatcgacttcctggtgcagcggtttgagatcgccaagtactgcagctctgaccaagtggagatcttctccagcctgctgcagcgctccatgtccctgaacatcggcggggccaaggggagcatgaaccggcacgtggcggccatcgggccccgcttcaagctgctgaccctggggctgtccctcctgcatgccgatgtggttccaaatgcaaccatccgcaatgtgcttcgcgagaagatctactccactgcctttgactacttcagctgtcccccaaagttccctactcaaggagagaagcggctgcgtgaagacataagcatcatgattaaattttggaccgccatgttctcagataagaagtacctgaccgccagccagcttgttcccccagataatcaggacacccggagcaacctggacataactgtcggctctcggcaacaagccacccaaggctggatcaacacataccccctgtccagcggcatgtccaccatctccaagaaatcaggcatgtctaagaaaaccaaccggggctcccagctgcacaaatactacatgaagcgcaggacgctgctgctgtccctgctggccactgagatcgagcgtctcatcacatggtacaacccgctgtcagccccggaactggaactagaccaggccggagagaacagcgtggccaactggagatctaagtacatcagcctgagtgagaagcagtggaaggacaacgtgaacctcgcctggagcatctctccctacctagccgtgcagctgcctgccaggtttaagaacacagaagccattgggaacgaagtgacccgtctcgttcggttggacccgggagccgttagtgatgtgcctgaagcaatcaagttcctggtcacctggcacaccatcgacgccgatgctccagagctcagccatgtgctgtgctgggcgcccacggacccacccacaggcctctcctacttctccagcatgtacccgccgcaccctctcacggcgcagtacggggtgaaagtcctgcggtccttccctccggacgccatcctcttctacatcccccagattgtgcaggccctcaggtacgacaagatgggctatgtgcgggagtatattctgtgggcagcgtctaaatcccagcttctggcacaccagttcatctggaacatgaagactaacatttatctagatgaagagggccaccagaaagaccctgacatcggcgacctcctggatcagttggtagaggagatcacaggctccttgtccggcccagcgaaggacttttaccagcgggagtttgatttctttaacaagatcaccaacgtgtcggctatcatcaagccctaccctaaaggcgacgagagaaagaaggcttgtctgtcggccctgtctgaagtgaaggtgcagccgggctgctacctgcccagcaaccctgaggccattgtgctggacatcgactacaagtctgggaccccgatgcagagtgctgcaaaagccccatatctggccaagttcaaggtgaagcgatgtggagttagtgaacttgaaaaagaaggtctgcggtgccgctcagactccgaggatgagtgcagcacgcaggaggccgacggccagaagatctcctggcaggcagccatcttcaaggtgggagacgactgccggcaggacatgctggccctgcagatcatcgacctcttcaagaacatcttccagctggtcggcctggacctctttgtttttccctaccgcgtggtggccactgcccctgggtgcggggtgatcgagtgcatccccgactgcacctcccgggaccagctgggccgccagacagacttcggcatgtacgactacttcacacgccagtacggggatgagtccactctggccttccagcaggcccgctacaacttcatccgaagcatggccgcctacagcctcctgctgttcctgctgcagatcaaggacagacacaacggcaacattatgctggacaagaagggtcatatcatccacatcgactttggcttcatgtttgaaagctcgccgggcggcaatctcggctgggaacccgacatcaagctgacggatgagatggtgatgatcatggggggcaagatggaggccacacccttcaagtggttcatggagatgtgtgtccgaggctacctggctgtgcggccctacatggacgcggtcgtctccctggtcactctcatgttggacacgggcctgccctgttttcgcggccagacaatcaagctcttgaagcacaggtttagccccaacatgactgagcgcgaggctgcaaatttcatcatgaaggtcatccagagctgcttcctcagcaacaggagccggacctacgacatgatccagtactatcagaatgacatcccctactgaggaggggaccttcgagggcctctgccccatgtgccctcaaagctgtcccacaatcatggagccctgcgacctccctgccctgccgccacatgcagtggaggagaggcctgtggcccaaagaacctggtagcgcctcctggggcagcacgtgggtgcgcagccttggtaacgccatggactgcagcgacaatcaatggatggtgctgtctatgcacaggtgtgagtcctctgtttgcactggacatattccctacctgtcttatttcataggtacatgaagtattgtgtataaaaaaagagataagatttaaccaacatcaacaaaataaaaacccaaaatagtgctgtgttgga

SEQ ID NO: 458437 - DNA, 6504 bp, Homo sapiens
cgagctcggtacccctaatttcttttgaaacagatggtccacatccttgaaagagttcttcatatagacttcagtggcctccctctcactaaccctgtgcaggtccagcagctcctggagggtttctgcgggcagctgcaccttctggcccatctgctggtcatagtgggcaatagccttttgcactgcggctgagttctctatctgggccaaccccagtgctgatctctactacacttccttcagtgaccctctctacctgaccatgttcaagatgctgcgtgacactctgtactacatgcatcaggacctcccgacctcttttgtgaaggagatccatgattttgtgctggagcagttcaacacgagccagggggagctccagaagattctacatgacgcagaccggatccacaatgagctgagccccctcaaactgcgctgtcaggcgaatgctgcctgtgtggacctcatggtgtgggctgtgaaggacgagcagggtgcagaaaacctttgcatcaagctatctgagaagctgcagtccaagacgtccagcaaagtcattattgctcacttgcccctgctgatctgctgtctgcagggtttgggccgcctgtgcgagaggttcccggtggtggtgcactctgtgacaccgtccttgcgagacttcctggtcatcccgtccccagttctggtgaagctctacaagtaccacagtcagtaccacacagttgctggcaatgatataaaaatcagtgtgaccaatgagcattccgagtcaaccctgaacgtcatgtcgggtaagaagagccagccctccatgtacgagcagctccgagacatcgctattgacaacatctgcaggtgcctgaaggctggattgacggtggacccagtgattgtggaggcgttcttggccagcctgtccaaccggctctacatctctcaggagagcgacaaggacgctcacttgattcccgaccacacaatccgagccttgggacacattgcggtggccttgagggacaccccgaaggtcatggagcccattctgcagatcctacagcagaaattctgccagccaccctcccccctcgatgtgctgattattgaccagctgggctgcctggttatcaccggaaatcaatacatctatcaggaagtgtggaacctcttccagcagatcagtgtgaaggccagctccgttgtatactcagccaccaaagattacaaggaccacggctataggcattgctccctggcagtgattaatgccctggccaacatcgcggccaacatccaagacgagcacctggtggatgagctgctcatgaacctgttggagttgtttgtgcagctggggctggaggggaagcgagccagcgagagggcaagcgagaagggccctgccctaaaggcttctagcagtgcagggaacttgggagtactcattcctgtaatagctgtgctcacccgacgactgccacccatcaaagaagctaagcctcggttacagaagctcttccgagacttctggctgtattccgttctgatgggattcgctgtggagggctcaggactctggccagaagaatggtacgagggggtctgtgaaatagccactaagtcccccttgctcacctttcccagcaaggagccactgcggtccgtcctccagtataactcagccatgaagaatgacacggtcacccccgctgagctgagtgagctccgcagcactatcatcaacctgctggacccccctcccgaggtgtccgcactcatcaacaagctggacttcgccatgtccacctacctcctctctgtgtaccggctggagtacatgagggtactgcgttcaacagatcctgatcgcttccaggtaatgttctgctactttgaggataaagctattcagaaagacaaatctgggatgatgcagtgtgtgattgcagtcgcggacaaagtattcgatgccttcctgaacatgatggcggataaagccaagaccaaggagaacgaggaggagctggagcggcacgctcagttcctgttggtgaacttcaaccacatccacaagaggataaggagggtggcagacaagtatctatctggtctggtggataagtttccccacttgctctggagcgggactgtgctgaagaccatgctggacatcctgcagaccctgtcactgtcactgagcgctgatattcacaaggatcagccttactatgacatccccgacgccccctaccggatcacggttcctgacacgtacgaagcccgtgagagcattgtgaaggacttcgctgcacgctgtgggatgatcctccaggaggccatgaagtgggcacctaccgtcaccaagtcccacctgcaggaatatctgaacaaacatcagaactgggtatcgggactgtcccagcacacggggctggccatggccactgagagcatccttcactttgctggctacaacaagcagaacacaactcttgggggcaactcagctgagcgagcgcccggcctgtgtgaagaaagactactccaacttcatggcatccctgaatctgcgcaaccgctacgcgggcgaggtgtatggaatgattcggttctcaggcaccacaggccagatgtctgacctgaacaaaatgatggtccaggatctacattcagctttagaccgcagtcatcctcagcactacacgcaggccatgttcaagctgaccgcaatgctcattagcagtaaagattgtgacccgcagctccttcatcatctgtgctggggtcccctccggatgttcaatgagcatggcatggagacggccctggcctgctgggagtggctgctggctggcaaggatggagtggaagtgccgttcatgcgggagatggcaggggcctggcacatgacggtggagcagaaatttggcctgttttctgctgagataaaggaagcagaccccctggctgcctcggaagcaagtcaacccaaaccctgtccccccgaagtgaccccccactacatctggatcgacttcctggtgcagcggtttgagatcgccaagtactgcagctctgaccaagtggagatcttctccagcctgctgcagcgctccatgtccctgaacatcggcggggccaaggggagcatgaaccggcacgtggcggccatcgggccccgcttcaagctgctgaccctggggctgtccctcctgcatgccgatgtggttccaaatgcaaccatccgcaatgtgcttcgcgagaagatctactccactgcctttgactacttcagctgtcccccaaagttccctactcaaggagagaagcggctgcgtgaagacataagcatcatgattaaattttggaccgccatgttctcagataagaagtacctgaccgccagccagcttgttcccccagataatcaggacacccggagcaacctggacataactgtcggctctcggcaacaagccacccaaggctggatcaacacataccccctgtccagcggcatgtccaccatctccaagaaatcaggcatgtctaagaaaaccaaccggggctcccagctgcacaaatactacatgaagcgcaggacgctgctgctgtccctgctggccactgagatcgagcgtctcatcacatggtacaacccgctgtcagccccggaactggaactagaccaggccggagagaacagcgtggccaactggagatctaagtacatcagcctgagtgagaagcagtggaaggacaacgtgaacctcgcctggagcatctctccctacctagccgtgcagctgcctgccaggtttaagaacacagaagccattgggaacgaagtgacccgtctcgttcggttggacccgggagccgttagtgatgtgcctgaagcaatcaagttcctggtcacctggcacaccatcgacgccgatgctccagagctcagccatgtgctgtgctgggcgcccacggacccacccacaggcctctcctacttctccagcatgtacccgccgcaccctctcacggcgcagtacggggtgaaagtcctgcggtccttccctccggacgccatcctcttctacatcccccagattgtgcaggccctcaggtacgacaagatgggctatgtgcgggagtatattctgtgggcagcgtctaaatcccagcttctggcacaccagttcatctggaacatgaagactaacatttatctagatgaagagggccaccagaaagaccctgacatcggcgacctcctggatcagttggtagaggagatcacaggctccttgtccggcccagcgaaggacttttaccagcgggagtttgatttctttaacaagatcaccaacgtgtcggctatcatcaagccctaccctaaaggcgacgagagaaagaaggcttgtctgtcggccctgtctgaagtgaaggtgcagccgggctgctacctgcccagcaaccctgaggccattgtgctggacatcgactacaagtctgggaccccgatgcagagtgctgcaaaagccccatatctggccaagttcaaggtgaagcgatgtggagttagtgaacttgaaaaagaaggtctgcggtgccgctcagactccgaggatgagtgcagcacgcaggaggccgacggccagaagatctcctggcaggcagccatcttcaaggtgggagacgactgccggcaggacatgctggccctgcagatcatcgacctcttcaagaacatcttccagctggtcggcctggacctctttgtttttccctaccgcgtggtggccactgcccctgggtgcggggtgatcgagtgcatccccgactgcacctcccgggaccagctgggccgccagacagacttcggcatgtacgactacttcacacgccagtacggggatgagtccactctggccttccagcaggcccgctacaacttcatccgaagcatggccgcctacagcctcctgctgttcctgctgcagatcaaggacagacacaacggcaacattatgctggacaagaagggtcatatcatccacatcgactttggcttcatgtttgaaagctcgccgggcggcaatctcggctgggaacccgacatcaagctgacggatgagatggtgatgatcatggggggcaagatggaggccacacccttcaagtggttcatggagatgtgtgtccgaggctacctggctgtgcggtgagcctgggtgagggccagggtggaggcggagggggtgtgtggaacgttctgagatcccctttaggatgaagggaatccggttccagagagtgaggtaggtgctagcagccacctgctgacctacacctgtcctttggtcacctctgtctgcccacctgtgccagtaaattcttgctctggacatctaattccaaccaccttccccacgatcctgcccacgccttcagccatgggctctccctttctgggcatcccatccaccctgtcaccaaagcctgagcacctgccaccccacaggctacgtgccaaagatgggctttgtcccagtttcatatacaggtcacttggccaaggcacagtccaacctgggttcatccccactgccctgcagagaaaggcaggtcagcgtgtctgcatcccacccaagtgcagaagccatggccggcagccttatgtgggggacagggcaggacactcagcctgtccagagtgcgtgtgggcagcccttgcctgggcggtatgggttaccaagtgcagcagatcgaaagttgcctcggggatgtgcaagatgtggcaggcgaggtgggtggcaggagcccacacctgaggctgttggcatcagccaggccacaggactacaggcagggccaccacctaggctggcctcagcccaccgctccctcctatctctccccaggccctacatggacgcggtcgtctccctggtcactctcatgttggacacgggcctgccctgttttcgcggccagacaatcaagctcttgaagcacaggtttagccccaacatgactgagcgcgaggctgcaaatttcatcatgaaggtcatccagagctgcttcctcagcaacaggagccggacctacgacatgatccagtactatcagaatgacatcccctactgaggaggggaccttcgagggcctctgccccatgtgccctcaaagctgtcccacaatcatggagccctgcgacctccctgccctgccgccacatgcagtggaggagaggcctgtggcccaaagaacctggtagcgcctcctggggcagcacgtgggtgcgcagccttggtaacgccatggactgcagcgacaatcaatggatggtgctgtctatgcacaggtgtgagtcctctgtttgcactggacatattccctacctgtcttatttcataggtacatgaagtattgtgtataaaaaaagagataagatttaaccaacatcaacaaaataaaaacccaaaatagtgctgtgttgga

SEQ ID NO: 458438 - DNA, 3546 bp, Homo sapiens
cgagctcggtacccctaatttcttttgaaacagatggtccacatccttgaaagagttcttcatatagacttcagtggcctccctctcactaaccctgtgcaggtccagcagctcctggagggtttctgcgggcagctgcaccttctggcccatctgctggtcatagtgggcaatagccttttgcactgcggctgagttctctatctgggccaaccccagtgctgatctctactacacttccttcagtgaccctctctacctgaccatgttcaagatgctgcgtgacactctgtactacatgcatcaggacctcccgacctcttttgtgaaggagatccatgattttgtgctggagcagttcaacacgagccagggggagctccagaagattctacatgacgcagaccggatccacaatgagctgagccccctcaaactgcgctgtcaggcgaatgctgcctgtgtggacctcatggtgtgggctgtgaaggacgagcagggtgcagaaaacctttgcatcaagctatctgagaagctgcagtccaagacgtccagcaaagtcattattgctcacttgcccctgctgatctgctgtctgcagggtttgggccgcctgtgcgagaggttcccggtggtggtgcactctgtgacaccgtccttgcgagacttcctggtcatcccgtccccagttctggtgaagctctacaagtaccacagtcagtaccacacagttgctggcaatgatataaaaatcagtgtgaccaatgagcattccgagtcaaccctgaacgtcatgtcgggtaagaagagccagccctccatgtacgagcagctccgagacatcgctattgacaacatctgcaggtgcctgaaggctggattgacggtggacccagtgattgtggaggcgttcttggccagcctgtccaaccggctctacatctctcaggagagcgacaaggacgctcacttgattcccgaccacacaatccgagccttgggacacattgcggtggccttgagggacaccccgaaggtcatggagcccattctgcagatcctacagcagaaattctgccagccaccctcccccctcgatgtgctgattattgaccagctgggctgcctggttatcaccggaaatcaatacatctatcaggaagtgtggaacctcttccagcagatcagtgtgaaggccagctccgttgtatactcagccaccaaagattacaaggaccacggctataggcattgctccctggcagtgattaatgccctggccaacatcgcggccaacatccaagacgagcacctggtggatgactgcacaaatactacatgaagcgcaggacgctgctgctgtccctgctggccactgagatcgagcgtctcatcacatggtacaacccgctgtcagccccggaactggaactagaccaggccggagagaacagcgtggccaactggagatctaagtacatcagcctgagtgagaagcagtggaaggacaacgtgaacctcgcctggagcatctctccctacctagccgtgcagctgcctgccaggtttaagaacacagaagccattgggaacgaagtgacccgtctcgttcggttggacccgggagccgttagtgatgtgcctgaagcaatcaagttcctggtcacctggcacaccatcgacgccgatgctccagagctcagccatgtgctgtgctgggcgcccacggacccacccacaggcctctcctacttctccagcatgtacccgccgcaccctctcacggcgcagtacggggtgaaagtcctgcggtccttccctccggacgccatcctcttctacatcccccagattgtgcaggccctcaggtacgacaagatgggctatgtgcgggagtatattctgtgggcagcgtctaaatcccagcttctggcacaccagttcatctggaacatgaagactaacatttatctagatgaagagggccaccagaaagaccctgacatcggcgacctcctggatcagttggtagaggagatcacaggctccttgtccggcccagcgaaggacttttaccagcgggagtttgatttctttaacaagatcaccaacgtgtcggctatcatcaagccctaccctaaaggcgacgagagaaagaaggcttgtctgtcggccctgtctgaagtgaaggtgcagccgggctgctacctgcccagcaaccctgaggccattgtgctggacatcgactacaagtctgggaccccgatgcagagtgctgcaaaagccccatatctggccaagttcaaggtgaagcgatgtggagttagtgaacttgaaaaagaaggtctgcggtgccgctcagactccgaggatgagtgcagcacgcaggaggccgacggccagaagatctcctggcaggcagccatcttcaaggtgggagacgactgccggcaggacatgctggccctgcagatcatcgacctcttcaagaacatcttccagctggtcggcctggacctctttgtttttccctaccgcgtggtggccactgcccctgggtgcggggtgatcgagtgcatccccgactgcacctcccgggaccagctgggccgccagacagacttcggcatgtacgactacttcacacgccagtacggggatgagtccactctggccttccagcaggcccgctacaacttcatccgaagcatggccgcctacagcctcctgctgttcctgctgcagatcaaggacagacacaacggcaacattatgctggacaagaagggtcatatcatccacatcgactttggcttcatgtttgaaagctcgccgggcggcaatctcggctgggaacccgacatcaagctgacggatgagatggtgatgatcatggggggcaagatggaggccacacccttcaagtggttcatggagatgtgtgtccgaggctacctggctgtgcggccctacatggacgcggtcgtctccctggtcactctcatgttggacacgggcctgccctgttttcgcggccagacaatcaagctcttgaagcacaggtttagccccaacatgactgagcgcgaggctgcaaatttcatcatgaaggtcatccagagctgcttcctcagcaacaggagccggacctacgacatgatccagtactatcagaatgacatcccctactgaggaggggaccttcgagggcctctgccccatgtgccctcaaagctgtcccacaatcatggagccctgcgacctccctgccctgccgccacatgcagtggaggagaggcctgtggcccaaagaacctggtagcgcctcctggggcagcacgtgggtgcgcagccttggtaacgccatggactgcagcgacaatcaatggatggtgctgtctatgcacaggtgtgagtcctctgtttgcactggacatattccctacctgtcttatttcataggtacatgaagtattgtgtataaaaaaagagataagatttaaccaacatcaacaaaataaaaacccaaaatagtgctgtgttgga

SEQ ID NO: 458439 - DNA, 5811 bp, Homo sapiens
cgagctcggtacccctaatttcttttgaaacagatggtccacatccttgaaagagttcttcatatagacttcagtggcctccctctcactaaccctgtgcaggtccagcagctcctggagggtttctgcgggcagctgcaccttctggcccatctgctggtcatagtgggcaatagccttttgcactgcggctgagttctctatctgggccaaccccagtgctgatctctactacacttccttcagtgaccctctctacctgaccatgttcaagatgctgcgtgacactctgtactacatgcatcaggacctcccgacctcttttgtgaaggagatccatgattttgtgctggagcagttcaacacgagccagggggagctccagaagattctacatgacgcagaccggatccacaatgagctgagccccctcaaactgcgctgtcaggcgaatgctgcctgtgtggacctcatggtgtgggctgtgaaggacgagcagggtgcagaaaacctttgcatcaagctatctgagaagctgcagtccaagacgtccagcaaagtcattattgctcacttgcccctgctgatctgctgtctgcagggtttgggccgcctgtgcgagaggttcccggtggtggtgcactctgtgacaccgtccttgcgagacttcctggtcatcccgtccccagttctggtgaagctctacaagtaccacagtcagtaccacacagttgctggcaatgatataaaaatcagtgtgaccaatgagcattccgagtcaaccctgaacgtcatgtcgggtaagaagagccagccctccatgtacgagcagctccgagacatcgctattgacaacatctgcaggtgcctgaaggctggattgacggtggacccagtgattgtggaggcgttcttggccagcctgtccaaccggctctacatctctcaggagagcgacaaggacgctcacttgattcccgaccacacaatccgagccttgggacacattgcggtggccttgagggacaccccgaaggtcatggagcccattctgcagatcctacagcagaaattctgccagccaccctcccccctcgatgtgctgattattgaccagctgggctgcctggttatcaccggaaatcaatacatctatcaggaagtgtggaacctcttccagcagatcagtgtgaaggccagctccgttgtatactcagccaccaaagattacaaggaccacggctataggcattgctccctggcagtgattaatgccctggccaacatcgcggccaacatccaagacgagcacctggtggatgagctgctcatgaacctgttggagttgtttgtgcagctggggctggaggggaagcgagccagcgagagggcaagcgagaagggccctgccctaaaggcttctagcagtgcagggaacttgggagtactcattcctgtaatagctgtgctcacccgacgactgccacccatcaaagaagctaagcctcggttacagaagctcttccgagacttctggctgtattccgttctgatgggattcgctgtggagggctcaggactctggccagaagaatggtacgagggggtctgtgaaatagccactaagtcccccttgctcacctttcccagcaaggagccactgcggtccgtcctccagtataactcagccatgaagaatgacacggtcacccccgctgagctgagtgagctccgcagcactatcatcaacctgctggacccccctcccgaggtgtccgcactcatcaacaagctggacttcgccatgtccacctacctcctctctgtgtaccggctggagtacatgagggtactgcgttcaacagatcctgatcgcttccaggtaatgttctgctactttgaggataaagctattcagaaagacaaatctgggatgatgcagtgtgtgattgcagtcgcggacaaagtattcgatgccttcctgaacatgatggcggataaagccaagaccaaggagaacgaggaggagctggagcggcacgctcagttcctgttggtgaacttcaaccacatccacaagaggataaggagggtggcagacaagtatctatctggtctggtggataagtttccccacttgctctggagcgggactgtgctgaagaccatgctggacatcctgcagaccctgtcactgtcactgagcgctgatattcacaaggatcagccttactatgacatccccgacgccccctaccggatcacggttcctgacacgtacgaagcccgtgagagcattgtgaaggacttcgctgcacgctgtgggatgatcctccaggaggccatgaagtgggcacctaccgtcaccaagtcccacctgcaggaatatctgaacaaacatcagaactgggtatcgggactgtcccagcacacggggctggccatggccactgagagcatccttcactttgctggctacaacaagcagaacacaactcttgggggcaactcagctgagcgagcgcccggcctgtgtgaagaaagactactccaacttcatggcatccctgaatctgcgcaaccgctacgcgggcgaggtgtatggaatgattcggttctcaggcaccacaggccagatgtctgacctgaacaaaatgatggtccaggatctacattcagctttagaccgcagtcatcctcagcactacacgcaggccatgttcaagctgaccgcaatgctcattagcagtaaagattgtgacccgcagctccttcatcatctgtgctggggtcccctccggatgttcaatgagcatggcatggagacggccctggcctgctgggagtggctgctggctggcaaggatggagtggaagtgccgttcatgcgggagatggcaggggcctggcacatgacggtggagcagaaatttggcctgttttctgctgagataaaggaagcagaccccctggctgcctcggaagcaagtcaacccaaaccctgtccccccgaagtgaccccccactacatctggatcgacttcctggtgcagcggtttgagatcgccaagtactgcagctctgaccaagtggagatcttctccagcctgctgcagcgctccatgtccctgaacatcggcggggccaaggggagcatgaaccggcacgtggcggccatcgggccccgcttcaagctgctgaccctggggctgtccctcctgcatgccgatgtggttccaaatgcaaccatccgcaatgtgcttcgcgagaagatctactccactgcctttgactacttcagctgtcccccaaagttccctactcaaggagagaagcggctgcgtgaagacataagcatcatgattaaattttggaccgccatgttctcagataagaagtacctgaccgccagccagcttgttcccccagataatcaggacacccggagcaacctggacataactgtcggctctcggcaacaagccacccaaggctggatcaacacataccccctgtccagcggcatgtccaccatctccaagaaatcaggcatgtctaagaaaaccaaccggggctcccagctgcacaaatactacatgaagcgcaggacgctgctgctgtccctgctggccactgagatcgagcgtctcatcacatggtacaacccgctgtcagccccggaactggaactagaccaggccggagagaacagcgtggccaactggagatctaagtacatcagcctgagtgagaagcagtggaaggacaacgtgaacctcgcctggagcatctctccctacctagccgtgcagctgcctgccaggtttaagaacacagaagccattgggaacgaagtgacccgtctcgttcggttggacccgggagccgttagtgatgtgcctgaagcaatcaagttcctggtcacctggcacaccatcgacgccgatgctccagagctcagccatgtgctgtgctgggcgcccacggacccacccacaggcctctcctacttctccagcatgtacccgccgcaccctctcacggcgcagtacggggtgaaagtcctgcggtccttccctccggacgccatcctcttctacatcccccagattgtgcaggccctcaggtacgacaagatgggctatgtgcgggagtatattctgtgggcagcgtctaaatcccagcttctggcacaccagttcatctggaacatgaagactaacatttatctagatgaagagggccaccagaaagaccctgacatcggcgacctcctggatcagttggtagaggagatcacaggctccttgtccggcccagcgaaggacttttaccagcgggagtttgatttctttaacaagatcaccaacgtgtcggctatcatcaagccctaccctaaaggcgacgagagaaagaaggcttgtctgtcggccctgtctgaagtgaaggtgcagccgggctgctacctgcccagcaaccctgaggccattgtgctggacatcgactacaagtctgggaccccgatgcagagtgctgcaaaagccccatatctggccaagttcaaggtgaagcgatgtggagttagtgaacttgaaaaagaaggtctgcggtgccgctcagactccgaggatgagtgcagcacgcaggaggccgacggccagaagatctcctggcaggcagccatcttcaaggtgggagacgactgccggcaggacatgctggccctgcagatcatcgacctcttcaagaacatcttccagctggtcggcctggacctctttgtttttccctaccgcgtggtggccactgcccctgggtgcggggtgatcgagtgcatccccgactgcacctcccgggaccagctgggccgccagacagacttcggcatgtacgactacttcacacgccagtacggggatgagtccactctggccttccagcaggcccgctacaacttcatccgaagcatggccgcctacagcctcctgctgttcctgctgcagatcaaggacagacacaacggcaacattatgctggacaagaagggtcatatcatccacatcgactttggcttcatgtttgaaagctcgccgggcggcaatctcggctgggaacccgacatcaagctgacggatgagatggtgatgatcatggggggcaagatggaggccacacccttcaagtggttcatggagatgtgtgtccgaggctacctggctgtgcggccctacatggacgcggtcgtctccctggtcactctcatgttggacacgggcctgccctgttttcgcggccagacaatcaagctcttgaagcacaggtttagccccaacatgactgagcgcgaggctgcaaatttcatcatgaaggtcatccagagctgcttcctcagcaacaggagccggacctacgacatgatccagtactatcagaatgacatcccctactgaggaggggaccttcgagggcctctgccccatgtgccctcaaagctgtcccacaatcatggagccctgcgacctccctgccctgccgccacatgcagtggaggagaggcctgtggcccaaagaacctggtagcgcctcctggggcagcacgtgggtgcgcagccttggtaacgccatggactgcagcgacaatcaatggatggtgctgtctatgcacaggtgtgagtcctctgtttgcactggacatattccctacctgtcttatttcataggtacatgaagtattgtgtataaaaaaagagatataatctaacgcacattccaacaatactctttcttcttggttgtgctgtttgtggtttt

SEQ ID NO: 458440 - DNA, 5592 bp, Homo sapiens
cgagctcggtacccctaatttcttttgaaacagatggtccacatccttgaaagagttcttcatatagacttcagtggcctccctctcactaaccctgtgcaggtccagcagctcctggagggtttctgcgggcagctgcaccttctggcccatctgctggtcatagtgggcaatagccttttgcactgcggctgagttctctatctgggccaaccccagtgctgatctctactacacttccttcagtgaccctctctacctgaccatgttcaagatgctgcgtgacactctgtactacatgcatcaggacctcccgacctcttttgtgaaggagatccatgattttgtgctggagcagttcaacacgagccagggggagctccagaagattctacatgacgcagaccggatccacaatgagctgagccccctcaaactgcgctgtcaggcgaatgctgcctgtgtggacctcatggtgtgggctgtgaaggacgagcagggtgcagaaaacctttgcatcaagctatctgagaagctgcagtccaagacgtccagcaaagtcattattgctcacttgcccctgctgatctgctgtctgcagggtttgggccgcctgtgcgagaggttcccggtggtggtgcactctgtgacaccgtccttgcgagacttcctggtcatcccgtccccagttctggtgaagctctacaagtaccacagtcagtaccacacagttgctggcaatgatataaaaatcagtgtgaccaatgagcattccgagtcaaccctgaacgtcatgtcgggtaagaagagccagccctccatgtacgagcagctccgagacatcgctattgacaacatctgcaggtgcctgaaggctggattgacggtggacccagtgattgtggaggcgttcttggccagcctgtccaaccggctctacatctctcaggagagcgacaaggacgctcacttgattcccgaccacacaatccgagccttgggacacattgcggtggccttgagggacaccccgaaggtcatggagcccattctgcagatcctacagcagaaattctgccagccaccctcccccctcgatgtgctgattattgaccagctgggctgcctggttatcaccggaaatcaatacatctatcaggaagtgtggaacctcttccagcagatcagtgtgaaggccagctccgttgtatactcagccaccaaagattacaaggaccacggctataggcattgctccctggcagtgattaatgccctggccaacatcgcggccaacatccaagacgagcacctggtggatgagctgctcatgaacctgttggagttgtttgtgcagctggggctggaggggaagcgagccagcgagagggcaagcgagaagggccctgccctaaaggcttctagcagtgcagggaacttgggagtactcattcctgtaatagctgtgctcacccgacgactgccacccatcaaagaagctaagcctcggttacagaagctcttccgagacttctggctgtattccgttctgatgggattcgctgtggagggctcaggactctggccagaagaatggtacgagggggtctgtgaaatagccactaagtcccccttgctcacctttcccagcaaggagccactgcggtccgtcctccagtataactcagccatgaagaatgacacggtcacccccgctgagctgagtgagctccgcagcactatcatcaacctgctggacccccctcccgaggtgtccgcactcatcaacaagctggacttcgccatgtccacctacctcctctctgtgtaccggctggagtacatgagggtactgcgttcaacagatcctgatcgcttccaggtaatgttctgctactttgaggataaagctattcagaaagacaaatctgggatgatgcagtgtgtgattgcagtcgcggacaaagtattcgatgccttcctgaacatgatggcggataaagccaagaccaaggagaacgaggaggagctggagcggcacgctcagttcctgttggtgaacttcaaccacatccacaagaggataaggagggtggcagacaagtatctatctggtctggtggataagtttccccacttgctctggagcgggactgtgctgaagaccatgctggacatcctgcagaccctgtcactgtcactgagcgctgatattcacaaggatcagccttactatgacatccccgacgccccctaccggatcacggttcctgacacgtacgaagcccgtgagagcattgtgaaggacttcgctgcacgctgtgggatgatcctccaggaggccatgaagtgggcacctaccgtcaccaagtcccacctgcaggaatatctgaacaaacatcagaactgggtatcgggactgtcccagcacacggggctggccatggccactgagagcatccttcactttgctggctacaacaagcagaacacaactcttgggggcaactcagctgagcgagcgcccggcctgtgtgaagaaagactactccaacttcatggcatccctgaatctgcgcaaccgctacgcgggcgaggtgtatggaatgattcggttctcaggcaccacaggccagatgtctgacctgaacaaaatgatggtccaggatctacattcagctttagaccgcagtcatcctcagcactacacgcaggccatgttcaagctgaccgcaatgctcattagcagtaaagattgtgacccgcagctccttcatcatctgtgctggggtcccctccggatgttcaatgagcatggcatggagacggccctggcctgctgggagtggctgctggctggcaaggatggagtggaagtgccgttcatgcgggagatggcaggggcctggcacatgacggtggagcagaaatttggcctgttttctgctgagataaaggaagcagaccccctggctgcctcggaagcaagtcaacccaaaccctgtccccccgaagtgaccccccactacatctggatcgacttcctggtgcagcggtttgagatcgccaagtactgcagctctgaccaagtggagatcttctccagcctgctgcagcgctccatgtccctgaacatcggcggggccaaggggagcatgaaccggcacgtggcggccatcgggccccgcttcaagctgctgaccctggggctgtccctcctgcatgccgatgtggttccaaatgcaaccatccgcaatgtgcttcgcgagaagatctactccactgcctttgactacttcagctgtcccccaaagttccctactcaaggagagaagcggctgcgtgaagacataagcatcatgattaaattttggaccgccatgttctcagataagaagtacctgaccgccagccagcttgttcccccagataatcaggacacccggagcaacctggacataactgtcggctctcggcaacaagccacccaaggctggatcaacacataccccctgtccagcggcatgtccaccatctccaagaaatcaggcatgtctaagaaaaccaaccggggctcccagctgcacaaatactacatgaagcgcaggacgctgctgctgtccctgctggccactgagatcgagcgtctcatcacatggtacaacccgctgtcagccccggaactggaactagaccaggccggagagaacagcgtggccaactggagatctaagtacatcagcctgagtgagaagcagtggaaggacaacgtgaacctcgcctggagcatctctccctacctagccgtgcagctgcctgccaggtttaagaacacagaagccattgggaacgaagtgacccgtctcgttcggttggacccgggagccgttagtgatgtgcctgaagcaatcaagttcctggtcacctggcacaccatcgacgccgatgctccagagctcagccatgtgctgtgctgggcgcccacggacccacccacaggcctctcctacttctccagcatgtacccgccgcaccctctcacggcgcagtacggggtgaaagtcctgcggtccttccctccggacgccatcctcttctacatcccccagattgtgcaggccctcaggtacgacaagatgggctatgtgcgggagtatattctgtgggcagcgtctaaatcccagcttctggcacaccagttcatctggaacatgaagactaacatttatctagatgaagagggccaccagaaagaccctgacatcggcgacctcctggatcagttggtagaggagatcacaggctccttgtccggcccagcgaaggacttttaccagcgggagtttgatttctttaacaagatcaccaacgtgtcggctatcatcaagccctaccctaaaggcgacgagagaaagaaggcttgtctgtcggccctgtctgaagtgaaggtgcagccgggctgctacctgcccagcaaccctgaggccattgtgctggacatcgactacaagtctgggaccccgatgcagagtgctgcaaaagccccatatctggccaagttcaaggtgaagcgatgtggagttagtgaacttgaaaaagaaggtctgcggtgccgctcagactccgaggatgagtgcagcacgcaggaggccgacggccagaagatctcctggcaggcagccatcttcaaggtgggagacgactgccggcaggacatgctggccctgcagatcatcgacctcttcaagaacatcttccagctggtcggcctggacctctttgtttttccctaccgcgtggtggccactgcccctgggtgcggggtgatcgagtgcatccccgactgcacctcccgggaccagctgggccgccagacagacttcggcatgtacgactacttcacacgccagtacggggatgagtccactctggccttccagcaggcccgctacaacttcatccgaagcatggccgcctacagcctcctgctgttcctgctgcagatcaaggacagacacaacggcaacattatgctggacaagaagggtcatatcatccacatcggtcagccagccacagcgccaccctcctctcccttcacccctggcacccaggggtggatagggatccccaccccacagagaggagaatgcccaggaccaccctgccaggagtgtcagggtccagctctgaggtccgaactgtcggccaccaagctgttctgctgtagagggtgcctggccccggccccagggagctagggcgagagccgccattgctctgagtcagaagctggagctgggcggagtggggctggtccaggttcagtgccccagcttggctccttcctccacttcctcccttctctttctctgcctgctgccccaccacccaccccatcactgtctccaagaaaacacaacctgcctgttgggggtggagggggtgctcaaagttacaggatcctgcatatgctaatacagtccaagatgcctagttctaaggctcattcttgcgctgtaacactgagagtatccttatgaggcctgattgtctgtacattggtatttaagctctatggaacatgcagca

SEQ ID NO: 458441 - DNA, 4680 bp, Homo sapiens
cgagctcggtacccctaatttcttttgaaacagatggtccacatccttgaaagagttcttcatatagacttcagtggcctccctctcactaaccctgtgcaggtccagcagctcctggagggtttctgcgggcagctgcaccttctggcccatctgctggtcatagtgggcaatagccttttgcactgcggctgagttctctatctgggccaaccccagtgctgatctctactacacttccttcagtgaccctctctacctgaccatgttcaagatgctgcgtgacactctgtactacatgcatcaggacctcccgacctcttttgtgaaggagatccatgattttgtgctggagcagttcaacacgagccagggggagctccagaagattctacatgacgcagaccggatccacaatgagctgagccccctcaaactgcgctgtcaggcgaatgctgcctgtgtggacctcatggtgtgggctgtgaaggacgagcagggtgcagaaaacctttgcatcaagctatctgagaagctgcagtccaagacgtccagcaaagtcattattgctcacttgcccctgctgatctgctgtctgcagggtttgggccgcctgtgcgagaggttcccggtggtggtgcactctgtgacaccgtccttgcgagacttcctggtcatcccgtccccagttctggtgaagctctacaagtaccacagtcagtaccacacagttgctggcaatgatataaaaatcagtgtgaccaatgagcattccgagtcaaccctgaacgtcatgtcgggtaagaagagccagccctccatgtacgagcagctccgagacatcgctattgacaacatctgcaggtgcctgaaggctggattgacggtggacccagtgattgtggaggcgttcttggccagcctgtccaaccggctctacatctctcaggagagcgacaaggacgctcacttgattcccgaccacacaatccgagccttgggacacattgcggtggccttgagggacaccccgaaggtcatggagcccattctgcagatcctacagcagaaattctgccagccaccctcccccctcgatgtgctgattattgaccagctgggctgcctggttatcaccggaaatcaatacatctatcaggaagtgtggaacctcttccagcagatcagtgtgaaggccagctccgttgtatactcagccaccaaagattacaaggaccacggctataggcattgctccctggcagtgattaatgccctggccaacatcgcggccaacatccaagacgagcacctggtggatgagctgctcatgaacctgttggagttgtttgtgcagctggggctggaggggaagcgagccagcgagagggcaagcgagaagggccctgccctaaaggcttctagcagtgcagggaacttgggagtactcattcctgtaatagctgtgctcacccgacgactgccacccatcaaagaagctaagcctcggttacagaagctcttccgagacttctggctgtattccgttctgatgggattcgctgtggagggctcaggactctggccagaagaatggtacgagggggtctgtgaaatagccactaagtcccccttgctcacctttcccagcaaggagccactgcggtccgtcctccagtataactcagccatgaagaatgacacggtcacccccgctgagctgagtgagctccgcagcactatcatcaacctgctggacccccctcccgaggtgtccgcactcatcaacaagctggacttcgccatgtccacctacctcctctctgtgtaccggctggagtacatgagggtactgcgttcaacagatcctgatcgcttccaggtaatgttctgctactttgaggataaagctattcagaaagacaaatctgggatgatgcagtgtgtgattgcagtcgcggacaaagtattcgatgccttcctgaacatgatggcggataaagccaagaccaaggagaacgaggaggagctggagcggcacgctcagttcctgttggtgaacttcaaccacatccacaagaggataaggagggtggcagacaagtatctatctggtctggtggataagtttccccacttgctctggagcgggactgtgctgaagaccatgctggacatcctgcagaccctgtcactgtcactgagcgctgatattcacaaggatcagccttactatgacatccccgacgccccctaccggatcacggttcctgacacgtacgaagcccgtgagagcattgtgaaggacttcgctgcacgctgtgggatgatcctccaggaggccatgaagtgggcacctaccgtcaccaagtcccacctgcaggaatatctgaacaaacatcagaactgggtatcgggactgtcccagcacacggggctggccatggccactgagagcatccttcactttgctggctacaacaagcagaacacaactcttgggggcaactcagctgagcgagcgcccggcctgtgtgaagaaagactactccaacttcatggcatccctgaatctgcgcaaccgctacgcgggcgaggtgtatggaatgattcggttctcaggcaccacaggccagatgtctgacctgaacaaaatgatggtccaggatctacattcagctttagaccgcagtcatcctcagcactacacgcaggccatgttcaagctgaccgcaatgctcattagcagtaaagattgtgacccgcagctccttcatcatctgtgctggggtcccctccggatgttcaatgagcatggcatggagacggccctggcctgctgggagtggctgctggctggcaaggatggagtggaagtgccgttcatgcgggagatggcaggggcctggcacatgacggtggagcagaaatttggcctgttttctgctgagataaaggaagcagaccccctggctgcctcggaagcaagtcaacccaaaccctgtccccccgaagtgaccccccactacatctggatcgacttcctggtgcagcggtttgagatcgccaagtactgcagctctgaccaagtggagatcttctccagcctgctgcagcgctccatgtccctgaacatcggcggggccaaggggagcatgaaccggcacgtggcggccatcgggccccgcttcaagctgctgaccctggggctgtccctcctgcatgccgatgtggttccaaatgcaaccatccgcaatgtgcttcgcgagaagatctactccactgcctttgactacttcagctgtcccccaaagttccctactcaaggagagaagcggctgcgtgaagacataagcatcatgattaaattttggaccgccatgttctcagataagaagtacctgaccgccagccagcttgttcccccagataatcaggacacccggagcaacctggacataactgtcggctctcggcaacaagccacccaaggctggatcaacacataccccctgtccagcggcatgtccaccatctccaagaaatcaggcatgtctaagaaaaccaaccggggctcccagctgcacaaatactacatgaagcgcaggacgctgctgctgtccctgctggccactgagatcgagcgtctcatcacatggtacaacccgctgtcagccccggaactggaactagaccaggccggagagaacagcgtggccaactggagatctaagtacatcagcctgagtgagaagcagtggaaggacaacgtgaacctcgcctggagcatctctccctacctagccgtgcagctgcctgccaggtttaagaacacagaagccattgggaacgaagtgacccgtctcgttcggttggacccgggagccgttagtgatgtgcctgaagcaatcaagttcctggtcacctggcacaccatcgacgccgatgctccagagctcagccatgtgctgtgctgggcgcccacggacccacccacaggcctctcctacttctccagcatgtacccgccgcaccctctcacggcgcagtacggggtgaaagtcctgcggtccttccctccggacgccatcctcttctacatcccccagattgtgcaggccctcaggtacgacaagatgggctatgtgcgggagtatattctgtgggcagcgtctaaatcccagcttctggcacaccagttcatctggaacatgaagactaacatttatctagatgaagagggccaccagaaagaccctgacatcggcgacctcctggatcagttggtagaggagatcacaggctccttgtccggcccagcgaaggacttttaccagcgggagtttgatttctttaacaagatcaccaacgtgtcggctatcatcaaccctgcgacctccctgccctgccgccacatgcagtggaggagaggcctgtggcccaaagaacctggtagcgcctcctggggcagcacgtgggtgcgcagccttggtaacgccatggactgcagcgacaatcaatggatggtgctgtctatgcacaggtgtgagtcctctgtttgcactggacatattccctacctgtcttatttcataggtacatgaagtattgtgtataaaaaaagagataagatttaaccaacatcaacaaaataaaaacccaaaatagtgctgtgttgga

SEQ ID NO: 458442 - DNA, 4119 bp, Homo sapiens
cgagctcggtacccctaatttcttttgaaacagatggtccacatccttgaaagagttcttcatatagacttcagtggcctccctctcactaaccctgtgcaggtccagcagctcctggagggtttctgcgggcagctgcaccttctggcccatctgctggtcatagtgggcaatagccttttgcactgcggctgagttctctatctgggccaaccccagtgctgatctctactacacttccttcagtgaccctctctacctgaccatgttcaagatgctgcgtgacactctgtactacatgcatcaggacctcccgacctcttttgtgaaggagatccatgattttgtgctggagcagttcaacacgagccagggggagctccagaagattctacatgacgcagaccggatccacaatgagctgagccccctcaaactgcgctgtcaggcgaatgctgcctgtgtggacctcatggtgtgggctgtgaaggacgagcagggtgcagaaaacctttgcatcaagctatctgagaagctgcagtccaagacgtccagcaaagtcattattgctcacttgcccctgctgatctgctgtctgcagggtttgggccgcctgtgcgagaggttcccggtggtggtgcactctgtgacaccgtccttgcgagacttcctggtcatcccgtccccagttctggtgaagctctacaagtaccacagtcagtaccacacagttgctggcaatgatataaaaatcagtgtgaccaatgagcattccgagtcaaccctgaacgtcatgtcgggtaagaagagccagccctccatgtacgagcagctccgagacatcgctattgacaacatctgcaggtgcctgaaggctggattgacggtggacccagtgattgtggaggcgttcttggccagcctgtccaaccggctctacatctctcaggagagcgacaaggacgctcacttgattcccgaccacacaatccgagccttgggacacattgcggtggccttgagggacaccccgaaggtcatggagcccattctgcagatcctacagcagaaattctgccagccaccctcccccctcgatgtgctgattattgaccagctgggctgcctggttatcaccggaaatcaatacatctatcaggaagtgtggaacctcttccagcagatcagtgtgaaggccagctccgttgtatactcagccaccaaagattacaaggaccacggctataggcattgctccctggcagtgattaatgccctggccaacatcgcggccaacatccaagacgagcacctggtggatgagctgctcatgaacctgttggagttgtttgtgcagctggggctggaggggaagcgagccagcgagagggcaagcgagaagggccctgccctaaaggcttctagcagtgcagggaacttgggagtactcattcctgtaatagctgtgctcacccgacgactgccacccatcaaagaagctaagcctcggttacagaagctcttccgagacttctggctgtattccgttctgatgggattcgctgtggagggctcaggactctggccagaagaatggtacgagggggtctgtgaaatagccactaagtcccccttgctcacctttcccagcaaggagccactgcggtccgtcctccagtataactcagccatgaagaatgacacggtcacccccgctgagctgagtgagctccgcagcactatcatcaacctgctggacccccctcccgaggtgtccgcactcatcaacaagctggacttcgccatgtccacctacctcctctctgtgtaccggctggagtacatgagggtactgcgttcaacagatcctgatcgcttccaggtaatgttctgctactttgaggataaagctattcagaaagacaaatctgggatgatgcagtgtgtgattgcagtcgcggacaaagtattcgatgccttcctgaacatgatggcggataaagccaagaccaaggagaacgaggaggagctggagcggcacgctcagttcctgttggtgaacttcaaccacatccacaagaggataaggagggtggcagacaagtatctatctggtctggtggataagtttccccacttgctctggagcgggactgtgctgaagaccatgctggacatcctgcagaccctgtcactgtcactgagcgctgatattcacaaggatcagccttactatgacatccccgacgccccctaccggatcacggttcctgacacgtacgaagcccgtgagagcattgtgaaggacttcgctgcacgctgtgggatgatcctccaggaggccatgaagtgggcacctaccgtcaccaagtcccacctgcaggaatatctgaacaaacatcagaactgggtatcgggactgtcccagcacacggggctggccatggccactgagagcatccttcactttgctggctacaacaagcagaacacaactcttgggggcaactcagctgagcgagcgcccggcctgtgtgaagaaagactactccaacttcatggcatccctgaatctgcgcaaccgctacgcgggcgaggtgtatggaatgattcggttctcaggcaccacaggccagatgtctgacctgaacaaaatgatggtccaggatctacattcagctttagaccgcagtcatcctcagcactacacgcaggccatgttcaagctgaccgcaatgctcattagcagtaaagattgtgacccgcagctccttcatcatctgtgctggggtcccctccggatgttcaatgagcatggcatggagacggccctggcctgctgggagtggctgctggctggcaaggatggagtggaagtgccgttcatgcgggagatggcaggggcctggcacatgacggtggagcagaaatttggcctgttttctgctgagataaaggaagcagaccccctggctgcctcggaagcaagtcaacccaaaccctgtccccccgaagtgaccccccactacatctggatcgacttcctggtgcagcggtttgagatcgccaagtactgcagctctgaccaagtggagatcttctccagcctgctgcagcgctccatgtccctgaacatcggcggggccaaggggagcatgaaccggcacgtggcggccatcgggccccgcttcaagctgctgaccctggggctgtccctcctgcatgccgatgtggttccaaatgcaaccatccgcaatgtgcttcgcgagaagatctactccactgcctttgactacttcagctgtcccccaaagttccctactcaaggagagaagcggctgcgtgaagacataagcatcatgattaaattttggaccgccatgttctcagataagaagtacctgaccgccagccagcttgttcccccagataatcaggacacccggagcaacctggacataactgtcggctctcggcaacaagccacccaaggctggatcaacacataccccctgtccagcggcatgtccaccatctccaagaaatcaggcatgtctaagaaaaccaaccggggctcccagctgcacaaatactacatgaagcgcaggacgctgctgctgtccctgctggccactgagatcgagcgtctcatcacatggtacaacccgctgtcagccccggaactggaactagaccaggccggagagaacagcgtggccaactggagatctaagtacatcagcctgagtgagaagcagtggaaggacaacgtgaacctcgcctggagcatctctccctacctagccgtgcagctgcctgccaggtttaagaacacagaagccattgggaacgaagtgacccgtctcgttcggttggacccgggagccgttagtgatgtgcctgaagcaatcaaggtagtgtagcccacgtaccagggcctgagttcaaactgcacaaaatagcacactgcacccagaaatgcctgaaactagaaatgagacaaaaacagccgcttggcaacttcagtgctattcatggtttttctgatttcctgtgttttctatttcttgtctgtagcatttattttgttcacagtagaaaaaaatgtaatgcacttca

SEQ ID NO: 458443 - DNA, 2484 bp, Homo sapiens
cgagctcggtacccctaatttcttttgaaacagatggtccacatccttgaaagagttcttcatatagacttcagtggcctccctctcactaaccctgtgcaggtccagcagctcctggagggtttctgcgggcagctgcaccttctggcccatctgctggtcatagtgggcaatagccttttgcactgcggctgagttctctatctgggccaaccccagtgctgatctctactacacttccttcagtgaccctctctacctgaccatgttcaagatgctgcgtgacactctgtactacatgcatcaggacctcccgacctcttttgtgaaggagatccatgattttgtgctggagcagttcaacacgagccagggggagctccagaagattctacatgacgcagaccggatccacaatgagctgagccccctcaaactgcgctgtcaggcgaatgctgcctgtgtggacctcatggtgtgggctgtgaaggacgagcagggtgcagaaaacctttgcatcaagctatctgagaagctgcagtccaagacgtccagcaaagtcattattgctcacttgcccctgctgatctgctgtctgcagggtttgggccgcctgtgcgagaggttcccggtggtggtgcactctgtgacaccgtccttgcgagacttcctggtcatcccgtccccagttctggtgaagctctacaagtaccacagtcagtaccacacagttgctggcaatgatataaaaatcagtgtgaccaatgagcattccgagtcaaccctgaacgtcatgtcgggtaagaagagccagccctccatgtacgagcagctccgagacatcgctattgacaacatctgcaggtgcctgaaggctggattgacggtggacccagtgattgtggaggcgttcttggccagcctgtccaaccggctctacatctctcaggagagcgacaaggacgctcacttgattcccgaccacacaatccgagccttgggacacattgcggtggccttgagggacaccccgaaggtcatggagcccattctgcagatcctacagcagaaattctgccagccaccctcccccctcgatgtgctgattattgaccagctgggctgcctggttatcaccggaaatcaatacatctatcaggaagtgtggaacctcttccagcagatcagtgtgaaggccagctccgttgtatactcagccaccaaagattacaaggaccacggctataggcattgctccctggcagtgattaatgccctggccaacatcgcggccaacatccaagacgagcacctggtggatgagctgctcatgaacctgttggagttgtttgtgcagctggggctggaggggaagcgagccagcgagagggcaagcgagaagggccctgccctaaaggcttctagcagtgcagggaacttgggagtactcattcctgtaatagctgtgctcacccgacgactgccacccatcaaagaagctaagcctcggttacagaagctcttccgagacttctggctgtattccgttctgatgggattcgctgtggagggctcaggactctggccagaagaatggtacgagggggtctgtgaaatagccactaagtcccccttgctcacctttcccagcaaggagccactgcggtccgtcctccagtataactcagccatgaagaatgacacggtcacccccgcacaggattcacatctcatttttaccatgctctctgtgccaattagggcagatcttttcactgtcattattaacacatgttgccagccactgggacctgtttgtcctgggggatgccccatgagccctcggatgtttctctccctccaggctgagctgagtgagctccgcagcactatcatcaacctgctggacccccctcccgaggtgtccgcactcatcaacaagctggacttcgccatgtccacctacctcctctctgtgtaccggctggagtacatgaggtacacgtgccttcaccaccatgcacatgcacatccacatttgagcagggttttcatttttgtgccctcgtaagcatgagacttttttcaacttctcccaagacatgcaaactttctgaaaaaccaagcaaaaacaccctctacttttctcgtatgcccctccttcatgaccaccagacaccacgtatagtaacacctcccagtatctaagctccgcatcatcttctctctgataggaaacaggcttctgagcagttgcagtcagtgttgtgaactcagcccacggactgagcgaggcccttctgaggacccagcctcgctgagtgcgtgtctaggacactcactgagctgtttcccaggaccatggttgagtacaaacagcaaatgcgacatggggtggggccggctccaaaacagtcctgcatgtggcccgatgctcaggacacatctgtggccacagcagtcctgtggcagtacggtagtgac

SEQ ID NO: 458444 - DNA, 2544 bp, Homo sapiens
cgagctcggtacccctaatttcttttgaaacagatggtccacatccttgaaagagttcttcatatagacttcagtggcctccctctcactaaccctgtgcaggtccagcagctcctggagggtttctgcgggcagctgcaccttctggcccatctgctggtcatagtgggcaatagccttttgcactgcggctgagttctctatctgggccaaccccagtgctgatctctactacacttccttcagtgaccctctctacctgaccatgttcaagatgctgcgtgacactctgtactacatgcatcaggacctcccgacctcttttgtgaaggagatccatgattttgtgctggagcagttcaacacgagccagggggagctccagaagattctacatgacgcagaccggatccacaatgagctgagccccctcaaactgcgctgtcaggcgaatgctgcctgtgtggacctcatggtgtgggctgtgaaggacgagcagggtgcagaaaacctttgcatcaagctatctgagaagctgcagtccaagacgtccagcaaagtcattattgctcacttgcccctgctgatctgctgtctgcagggtttgggccgcctgtgcgagaggttcccggtggtggtgcactctgtgacaccgtccttgcgagacttcctggtcatcccgtccccagttctggtgaagctctacaagtaccacagtcagtaccacacagttgctggcaatgatataaaaatcagtgtgaccaatgagcattccgagtcaaccctgaacgtcatgtcgggtaagaagagccagccctccatgtacgagcagctccgagacatcgctattgacaacatctgcaggtgcctgaaggctggattgacggtggacccagtgattgtggaggcgttcttggccagcctgtccaaccggctctacatctctcaggagagcgacaaggacgctcacttgattcccgaccacacaatccgagccttgggacacattgcggtggccttgagggacaccccgaaggtcatggagcccattctgcagatcctacagcagaaattctgccagccaccctcccccctcgatgtgctgattattgaccagctgggctgcctggttatcaccggaaatcaatacatctatcaggaagtgtggaacctcttccagcagatcagtgtgaaggccagctccgttgtatactcagccaccaaagattacaaggaccacggctataggcattgctccctggcagtgattaatgccctggccaacatcgcggccaacatccaagacgagcacctggtggatgagctgctcatgaacctgttggagttgtttgtgcagctggggctggaggggaagcgagccagcgagagggcaagcgagaagggccctgccctaaaggcttctagcagtgcagggaacttgggagtactcattcctgtaatagctgtgctcacccgacgactgccacccatcaaagaagctaagcctcggttacagaagctcttccgagacttctggctgtattccgttctgatgggattcgctgtggagggctcaggactctggccagaagaatggtacgagggggtctgtgaaatagccactaagtcccccttgctcacctttcccagcaaggagccactgcggtccgtcctccagtataactcagccatgaagaatgacacggtcacccccgctgagctgagtgagctccgcagcactatcatcaacctgctggacccccctcccgaggtgtccgcactcatcaacaagctggacttcgccatgtccacctacctcctctctgtgtaccggctggagtacatgagggtactgcgttcaacagatcctgatcgcttccaggtaatgttctgctactttgaggataaagctattcagaaagacaaatctggagagagactaagcaacaacaaaattgaaactgccaacctctagaagaattaagcacctagcacattattcagacaagacctgaggagacaaaaaaaggaagaaaaaggctgggtgcggtagctcacgcctgtaatcccagcactctgggaggctgaagtgggtggatcacttgatgtcaggagttcgagaccagcctggccaacatgatgaaaccccatctctactaaaaatacaaaaattagccaggtgcggtggcgtgtgcctgtagtcctggctacttgggaggccaaggcaggagaatcacttgaacctgggaggcagaggttgcagtgagctgagatcacaccacacactccagcctgggagacagagtgaaactccatctcaaaaaaaaaaaggaaggagaacctagcagattttgccagccttctagagaatattcataaaccgaatcagatccctttctgaagtgagatgtctcattcgcccttctctctgagctctgtttttctgttcctgtgacatcagaggacgttaaattgttccgggggactgattgttcctcctcaccttaattcaaaataaagcgattttcatttttgcagtacatt

SEQ ID NO: 458445 - DNA, 1354 bp, Homo sapiens
cgagctcggtacccctaatttcttttgaaacagatggtccacatccttgaaagagttcttcatatagacttcagtggcctccctctcactaaccctgtgcaggtccagcagctcctggagggtttctgcgggcagctgcaccttctggcccatctgctggtcatagtgggcaatagccttttgcactgcggctgagttctctatctgggccaaccccagtgctgatctctactacacttccttcagtgaccctctctacctgaccatgttcaagatgctgcgtgacactctgtactacatgcatcaggacctcccgacctcttttgtgaaggagatccatgattttgtgctggagcagttcaacacgagccagggggagctccagaagattctacatgacgcagaccggatccacaatgagctgagccccctcaaactgcgctgtcaggcgaatgctgcctgtgtggacctcatggtgtgggctgtgaaggacgagcagggtgcagaaaacctttgcatcaagctatctgagaagctgcagtccaagacgtccagcaaagtcattattgctcacttgcccctgctgatctgctgtctgcagggtttgggccgcctgtgcgagaggttcccggtggtggtgcactctgtgacaccgtccttgcgagacttcctggtcatcccgtccccagttctggtgaagctctacaagtaccacagtcagtaccacacagttgctggcaatgatataaaaatcagtgtgaccaatgagcattccgagtcaaccctgaacgtcatgtcgggtaagaagagccagccctccatgtacgagcagctccgagacatcgctattgacaacatctgcaggtgcctgaaggctggattgacggtggacccagtgattgtggaggcgttcttggccagcctgtccaaccggctctacatctctcaggagagcgacaaggacgctcacttgattcccgaccacacaatccgagccttgggacacattgcggtggccttgagggacaccccgaaggtcatggagcccattctgcagatcctacagcagaaattctgccagccaccctcccccctcgatgtgctgattattgaccagctgggctgcctggttatcaccggaaatcaatacatctatcaggaagtgtggaacctcttccagcagatcagtgtgaaggccagctccgttgtatactcagccaccaaagattacaaggaccacggctataggtaactggacctcattgtcacttttttatcatgacagtatttaacttactttaaaaatgtgaggtttgtgaatttgtctcttaaataaactcttcttgcaagaaaa

SEQ ID NO: 458446 - DNA, 571 bp, Homo sapiens
gatctaagtacatcagcctgagtgagaagcagtggaaggacaacgtgaacctcgcctggagcatctctccctacctagccgtgcagctgcctgccaggtgggcccccgggcaccacagcctgacacaggcctcaccagaggtccagcgcagggtgcttgccagctgggtcatgagttctcaggagtgccctgcagcccctttcaaggatagtcaggaagtagtctagtcctcgagccccaggacactccccgagcccttctgtgcagagataacccagcaaccctcgtgatcttttcagatgcctgcctggggtgctgcagcagctggagcctagggaggtagcagcagggtgaattcagagccaagatctgattcctgccggataggaagcatgtggaggctgtcactcctggcaggtggctgccggaaccgccttggggagggtttgggtttgttcctggatgtcacctttcagtggcagagtatttggaggaggcacatgctgcagacagcagtgacattcctgtgatctctctgtggcagctcttatggggacagaacttcagaccg

SEQ ID NO: 458447 - DNA, 4948 bp, Homo sapiens
aggtgttcccgcccctccccctcccgtgtcgctcgctttctgtcagcctctctccctctccctctcccctctccttcctctcgcttcctctctcgcacctgagcgtacgcacctgcccgggcccggctccctcctcctctcccctccctctttccccgcccggccgcgggagcctcgtggctgcgtcaccgccgcccccccagacaagatggacaccgcggaggaagacatatgtagagtgtgtcggtcagaaggaacacctgagaaaccgctttatcatccttgtgtatgtactggcagtattaagtttatccatcaagaatgcttagttcaatggctgaaacacagtcgaaaagaatactgtgaattatgcaagcacagatttgcttttacaccaatttattctccagatatgccttcacggcttccaattcaagacatatttgctggactggttacaagtattggcactgcaatacgatattggtttcattatacacttgtggcctttgcatggttgggagttgttcctcttacagcatgccgcatctacaagtgcttgtttactggctccgtgagctcactactgacgctgccattagatatgctgtcaacggaaaatttgttggcagattgtttgcagggttgttttgtggtgacgtgcacactgtgtgcattcatcagcctggtgtggttgagagagcagatagtccatgggggagcaccaatttggttggagcatgctgccccaccgttcaatgctgcggggcatcaccaaaatgaggctccagcaggaggaaatggtgcagaaaatgttgctgctgatcagcctgctaacccaccagctgagaacgcagtggtgggggaaaaccctgatgcccaggatgaccaggcagaagaggaggaggaggacaatgaggaggaagatgacgctggtgtggaggatgcggcagatgctaataacggagcccaggatgacatgaattggaatgctttagaatgggaccgagctgctgaagagcttacatgggaaagaatgctaggacttgatggatcactagtttttctggaacatgtcttctgggtggtatctttaaatacactgttcattcttgtttttgcattttgcccttaccatattggtcatttctcccttgttggtttgggatttgaagaacacgtccaagcatctcattttgaaggcctaatcacaaccatagttgggtatatacttttagcaataacactgataatttgtcatggcttggcaactcttgtgaaatttcatagatctcgtcgcttactgggagtctgctatattgttgttaaggtctctttgttagtggtggtagaaattggagtattccctctcatttgtggttggtggctggatatctgttccttggaaatgtttgatgctactctgaaagatcgagaactgagctttcagtcggctccaggtactaccatgtttctgcattggctagtgggaatggtatatgtcttctactttgcctccttcattctactactgagagaggtacttcgacctggtgtcctgtggtttctaaggaatttgaatgatccagatttcaatccagtacaggaaatgatccatttgccaatatataggcatctccgaagatttattttgtcagtgattgtctttggctccattgtcctcctgatgctttggcttcctatacgtataattaagagtgtgctgcctaattttcttccatacaatgtcatgctctacagtgatgctccagtgagtgaactgtccctcgagctgcttctgcttcaggttgtcttgccagcattactcgaacagggacacacgaggcagtggctgaaggggctggtgcgagcgtggactgtgaccgccggatacttgctggatcttcattcttatttattgggagaccaggaagaaaatgaaaacagtgcaaatcaacaagttaacaataatcagcatgctcgaaataacaacgctattcctgtggtgggagaaggccttcatgcagcccaccaagccatactccagcagggagggcctgttggctttcagccttaccgccgacctttaaattttccactcaggatatttctgttgattgtcttcatgtgtataacattactgattgccagcctcatctgccttactttaccagtatttgctggccgttggttaatgtcgttttggacggggactgccaaaatccatgagctctacacagctgcttgtggtctctatgtttgctggctaaccataagggctgtgacggtgatggtggcatggatgcctcagggacgcagagtgatcttccagaaggttaaagagtggtctctcatgatcatgaagactttgatagttgcggtgctgttggctggagttgtccctctccttctggggctcctgtttgagctggtcattgtggctcccctgagggttcccttggatcagactcctcttttttatccatggcaggactgggcacttggagtcctgcatgccaaaatcattgcagctataacattgatgggtcctcagtggtggttgaaaactgtaattgaacaggtttacgcaaatggcatccggaacattgaccttcactatattgttcgtaaactggcagctcccgtgatctctgtgctgttgctttccctgtgtgtaccttatgtcatagcttctggtgttgttcctttactaggtgttactgcggaaatgcaaaacttagtccatcggcggatttatccatttttactgatggtcgtggtattgatggcaattttgtccttccaagtccgccagtttaagcgcctttatgaacatattaaaaatgacaagtaccttgtgggtcaacgactcgtgaactacgaacggaaatctggcaaacaaggctcatctccaccacctccacagtcatcccaagaataaagtagttgtctcaacaacttgaccttcccctttacatgtccttttttgtggacttctctctttggagatttttcccagtgatctctcagcgttgtttttaagttaaatgtatttgacttgtgttctcagcattcagagagcagcggtgtaagattctgctgttctccctggatcttctgacattactgctgtctgagatttgtatatgtgtaaatacaagttccttgataccctaaaaccttggattaaacagaatgtgcattgtacatctttaaacaaaatgtatattaatttattaaatctagttgtcactttattttggacctgctgtgatctcgacaggaaacgtgccacagagcagtagtgcgcaggcaagacttttcagtgacgccttgtggaacgcagttcatgatgtcctagcagctctcactaagggaactgtacattctttctttcttggctattcagaccttaccaagaacgttaaaggaaacaagtagaaatcagcagtggagtgtctgtggtaagaaaacatgaactttatgcttcactgttagttgtttgtggaagttattttgtataacaccaaagctgttgtacatttcctactgcctgatttttttcatgtgtctgtgtttgtaatattgtatagtatcttgtgctaggtgaggaaattatttttaattttgataatttaatattcctagtgtgatcagcattgggagttgggtttcagtggggcatgtctatacttagagaaaaaaagtccaaatgaagattttcatgagtcagcccccccgcccgcccccaccccacacccacatcctctcttttccacacacaactatctgtttattttttgtagcagtggccgaaagtcctgcaaggtcataaatctttcagagtgacatcaccaactgtactgcatcttactggatttaggacttctgagatgcttgtgaagtatagatgtggttgtggtcttagattgacagcattagagaagactggttagaacatctggtctcgctggttagtgcctcgttggctgaggactaggtgtgcatttctcctagcttttcatcaggaaatcccaaagtttccaaagctttttgtttacagaataaaacttcaaataaaaccaattcattatttgtccagaaggaagcttggctgagctggccttttaacataggaatgtatttcgttggaaacattctgaaaaatctcagagaactgaacccttacaaactttgttttccctcataaccaaagcttcaggttagaagtttagaaaaatagaatggttgggtacatgatctaaatgtttaatgctaaaggtatatcgtaagggtagtgtttgtttttgaacgataatttagaagttctcatagaaagcgtataacataggtcttcagaaactataaaagaattttcatatagtattaaaatccatagactaaaatctgagaattttttaacatatgcaagtcagccaaacataagctaccaaaataaagagcaatgtgttctggctgttttatacttcaacaattttttccctaagtggtaagcaattactttaaaacatatttttaaaaacatcggtatcgggagctgcggtggctccggccggttgtcctggcacacaaggaggcgaggctatgcgttcgaggccaacctaggcaaaattggaaaaaaaaaaaaaaatcagtatcagaaataatgcttgacataggattcagtgttatactctttggcactttagagcagccttttctctcatttgaaataaggtctttgttagccctacctttactcagaaatttagtcctactataaaaaattaggattttaaaatataatgctgcctgtcatagtgtatttctaaattgctctctttgggagaaaaacattattattgaattgagcatataactatataactatataactatatatatatatatatatatatatatatatatatatatatatatatatata

SEQ ID NO: 458448 - DNA, 2128 bp, Homo sapiens
tttttttgcccccgagacagagtcttactctgttgcccaggctggagtgcagtggcacgatcctggttcactgcaccctctgcctcccaggttcaagcgattctcctgcctcagcctcccaagtagctggtactacaggtgcgtgccaccacacctggcttattttagttattttagtagagatagggtttcaccatgttggccaggctggtctcggaactcctgactgcaggtgatccgtcctccttgggctcccaaagtgctgggattataggtgtgagcccccacgcctggccaacttgattatattaattttgggttttttgttttgttttgttttgttttttaatttttcaaagaatttgtggatcttggtataaagtcattggaacatatctgttttaacagcaagagatcctaggcagatacttcaaaaggttaaaaattcttaatcctacagaattttaaatgaatcttatcaatgttttgtaaacaaacaatatgaatggccaaaaaattgccctccattttactggcaggtaatttatattgtcttacttaagaattctcccctagtttttcaattgtactttatcgtgttgttttcaatgagataagtattttcatagggaaagcattttccagcataatatttgcttgggtagcatccgggttttagtatttaaccaagagccttttaaatattgaaaacccatagttcagaaaatgttagtattgctgcccttcttcacataaatttttttttaaattatactattattttgcttaattttatattgggttaaaacaaccttcaagaaggttaactaggaaagaagacctttttgttttatttttactatttatatatagaagacaaatcagcatttggtgatagttttacatgaccagttatcaaacggtcatagtatgaagtgtgcagttgttcattattagtaaattatgtttgatttttaaactatttagtactaatagttgagatgaaaactgaagaaaaatgccaatgtgacgtttgtgtatagctagccttaaaaaacttcccatgtttttaggtgacttttttccccctcttagtactctggagaaacaatgaagatgggccatctcaattccagatgtaaacaaaaagtaatttttatttcaacatttaatgtaactgctattattgtggattcttgtcttgtgtattttctttcccttattcaagtaatatagaataactttccttaaaatgatttgatccaagatacgtcatttctgtattggcaaaatgccactattaaagtgtaattcttgaatttaggttgaattgatgactttttaaaacaaaacaaacactggacagttctacattgtattgcgtttgcgaatgtgcgtgaacacacgcacacgtgcaggagaatgtagtgccataagaacactggcgctttttaaaactttccaagctagctacttattttcattttcagggttgagtactctaagctctctacttactgtgagaagttttctacattgtaaaattaaaagattatatttaaaatacttctttaggatgttattcagccatcaaaaaaaaacccaactaaaatgtcttaccagtaaagtattattaaaagcctcatttgtggagattcgctgacttccttggttaagctgtcttgtatttacttaatttgtcccctcaaccaggtgttttcttttcagcctgttactgtcctgtgccatttttaaaaatagccatcatgagtaagggcttctttaaaataatccctgacaatatctttggcattaatacgacataaagacaagacagtatatgtatgttttcattcctgttttgtacgagtgcctcattttgtagtcatgaaagtaacatagtaccttaaataaaaatgtaatgactaatctaaggtctaggaataactattgtagaagctaagtagaacacttagtttggggtgtcaattttctatcaacgcaaacaccttagggtacccagaccaattttatgtatatatattctgaaatgctccctttttaatgtggtcatttgttgccttctaagttgagaggacaaaactgaataaagtgaatgttaattgta

SEQ ID NO: 458449 - DNA, 246 bp, Homo sapiens
  misc_feature (27)..(27): n is a, c, g, or t
ccaaaaaaaaaaaaaaaaaaaaagccnaaaggaaaaaaatataatttttaattattttaggtgattttaagcagcctgggcagcatggcaagacctagtctctataaaaaattggctcatgcgtctggtcccagctgcttgggaggcaaaggtgagaggatcacaggaggttgaggctgaagtgagccatgttcatgacactgcactgtagcctgggcaacagagtaagagcctctgtccaaaaaa

SEQ ID NO: 458450 - DNA, 4047 bp, Homo sapiens
  misc_feature (68)..(68): n is a, c, g, or t
tagctgactagcagttactgatataagcacgctggcatggaggaacggtcatatgctaataacggagnccaggatgacatgaattggaatgctttagaatgggaccgagctgctgaagagcttacatgggaaagaatgctaggacttgatggatcactagtttttctggaacatgtcttctgggtggtatctttaaatacactgttcattcttgtttttgcattttgcccttaccatattggtcatttctcccttgttggtttgggatttgaagaacacgtccaagcatctcattttgaaggcctaatcacaaccatagttgggtatatacttttagcaataacactgataatttgtcatggcttggcaactcttgtgaaatttcatagatctcgtcgcttactgggagtctgctatattgttgttaaggtctctttgttagtggtggtagaaattggagtattccctctcatttgtggttggtggctggatatctgttccttggaaatgtttgatgctactctgaaagatcgagaactgagctttcagtcggctccaggtactaccatgtttctgcattggctagtgggaatggtatatgtcttctactttgcctccttcattctactactgagagaggtacttcgacctggtgtcctgtggtttctaaggaatttgaatgatccagatttcaatccagtacaggaaatgatccatttgccaatatataggcatctccgaagatttattttgtcagtgattgtctttggctccattgtcctcctgatgctttggcttcctatacgtataattaagagtgtgctgcctaattttcttccatacaatgtcatgctctacagtgatgctccagtgagtgaactgtccctcgagctgcttctgcttcaggttgtcttgccagcattactcgaacagggacacacgaggcagtggctgaaggggctggtgcgagcgtggactgtgaccgccggatacttgctggatcttcattcttatttattgggagaccaggaagaaaatgaaaacagtgcaaatcaacaagttaacaataatcagcatgctcgaaataacaacgctattcctgtggtgggagaaggccttcatgcagcccaccaagccatactccagcagggagggcctgttggctttcagccttaccgccgacctttaaattttccactcaggatatttctgttgattgtcttcatgtgtataacattactgattgccagcctcatctgccttactttaccagtatttgctggccgttggttaatgtcgttttggacggggactgccaaaatccatgagctctacacagctgcttgtggtctctatgtttgctggctaaccataagggctgtgacggtgatggtggcatggatgcctcagggacgcagagtgatcttccagaaggttaaagagtggtctctcatgatcatgaagactttgatagttgcggtgctgttggctggagttgtccctctccttctggggctcctgtttgagctggtcattgtggctcccctgagggttcccttggatcagactcctcttttttatccatggcaggactgggcacttggagtcctgcatgccaaaatcattgcagctataacattgatgggtcctcagtggtggttgaaaactgtaattgaacaggtttacgcaaatggcatccggaacattgaccttcactatattgttcgtaaactggcagctcccgtgatctctgtgctgttgctttccctgtgtgtaccttatgtcatagcttctggtgttgttcctttactaggtgttactgcggaaatgcaaaacttagtccatcggcggatttatccatttttactgatggtcgtggtattgatggcaattttgtccttccaagtccgccagtttaagcgcctttatgaacatattaaaaatgacaagtaccttgtgggtcaacgactcgtgaactacgaacggaaatctggcaaacaaggctcatctccaccacctccacagtcatcccaagaataaagtagttgtctcaacaacttgaccttcccctttacatgtccttttttgtggacttctctctttggagatttttcccagtgatctctcagcgttgtttttaagttaaatgtatttgacttgtgttctcagcattcagagagcagcggtgtaagattctgctgttctccctggatcttctgacattactgctgtctgagatttgtatatgtgtaaatacaagttccttgataccctaaaaccttggattaaacagaatgtgcattgtacatctttaaacaaaatgtatattaatttattaaatctagttgtcactttattttggacctgctgtgatctcgacaggaaacgtgccacagagcagtagtgcgcaggcaagacttttcagtgacgccttgtggaacgcagttcatgatgtcctagcagctctcactaagggaactgtacattctttctttcttggctattcagaccttaccaagaacgttaaaggaaacaagtagaaatcagcagtggagtgtctgtggtaagaaaacatgaactttatgcttcactgttagttgtttgtggaagttattttgtataacaccaaagctgttgtacatttcctactgcctgatttttttcatgtgtctgtgtttgtaatattgtatagtatcttgtgctaggtgaggaaattatttttaattttgataatttaatattcctagtgtgatcagcattgggagttgggtttcagtggggcatgtctatacttagagaaaaaaagtccaaatgaagattttcatgagtcagcccccccgcccgcccccaccccacacccacatcctctcttttccacacacaactatctgtttattttttgtagcagtggccgaaagtcctgcaaggtcataaatctttcagagtgacatcaccaactgtactgcatcttactggatttaggacttctgagatgcttgtgaagtatagatgtggttgtggtcttagattgacagcattagagaagactggttagaacatctggtctcgctggttagtgcctcgttggctgaggactaggtgtgcatttctcctagcttttcatcaggaaatcccaaagtttccaaagctttttgtttacagaataaaacttcaaataaaaccaattcattatttgtccagaaggaagcttggctgagctggccttttaacataggaatgtatttcgttggaaacattctgaaaaatctcagagaactgaacccttacaaactttgttttccctcataaccaaagcttcaggttagaagtttagaaaaatagaatggttgggtacatgatctaaatgtttaatgctaaaggtatatcgtaagggtagtgtttgtttttgaacgataatttagaagttctcatagaaagcgtataacataggtcttcagaaactataaaagaattttcatatagtattaaaatccatagactaaaatctgagaattttttaacatatgcaagtcagccaaacataagctaccaaaataaagagcaatgtgttctggctgttttatacttcaacaattttttccctaagtggtaagcaattactttaaaacatatttttaaaaacatcggtatcgggagctgcggtggctccggccggttgtcctggcacacaaggaggcgaggctatgcgttcgaggccaacctaggcaaaattggaaaaaaaaaaaaaaatcagtatcagaaataatgcttgacataggattcagtgttatactctttggcactttagagcagccttttctctcatttgaaataaggtctttgttagccctacctttactcagaaatttagtcctactataaaaaattaggattttaaaatataatgctgcctgtcatagtgtatttctaaattgctctctttgggagaaaaacattattattgaattgagcatataactatataactatataactatatatatatatatatatatatatatatatatatatatatatatatatata

SEQ ID NO: 458451 - DNA, 6110 bp, Homo sapiens
  misc_feature (1262)..(1262): n is a, c, g, or t
aggtgttcccgcccctccccctcccgtgtcgctcgctttctgtcagcctctctccctctccctctcccctctccttcctctcgcttcctctctcgcacctgagcgtacgcacctgcccgggcccggctccctcctcctctcccctccctctttccccgcccggccgcgggagcctcgtggctgcgtcaccgccgcccccccagacaagatggacaccgcggaggaagacatatgtagagtgtgtcggtcagaaggaacacctgagaaaccgctttatcatccttgtgtatgtactggcagtattaagtttatccatcaagaatgcttagttcaatggctgaaacacagtcgaaaagaatactgtgaattatgcaagcacagatttgcttttacaccaatttattctccagatatgccttcacggcttccaattcaagacatatttgctggactggttacaagtattggcactgcaatacgatattggtttcattatacacttgtggcctttgcatggttgggagttgttcctcttacagcatgccgcatctacaagtgcttgtttactggctccgtgagctcactactgacgctgccattagatatgctgtcaacggaaaatttgttggcagattgtttgcagggttgttttgtggtgacgtgcacactgtgtgcattcatcagcctggtgtggttgagagagcagatagtccatgggggagcaccaatttggttggagcatgctgccccaccgttcaatgctgcggggcatcaccaaaatgaggctccagcaggaggaaatggtgcagaaaatgttgctgctgatcagcctgctaacccaccagctgagaacgcagtggtgggggaaaaccctgatgcccaggatgaccaggcagaagaggaggaggaggacaatgaggaggaagatgacgctggtgtggaggatgcggcagatgctaataacggagcccaggatgacatgaattggaatgctttagaatgggaccgagctgctgaagagcttacatgggaaagaatgctaggacttgatggatcactagtttttctggaacatgtcttctgggtggtatctttaaatacactgttcattcttgtttttgcattttgcccttaccatattggtcatttctcccttgttggtttgggatttgaagaacacgtgagtataatacttttacaaagttactttcattcattactcccaaatgtgattattaataaaatagtattctaaagagttncatcatttcttcattggcattatgcaagggaatagttaggcaataccgtctcattcttttttaaaaaaaataacagtggctcaagagatagtggtcatgttgccaactaatgaaaatgtgctctgaaatccagtcagctgggtgggcctgaggcataccgtgggaaagtttcccacaggctgattttctgtccatctcaagaacctgtatgttctcttctttccctttccccaggtgccccctgctgaatttagaaaagtaacaatatatcaatcaatttaaaaagggtagaatattttggaatgacgggttgtagtgttttctagagtgctttagttttgacattttatcagtattttccagaggtaaataaattttggaaggattattacttctctgttggggccctagaacaatttagtcttttatggaaaagctgactatctgggatcatatgctcagtttgtatatttgagatctgagagatcacgttctgaagtcttctcatatttagtacacctctgattctcactagttgaatgcaagaacttgaaaggttcaggtaagtgttttgaaaaattttgactttccaaacttttgccacttgctatctgaaactcaggaatcaaaaaataccgacaggcactgttactttcaaaattctttctataagttgagaatgggacagatttgcagagcaagggaaacttgaacagttacttctagtggtaggaaatgaggtggctaggatattacccagctggtgggtgacttgggcagtgtgttcctgctttcagtggttagcctttagcaaatctgctttagagtgagagtagagggcaggctgttgtattacagtgctcttgtttttgtaaaatttaattcactctactgttattttgtctccttgggtaaagtgttatttaatttttcttcattttttagtaatatataacagtcagtgagagaatttggttttcagagatgtcatccaaagcagattttacagttgtttcctggttataaattgtctcaacaattctcttttagtcatttagattgtttaatatgggaaaaccggggtgtagaacatgttgtaaaattaaattttatttacttttttcttatttccaggtccaagcatctcattttgaaggcctaatcacaaccatagttgggtatatacttttagcaataacactgataatttgtcatggcttggcaactcttgtgaaatttcatagatctcgtcgcttactgggagtctgctatattgttgttaaggtctctttgttagtggtggtagaaattggagtattccctctcatttgtggttggtggctggatatctgttccttggaaatgtttgatgctactctgaaagatcgagaactgagctttcagtcggctccaggtactaccatgtttctgcattggctagtgggaatggtatatgtcttctactttgcctccttcattctactactgagagaggtacttcgacctggtgtcctgtggtttctaaggaatttgaatgatccagatttcaatccagtacaggaaatgatccatttgccaatatataggcatctccgaagatttattttgtcagtgattgtctttggctccattgtcctcctgatgctttggcttcctatacgtataattaagagtgtgctgcctaattttcttccatacaatgtcatgctctacagtgatgctccagtgagtgaactgtccctcgagctgcttctgcttcaggttgtcttgccagcattactcgaacagggacacacgaggcagtggctgaaggggctggtgcgagcgtggactgtgaccgccggatacttgctggatcttcattcttatttattgggagaccaggaagaaaatgaaaacagtgcaaatcaacaagttaacaataatcagcatgctcgaaataacaacgctattcctgtggtgggagaaggccttcatgcagcccaccaagccatactccagcagggagggcctgttggctttcagccttaccgccgacctttaaattttccactcaggatatttctgttgattgtcttcatgtgtataacattactgattgccagcctcatctgccttactttaccagtatttgctggccgttggttaatgtcgttttggacggggactgccaaaatccatgagctctacacagctgcttgtggtctctatgtttgctggctaaccataagggctgtgacggtgatggtggcatggatgcctcagggacgcagagtgatcttccagaaggttaaagagtggtctctcatgatcatgaagactttgatagttgcggtgctgttggctggagttgtccctctccttctggggctcctgtttgagctggtcattgtggctcccctgagggttcccttggatcagactcctcttttttatccatggcaggactgggcacttggagtcctgcatgccaaaatcattgcagctataacattgatgggtcctcagtggtggttgaaaactgtaattgaacaggtttacgcaaatggcatccggaacattgaccttcactatattgttcgtaaactggcagctcccgtgatctctgtgctgttgctttccctgtgtgtaccttatgtcatagcttctggtgttgttcctttactaggtgttactgcggaaatgcaaaacttagtccatcggcggatttatccatttttactgatggtcgtggtattgatggcaattttgtccttccaagtccgccagtttaagcgcctttatgaacatattaaaaatgacaagtaccttgtgggtcaacgactcgtgaactacgaacggaaatctggcaaacaaggctcatctccaccacctccacagtcatcccaagaataaagtagttgtctcaacaacttgaccttcccctttacatgtccttttttgtggacttctctctttggagatttttcccagtgatctctcagcgttgtttttaagttaaatgtatttgacttgtgttctcagcattcagagagcagcggtgtaagattctgctgttctccctggatcttctgacattactgctgtctgagatttgtatatgtgtaaatacaagttccttgataccctaaaaccttggattaaacagaatgtgcattgtacatctttaaacgatctcgacaggaaacgtgccacagagcagtagtgcgcaggcaagacttttcagtgacgccttgtggaacgcagttcatgatgtcctagcagctctcactaagggaactgtacattctttctttcttggctattcagaccttaccaagaacgttaaaggaaacaagtagaaatcagcagtggagtgtctgtggtaagaaaacatgaactttatgcttcactgttagttgtttgtggaagttattttgtataacaccaaagctgttgtacatttcctactgcctgatttttttcatgtgtctgtgtttgtaatattgtatagtatcttgtgctaggtgaggaaattatttttaattttgataatttaatattcctagtgtgatcagcattgggagttgggtttcagtggggcatgtctatacttagagaaaaaaagtccaaatgaagattttcatgagtcagcccccccgcccgcccccaccccacacccacatcctctcttttccacacacaactatctgtttattttttgtagcagtggccgaaagtcctgcaaggtcataaatctttcagagtgacatcaccaactgtactgcatcttactggatttaggacttctgagatgcttgtgaagtatagatgtggttgtggtcttagattgacagcattagagaagactggttagaacatctggtctcgctggttagtgcctcgttggctgaggactaggtgtgcatttctcctagcttttcatcaggaaatcccaaagtttccaaagctttttgtttacagaataaaacttcaaataaaaccaattcattatttgtccagaaggaagcttggctgagctggccttttaacataggaatgtatttcgttggaaacattctgaaaaatctcagagaactgaacccttacaaactttgttttccctcataaccaaagcttcaggttagaagtttagaaaaatagaatggttgggtacatgatctaaatgtttaatgctaaaggtatatcgtaagggtagtgtttgtttttgaacgataatttagaagttctcatagaaagcgtataacataggtcttcagaaactataaaagaattttcatatagtattaaaatccatagactaaaatctgagaattttttaacatatgcaagtcagccaaacataagctaccaaaataaagagcaatgtgttctggctgttttatacttcaacaattttttccctaagtggtaagcaattactttaaaacatatttttaaaaacatcggtatcgggagctgcggtggctccggccggttgtcctggcacacaaggaggcgaggctatgcgttcgaggccaacctaggcaaaattggaaaaaaaaaaaaaaatcagtatcagaaataatgcttgacataggattcagtgttatactctttggcactttagagcagccttttctctcatttgaaataaggtctttgttagccctacctttactcagaaatttagtcctactataaaaaattaggattttaaaatataatgctgcctgtcatagtgtatttctaaattgctctctttgggagaaaaacattattattgaattgagcatataactatataactatataactatatatatatatatatatatatatatatatatatatatatatatatatata

SEQ ID NO: 458452 - DNA, 5735 bp, Homo sapiens
  misc_feature (1262)..(1262): n is a, c, g, or t
aggtgttcccgcccctccccctcccgtgtcgctcgctttctgtcagcctctctccctctccctctcccctctccttcctctcgcttcctctctcgcacctgagcgtacgcacctgcccgggcccggctccctcctcctctcccctccctctttccccgcccggccgcgggagcctcgtggctgcgtcaccgccgcccccccagacaagatggacaccgcggaggaagacatatgtagagtgtgtcggtcagaaggaacacctgagaaaccgctttatcatccttgtgtatgtactggcagtattaagtttatccatcaagaatgcttagttcaatggctgaaacacagtcgaaaagaatactgtgaattatgcaagcacagatttgcttttacaccaatttattctccagatatgccttcacggcttccaattcaagacatatttgctggactggttacaagtattggcactgcaatacgatattggtttcattatacacttgtggcctttgcatggttgggagttgttcctcttacagcatgccgcatctacaagtgcttgtttactggctccgtgagctcactactgacgctgccattagatatgctgtcaacggaaaatttgttggcagattgtttgcagggttgttttgtggtgacgtgcacactgtgtgcattcatcagcctggtgtggttgagagagcagatagtccatgggggagcaccaatttggttggagcatgctgccccaccgttcaatgctgcggggcatcaccaaaatgaggctccagcaggaggaaatggtgcagaaaatgttgctgctgatcagcctgctaacccaccagctgagaacgcagtggtgggggaaaaccctgatgcccaggatgaccaggcagaagaggaggaggaggacaatgaggaggaagatgacgctggtgtggaggatgcggcagatgctaataacggagcccaggatgacatgaattggaatgctttagaatgggaccgagctgctgaagagcttacatgggaaagaatgctaggacttgatggatcactagtttttctggaacatgtcttctgggtggtatctttaaatacactgttcattcttgtttttgcattttgcccttaccatattggtcatttctcccttgttggtttgggatttgaagaacacgtgagtataatacttttacaaagttactttcattcattactcccaaatgtgattattaataaaatagtattctaaagagttncatcatttcttcattggcattatgcaagggaatagttaggcaataccgtctcattcttttttaaaaaaaataacagtggctcaagagatagtggtcatgttgccaactaatgaaaatgtgctctgaaatccagtcagctgggtgggcctgaggcataccgtgggaaagtttcccacaggctgattttctgtccatctcaagaacctgtatgttctcttctttccctttccccaggtgccccctgctgaatttagaaaagtaacaatatatcaatcaatttaaaaagggtagaatattttggaatgacgggttgtagtgttttctagagtgctttagttttgacattttatcagtattttccagaggtaaataaattttggaaggattattacttctctgttggggccctagaacaatttagtcttttatggaaaagctgactatctgggatcatatgctcagtttgtatatttgagatctgagagatcacgttctgaagtcttctcatatttagtacacctctgattctcactagttgaatgcaagaacttgaaaggttcaggtaagtgttttgaaaaattttgactttccaaacttttgccacttgctatctgaaactcaggaatcaaaaaataccgacaggcactgttactttcaaaattctttctataagttgagaatgggacagatttgcagagcaagggaaacttgaacagttacttctagtggtaggaaatgaggtggctaggatattacccagctggtgggtgacttgggcagtgtgttcctgctttcagtggttagcctttagcaaatctgctttagagtgagagtagagggcaggctgttgtattacagtgctcttgtttttgtaaaatttaattcactctactgttattttgtctccttgggtaaagtgttatttaatttttcttcattttttagtaatatataacagtcagtgagagaatttggttttcagagatgtcatccaaagcagattttacagttgtttcctggttataaattgtctcaacaattctcttttagtcatttagattgtttaatatgggaaaaccggggtgtagaacatgttgtaaaattaaattttatttacttttttcttatttccaggtccaagcatctcattttgaaggcctaatcacaaccatagttgggtatatacttttagcaataacactgataatttgtcatggcttggcaactcttgtgaaatttcatagatctcgtcgcttactgggagtctgctatattgttgttaaggtctctttgttagtggtggtagaaattggagtattccctctcatttgtggttggtggctggatatctgttccttggaaatgtttgatgctactctgaaagatcgagaactgagctttcagtcggctccaggtactaccatgtttctgcattggctagtgggaatggtatatgtcttctactttgcctccttcattctactactgagagaggtacttcgacctggtgtcctgtggtttctaaggaatttgaatgatccagatttcaatccagtacaggaaatgatccatttgccaatatataggcatctccgaagatttattttgtcagtgattgtctttggctccattgtcctcctgatgctttggcttcctatacgtataattaagagtgtgctgcctaattttcttccatacaatgtcatgctctacagtgatgctccagtgagtgaactgtccctcgagctgcttctgcttcaggttgtcttgccagcattactcgaacagggacacacgaggcagtggctgaaggggctggtgcgagcgtggactgtgaccgccggatacttgctggatcttcattcttatttattgggagaccaggaagaaaatgaaaacagtgcaaatcaacaagttaacaataatcagcatgctcgaaataacaacgctattcctgtggtgggagaaggccttcatgcagcccaccaagccatactccagcagggagggcctgttggctttcagccttaccgccgacctttaaattttccactcaggatatttctgttgattgtcttcatgtgtataacattactgattgccagcctcatctgccttactttaccagtatttgctggccgttggttaatgtcgttttggacggggactgccaaaatccatgagctctacacagctgcttgtggtctctatgtttgctggctaaccataagggctgtgacggtgatggtggcatggatgcctcagggacgcagagtgatcttccagaaggttaaagagtggtctctcatgatcatgaagactttgatagttgcggtgctgttggctggagttgtccctctccttctggggctcctgtttgagctggtcattgtggctcccctgagggttcccttggatcagactcctcttttttatccatggcaggactgggcacttggagtcctgcatgccaaaatcattgcagctataacattgatgggtcctcagtggtggttgaaaactgtaattgaacaggtttacgcaaatggcatccggaacattgaccttcactatattgttcgtaaactggcagctcccgtgatctctgtgctgttgctttccctgtgtgtaccttatgtcatagcttctggtgttgttcctttactaggtgttactgcggaaatgcaaaacttagtccatcggcggatttatccatttttactgatggtcgtggtattgatggcaattttgtccttccaagtccgccagtttaagcgcctttatgaacatattaaaaatgacaagtaccttgtgggtcaacgactcgtgaactacgaacggaaatctggcaaacaaggctcatctccaccacctccacagtcatcccaagaataaagtagttgtctcaacaacttgaccttcccctttacatgtccttttttgtggacttctctctttggagatttttcccagtgatctctcagcgttgtttttaagttaaatgtatttgacttgtgttctcagcattcagagagcagcggtgtaagattctgctgttctccctggatcttctgacattactgctgtctgagatttgtatatgtgtaaatacaagttccttgataccctaaaaccttggattaaacagaatgtgcattgtacatctttaaacaaaatgtatattaatttattaaatctagttgtcactttattttggacctgctgtgatctcgacaggaaacgtgccacagagcagtagtgcgcaggcaagacttttcagtgacgccttgtggaacgcagttcatgatgtcctagcagctctcactaagggaactgtacattctttctttcttggctattcagaccttaccaagaacgttaaaggaaacaagtagaaatcagcagtggagtgtctgtggtgacttttttccccctcttagtactctggagaaacaatgaagatgggccatctcaattccagatgtaaacaaaaagtaatttttatttcaacatttaatgtaactgctattattgtggattcttgtcttgtgtattttctttcccttattcaagtaatatagaataactttccttaaaatgatttgatccaagatacgtcatttctgtattggcaaaatgccactattaaagtgtaattcttgaatttaggttgaattgatgactttttaaaacaaaacaaacactggacagttctacattgtattgcgtttgcgaatgtgcgtgaacacacgcacacgtgcaggagaatgtagtgccataagaacactggcgctttttaaaactttccaagctagctacttattttcattttcagggttgagtactctaagctctctacttactgtgagaagttttctacattgtaaaattaaaagattatatttaaaatacttctttaggatgttattcagccatcaaaaaaaaacccaactaaaatgtcttaccagtaaagtattattaaaagcctcatttgtggagattcgctgacttccttggttaagctgtcttgtatttacttaatttgtcccctcaaccaggtgttttcttttcagcctgttactgtcctgtgccatttttaaaaatagccatcatgagtaagggcttctttaaaataatccctgacaatatctttggcattaatacgacataaagacaagacagtatatgtatgttttcattcctgttttgtacgagtgcctcattttgtagtcatgaaagtaacatagtaccttaaataaaaatgtaatgactaatctaaggtctaggaataactattgtagaagctaagtagaacacttagtttggggtgtcaattttctatcaacgcaaacaccttagggtacccagaccaattttatgtatatatattctgaaatgctccctttttaatgtggtcatttgttgccttctaagttgagaggacaaaactgaataaagtgaatgttaattgta

SEQ ID NO: 458453 - DNA, 5904 bp, Homo sapiens
  misc_feature (1262)..(1262): n is a, c, g, or t
aggtgttcccgcccctccccctcccgtgtcgctcgctttctgtcagcctctctccctctccctctcccctctccttcctctcgcttcctctctcgcacctgagcgtacgcacctgcccgggcccggctccctcctcctctcccctccctctttccccgcccggccgcgggagcctcgtggctgcgtcaccgccgcccccccagacaagatggacaccgcggaggaagacatatgtagagtgtgtcggtcagaaggaacacctgagaaaccgctttatcatccttgtgtatgtactggcagtattaagtttatccatcaagaatgcttagttcaatggctgaaacacagtcgaaaagaatactgtgaattatgcaagcacagatttgcttttacaccaatttattctccagatatgccttcacggcttccaattcaagacatatttgctggactggttacaagtattggcactgcaatacgatattggtttcattatacacttgtggcctttgcatggttgggagttgttcctcttacagcatgccgcatctacaagtgcttgtttactggctccgtgagctcactactgacgctgccattagatatgctgtcaacggaaaatttgttggcagattgtttgcagggttgttttgtggtgacgtgcacactgtgtgcattcatcagcctggtgtggttgagagagcagatagtccatgggggagcaccaatttggttggagcatgctgccccaccgttcaatgctgcggggcatcaccaaaatgaggctccagcaggaggaaatggtgcagaaaatgttgctgctgatcagcctgctaacccaccagctgagaacgcagtggtgggggaaaaccctgatgcccaggatgaccaggcagaagaggaggaggaggacaatgaggaggaagatgacgctggtgtggaggatgcggcagatgctaataacggagcccaggatgacatgaattggaatgctttagaatgggaccgagctgctgaagagcttacatgggaaagaatgctaggacttgatggatcactagtttttctggaacatgtcttctgggtggtatctttaaatacactgttcattcttgtttttgcattttgcccttaccatattggtcatttctcccttgttggtttgggatttgaagaacacgtgagtataatacttttacaaagttactttcattcattactcccaaatgtgattattaataaaatagtattctaaagagttncatcatttcttcattggcattatgcaagggaatagttaggcaataccgtctcattcttttttaaaaaaaataacagtggctcaagagatagtggtcatgttgccaactaatgaaaatgtgctctgaaatccagtcagctgggtgggcctgaggcataccgtgggaaagtttcccacaggctgattttctgtccatctcaagaacctgtatgttctcttctttccctttccccaggtgccccctgctgaatttagaaaagtaacaatatatcaatcaatttaaaaagggtagaatattttggaatgacgggttgtagtgttttctagagtgctttagttttgacattttatcagtattttccagaggtaaataaattttggaaggattattacttctctgttggggccctagaacaatttagtcttttatggaaaagctgactatctgggatcatatgctcagtttgtatatttgagatctgagagatcacgttctgaagtcttctcatatttagtacacctctgattctcactagttgaatgcaagaacttgaaaggttcaggtaagtgttttgaaaaattttgactttccaaacttttgccacttgctatctgaaactcaggaatcaaaaaataccgacaggcactgttactttcaaaattctttctataagttgagaatgggacagatttgcagagcaagggaaacttgaacagttacttctagtggtaggaaatgaggtggctaggatattacccagctggtgggtgacttgggcagtgtgttcctgctttcagtggttagcctttagcaaatctgctttagagtgagagtagagggcaggctgttgtattacagtgctcttgtttttgtaaaatttaattcactctactgttattttgtctccttgggtaaagtgttatttaatttttcttcattttttagtaatatataacagtcagtgagagaatttggttttcagagatgtcatccaaagcagattttacagttgtttcctggttataaattgtctcaacaattctcttttagtcatttagattgtttaatatgggaaaaccggggtgtagaacatgttgtaaaattaaattttatttacttttttcttatttccaggtccaagcatctcattttgaaggcctaatcacaaccatagttgggtatatacttttagcaataacactgataatttgtcatggcttggcaactcttgtgaaatttcatagatctcgtcgcttactgggagtctgctatattgttgttaaggtctctttgttagtggtggtagaaattggagtattccctctcatttgtggttggtggctggatatctgttccttggaaatgtttgatgctactctgaaagatcgagaactgagctttcagtcggctccaggtactaccatgtttctgcattggctagtgggaatggtatatgtcttctactttgcctccttcattctactactgagagaggtacttcgacctggtgtcctgtggtttctaaggaatttgaatgatccagatttcaatccagtacaggaaatgatccatttgccaatatataggcatctccgaagatttattttgtcagtgattgtctttggctccattgtcctcctgatgctttggcttcctatacgtataattaagagtgtgctgcctaattttcttccatacaatgtcatgctctacagtgatgctccagtgagtgaactgtccctcgagctgcttctgcttcaggttgtcttgccagcattactcgaacagggacacacgaggcagtggctgaaggggctggtgcgagcgtggactgtgaccgccggatacttgctggatcttcattcttatttattgggagaccaggaagaaaatgaaaacagtgcaaatcaacaagttaacaataatcagcatgctcgaaataacaacgctattcctgtggtgggagaaggccttcatgcagcccaccaagccatactccagcagggagggcctgttggctttcagccttaccgccgacctttaaattttccactcaggatatttctgttgattgtcttcatgtgtataacattactgattgccagcctcatctgccttactttaccagtatttgctggccgttggttaatgtcgttttggacggggactgccaaaatccatgagctctacacagctgcttgtggtctctatgtttgctggctaaccataagggctgtgacggtgatggtggcatggatgcctcagggacgcagagtgatcttccagaaggttaaagagtggtctctcatgatcatgaagactttgatagttgcggtgctgttggctggagttgtccctctccttctggggctcctgtttgagctggtcattgtggctcccctgagggttcccttggatcagactcctcttttttatccatggcaggactgggcacttggagtcctgcatgccaaaatcattgcagctataacattgatgggtcctcagtggtggttgaaaactgtaattgaacaggtttacgcaaatggcatccggaacattgaccttcactatattgttcgtaaactggcagctcccgtgatctctgtgctgttgctttccctgtgtgtaccttatgtcatagcttctggtgttgttcctttactaggtgttactgcggaaatgcaaaacttagtccatcggcggatttatccatttttactgatggtcgtggtattgatggcaattttgtccttccaagtccgccagtttaagcgcctttatgaacatattaaaaatgacaagtaccttgtgggtcaacgactcgtgaactacgaacggaaatctggcaaacaaggctcatctccaccacctccacagtcatcccaagaataaagtagttgtctcaacaacttgaccttcccctttacatgtccttttttgtggacttctctctttggagatttttcccagtgatctctcagcgttgtttttaagttaaatgtatttgacttgtgttctcagcattcagagagcagcggtgtaagattctgctgttctccctggatcttctgacattactgctgtctgagatttgtatatgtgtaaatacaagttccttgataccctaaaaccttggattaaacagaatgtgcattgtacatctttaaacaaaatgtatattaatttattaaatctagttgtcactttattttggacctgctgtgatctcgacaggaaacgtgccacagagcagtagtgcgcaggcaagacttttcagtgacgccttgtggaacgcagttcatgatgtcctagcagctctcactaagggaactgtacattctttctttcttggctattcagaccttaccaagaacgttaaaggaaacaagtagaaatcagcagtggagtgtctgtggtgacttttttccccctcttagtactctggagaaacaatgaagatgggccatctcaattccagatgtaaacaaaaagtaatttttatttcaacatttaatgtaactgctattattgtggattcttgtcttgtgtattttctttcccttattcaagtaatatagaataactttccttaaaatgatttgatccaagatacgtcatttctgtattggcaaaatgccactattaaagtgtaattcttgaatttaggttgaattgatgactttttaaaacaaaacaaacactggacagttctacattgtattgcgtttgcgaatgtgcgtgaacacacgcacacgtgcaggagaatgtagtgccataagaacactggcgctttttaaaactttccaagctagctacttattttcattttcagggttgagtactctaagctctctacttactgtgagaagttttctacattgtaaaattaaaagattatatttaaaatacttctttaggatgttattcagccatcaaaaaaaaacccaactaaaatgtcttaccagtaaagtattattaaaagcctcatttgtggagattcgctgacttccttggttaagctgtcttgtatttacttaatttgtcccctcaaccaggtgttttcttttcagcctgttactgtcctgtgccatttttaaaaatagccatcatgagtaagggcttctttaaaataatccctgacaatatctttggcattaatacgacataaagacaagacagtatatgtatgttttcattcctgttttgtacgagtgcctcattttgtagtcatgaaagtaacatagtaccttaaataaaaatgtaatgactaatctaaggtctaggaataactattgtagaagctaagtagaacacttagtttggggtgtcaattttctatcaacgcaaacaccttagggtacccagaccaattttatgtatatatattctgaaatgctccctttttaatgtggtcatttgttgccttctaagttgagaggacaaaactgaataaagtgaatgttaattgtaaaaaaaaaccacaaaacgaacactttttgggccctgggcccgaaaatttcaaaccacgtggggcggggccaagggtaggacacgggccacggccccagaaccggccgcaagggggtctccaaaaagccgggacccggtcaaaccagggcgggccggccacgcccgggta

SEQ ID NO: 458454 - DNA, 4434 bp, Homo sapiens
  misc_feature (1262)..(1262): n is a, c, g, or t
aggtgttcccgcccctccccctcccgtgtcgctcgctttctgtcagcctctctccctctccctctcccctctccttcctctcgcttcctctctcgcacctgagcgtacgcacctgcccgggcccggctccctcctcctctcccctccctctttccccgcccggccgcgggagcctcgtggctgcgtcaccgccgcccccccagacaagatggacaccgcggaggaagacatatgtagagtgtgtcggtcagaaggaacacctgagaaaccgctttatcatccttgtgtatgtactggcagtattaagtttatccatcaagaatgcttagttcaatggctgaaacacagtcgaaaagaatactgtgaattatgcaagcacagatttgcttttacaccaatttattctccagatatgccttcacggcttccaattcaagacatatttgctggactggttacaagtattggcactgcaatacgatattggtttcattatacacttgtggcctttgcatggttgggagttgttcctcttacagcatgccgcatctacaagtgcttgtttactggctccgtgagctcactactgacgctgccattagatatgctgtcaacggaaaatttgttggcagattgtttgcagggttgttttgtggtgacgtgcacactgtgtgcattcatcagcctggtgtggttgagagagcagatagtccatgggggagcaccaatttggttggagcatgctgccccaccgttcaatgctgcggggcatcaccaaaatgaggctccagcaggaggaaatggtgcagaaaatgttgctgctgatcagcctgctaacccaccagctgagaacgcagtggtgggggaaaaccctgatgcccaggatgaccaggcagaagaggaggaggaggacaatgaggaggaagatgacgctggtgtggaggatgcggcagatgctaataacggagcccaggatgacatgaattggaatgctttagaatgggaccgagctgctgaagagcttacatgggaaagaatgctaggacttgatggatcactagtttttctggaacatgtcttctgggtggtatctttaaatacactgttcattcttgtttttgcattttgcccttaccatattggtcatttctcccttgttggtttgggatttgaagaacacgtgagtataatacttttacaaagttactttcattcattactcccaaatgtgattattaataaaatagtattctaaagagttncatcatttcttcattggcattatgcaagggaatagttaggcaataccgtctcattcttttttaaaaaaaataacagtggctcaagagatagtggtcatgttgccaactaatgaaaatgtgctctgaaatccagtcagctgggtgggcctgaggcataccgtgggaaagtttcccacaggctgattttctgtccatctcaagaacctgtatgttctcttctttccctttccccaggtgccccctgctgaatttagaaaagtaacaatatatcaatcaatttaaaaagggtagaatattttggaatgacgggttgtagtgttttctagagtgctttagttttgacattttatcagtattttccagaggtaaataaattttggaaggattattacttctctgttggggccctagaacaatttagtcttttatggaaaagctgactatctgggatcatatgctcagtttgtatatttgagatctgagagatcacgttctgaagtcttctcatatttagtacacctctgattctcactagttgaatgcaagaacttgaaaggttcaggtaagtgttttgaaaaattttgactttccaaacttttgccacttgctatctgaaactcaggaatcaaaaaataccgacaggcactgttactttcaaaattctttctataagttgagaatgggacagatttgcagagcaagggaaacttgaacagttacttctagtggtaggaaatgaggtggctaggatattacccagctggtgggtgacttgggcagtgtgttcctgctttcagtggttagcctttagcaaatctgctttagagtgagagtagagggcaggctgttgtattacagtgctcttgtttttgtaaaatttaattcactctactgttattttgtctccttgggtaaagtgttatttaatttttcttcattttttagtaatatataacagtcagtgagagaatttggttttcagagatgtcatccaaagcagattttacagttgtttcctggttataaattgtctcaacaattctcttttagtcatttagattgtttaatatgggaaaaccggggtgtagaacatgttgtaaaattaaattttatttacttttttcttatttccaggtccaagcatctcattttgaaggcctaatcacaaccatagttgggtatatacttttagcaataacactgataatttgtcatggcttggcaactcttgtgaaatttcatagatctcgtcgcttactgggagtctgctatattgttgttaaggtctctttgttagtggtggtagaaattggagtattccctctcatttgtggttggtggctggatatctgttccttggaaatgtttgatgctactctgaaagatcgagaactgagctttcagtcggctccaggtactaccatgtttctgcattggctagtgggaatggtatatgtcttctactttgcctccttcattctactactgagagaggtacttcgacctggtgtcctgtggtttctaaggaatttgaatgatccagatttcaatccagtacaggaaatgatccatttgccaatatataggcatctccgaagatttattttgtcagtgattgtctttggctccattgtcctcctgatgctttggcttcctatacgtataattaagagtgtgctgcctaattttcttccatacaatgtcatgctctacagtgatgctccagtgagtgaactgtccctcgagctgcttctgcttcaggttgtcttgccagcattactcgaacagggacacacgaggcagtggctgaaggggctggtgcgagcgtggactgtgaccgccggatacttgctggatcttcattcttatttattgggagaccaggaagaaaatgaaaacagtgcaaatcaacaagttaacaataatcagcatgctcgaaataacaacgctattcctgtggtgggagaaggccttcatgcagcccaccaagccatactccagcagggagggcctgttggctttcagccttaccgccgacctttaaattttccactcaggatatttctgttgattgtcttcatgtgtataacattactgattgccagcctcatctgccttactttaccagtatttgctggccgttggttaatgtcgttttggacggggactgccaaaatccatgagctctacacagctgcttgtggtctctatgtttgctggctaaccataagggctgtgacggtgatggtggcatggatgcctcagggacgcagagtgatcttccagaaggttaaagagtggtctctcatgatcatgaagactttgatagttgcggtgctgttggctggagttgtccctctccttctggggctcctgtttgagctggtcattgtggctcccctgagggttcccttggatcagactcctcttttttatccatggcaggactgggcacttggagtcctgcatgccaaaatcattgcagctataacattgatgggtcctcagtggtggttgaaaactgtaattgaacaggtttacgcaaatggcatccggaacattgaccttcactatattgttcgtaaactggcagctcccgtgatctctgtgctgttgctttccctgtgtgtaccttatgtcatagcttctggtgttgttcctttactaggtgttactgcggaaatgcaaaacttagtccatcggcggatttatccatttttactgatggtcgtggtattgatggcaattttgtccttccaagtccgccagtttaagcgcctttatgaacatattaaaaatgacaagtaccttgtgggtcaacgactcgtgaactacgaacggaaatctggcaaacaaggctcatctccaccacctccacagtcatcccaagaataaagtagttgtctcaacaacttgaccttcccctttacatgtccttttttgtggacttctctctttggagatttttcccagtgatctctcagcgttgtttttaagttaaatgtatttgacttgtgttctcagcattcagagagcagcggtgtaagattctgctgttctccctggatcttctgacattactgctgtctgagatttgtatatgtgtaaatacaagttccttgataccctaaaaccttggattaaacagaatgtgcattgtacatctttaaac

SEQ ID NO: 458455 - DNA, 4488 bp, Homo sapiens
  misc_feature (1262)..(1262): n is a, c, g, or t
aggtgttcccgcccctccccctcccgtgtcgctcgctttctgtcagcctctctccctctccctctcccctctccttcctctcgcttcctctctcgcacctgagcgtacgcacctgcccgggcccggctccctcctcctctcccctccctctttccccgcccggccgcgggagcctcgtggctgcgtcaccgccgcccccccagacaagatggacaccgcggaggaagacatatgtagagtgtgtcggtcagaaggaacacctgagaaaccgctttatcatccttgtgtatgtactggcagtattaagtttatccatcaagaatgcttagttcaatggctgaaacacagtcgaaaagaatactgtgaattatgcaagcacagatttgcttttacaccaatttattctccagatatgccttcacggcttccaattcaagacatatttgctggactggttacaagtattggcactgcaatacgatattggtttcattatacacttgtggcctttgcatggttgggagttgttcctcttacagcatgccgcatctacaagtgcttgtttactggctccgtgagctcactactgacgctgccattagatatgctgtcaacggaaaatttgttggcagattgtttgcagggttgttttgtggtgacgtgcacactgtgtgcattcatcagcctggtgtggttgagagagcagatagtccatgggggagcaccaatttggttggagcatgctgccccaccgttcaatgctgcggggcatcaccaaaatgaggctccagcaggaggaaatggtgcagaaaatgttgctgctgatcagcctgctaacccaccagctgagaacgcagtggtgggggaaaaccctgatgcccaggatgaccaggcagaagaggaggaggaggacaatgaggaggaagatgacgctggtgtggaggatgcggcagatgctaataacggagcccaggatgacatgaattggaatgctttagaatgggaccgagctgctgaagagcttacatgggaaagaatgctaggacttgatggatcactagtttttctggaacatgtcttctgggtggtatctttaaatacactgttcattcttgtttttgcattttgcccttaccatattggtcatttctcccttgttggtttgggatttgaagaacacgtgagtataatacttttacaaagttactttcattcattactcccaaatgtgattattaataaaatagtattctaaagagttncatcatttcttcattggcattatgcaagggaatagttaggcaataccgtctcattcttttttaaaaaaaataacagtggctcaagagatagtggtcatgttgccaactaatgaaaatgtgctctgaaatccagtcagctgggtgggcctgaggcataccgtgggaaagtttcccacaggctgattttctgtccatctcaagaacctgtatgttctcttctttccctttccccaggtgccccctgctgaatttagaaaagtaacaatatatcaatcaatttaaaaagggtagaatattttggaatgacgggttgtagtgttttctagagtgctttagttttgacattttatcagtattttccagaggtaaataaattttggaaggattattacttctctgttggggccctagaacaatttagtcttttatggaaaagctgactatctgggatcatatgctcagtttgtatatttgagatctgagagatcacgttctgaagtcttctcatatttagtacacctctgattctcactagttgaatgcaagaacttgaaaggttcaggtaagtgttttgaaaaattttgactttccaaacttttgccacttgctatctgaaactcaggaatcaaaaaataccgacaggcactgttactttcaaaattctttctataagttgagaatgggacagatttgcagagcaagggaaacttgaacagttacttctagtggtaggaaatgaggtggctaggatattacccagctggtgggtgacttgggcagtgtgttcctgctttcagtggttagcctttagcaaatctgctttagagtgagagtagagggcaggctgttgtattacagtgctcttgtttttgtaaaatttaattcactctactgttattttgtctccttgggtaaagtgttatttaatttttcttcattttttagtaatatataacagtcagtgagagaatttggttttcagagatgtcatccaaagcagattttacagttgtttcctggttataaattgtctcaacaattctcttttagtcatttagattgtttaatatgggaaaaccggggtgtagaacatgttgtaaaattaaattttatttacttttttcttatttccaggtccaagcatctcattttgaaggcctaatcacaaccatagttgggtatatacttttagcaataacactgataatttgtcatggcttggcaactcttgtgaaatttcatagatctcgtcgcttactgggagtctgctatattgttgttaaggtctctttgttagtggtggtagaaattggagtattccctctcatttgtggttggtggctggatatctgttccttggaaatgtttgatgctactctgaaagatcgagaactgagctttcagtcggctccaggtactaccatgtttctgcattggctagtgggaatggtatatgtcttctactttgcctccttcattctactactgagagaggtacttcgacctggtgtcctgtggtttctaaggaatttgaatgatccagatttcaatccagtacaggaaatgatccatttgccaatatataggcatctccgaagatttattttgtcagtgattgtctttggctccattgtcctcctgatgctttggcttcctatacgtataattaagagtgtgctgcctaattttcttccatacaatgtcatgctctacagtgatgctccagtgagtgaactgtccctcgagctgcttctgcttcaggttgtcttgccagcattactcgaacagggacacacgaggcagtggctgaaggggctggtgcgagcgtggactgtgaccgccggatacttgctggatcttcattcttatttattgggagaccaggaagaaaatgaaaacagtgcaaatcaacaagttaacaataatcagcatgctcgaaataacaacgctattcctgtggtgggagaaggccttcatgcagcccaccaagccatactccagcagggagggcctgttggctttcagccttaccgccgacctttaaattttccactcaggatatttctgttgattgtcttcatgtgtataacattactgattgccagcctcatctgccttactttaccagtatttgctggccgttggttaatgtcgttttggacggggactgccaaaatccatgagctctacacagctgcttgtggtctctatgtttgctggctaaccataagggctgtgacggtgatggtggcatggatgcctcagggacgcagagtgatcttccagaaggttaaagagtggtctctcatgatcatgaagactttgatagttgcggtgctgttggctggagttgtccctctccttctggggctcctgtttgagctggtcattgtggctcccctgagggttcccttggatcagactcctcttttttatccatggcaggactgggcacttggagtcctgcatgccaaaatcattgcagctataacattgatgggtcctcagtggtggttgaaaactgtaattgaacaggtttacgcaaatggcatccggaacattgaccttcactatattgttcgtaaactggcagctcccgtgatctctgtgctgttgctttccctgtgtgtaccttatgtcatagcttctggtgttgttcctttactaggtgttactgcggaaatgcaaaacttagtccatcggcggatttatccatttttactgatggtcgtggtattgatggcaattttgtccttccaagtccgccagtttaagcgcctttatgaacatattaaaaatgacaagtaccttgtgggtcaacgactcgtgaactacgaacggaaatctggcaaacaaggctcatctccaccacctccacagtcatcccaagaataaagtagttgtctcaacaacttgaccttcccctttacatgtccttttttgtggacttctctctttggagatttttcccagtgatctctcagcgttgtttttaagttaaatgtatttgacttgtgttctcagcattcagagagcagcggtgtaagattctgctgttctccctggatcttctgacattactgctgtctgagatttgtatatgtgtaaatacaagttccttgataccctaaaaccttggattaaacagaatgtgcattgtacatctttaaacaaaatgtatattaatttattaaatctagttgtcactttattttggacctgctgt

SEQ ID NO: 458456 - DNA, 2149 bp, Homo sapiens
ctgttgcgaggaatgctgagacaagcatatgctactggcaggatcaaccaggtaccttgtgggtcaacgactcgtgaactacgaacggaaatctggcaaacaaggctcatctccaccacctccacagtcatcccaagaataaagtagttgtctcaacaacttgaccttcccctttacatgtccttttttgtggacttctctctttggagatttttcccagtgatctctcagcgttgtttttaagttaaatgtatttgacttgtgttctcagcattcagagagcagcggtgtaagattctgctgttctccctggatcttctgacattactgctgtctgagatttgtatatgtgtaaatacaagttccttgataccctaaaaccttggattaaacagaatgtgcattgtacatctttaaacaaaatgtatattaatttattaaatctagttgtcactttattttggacctgctgtgatctcgacaggaaacgtgccacagagcagtagtgcgcaggcaagacttttcagtgacgccttgtggaacgcagttcatgatgtcctagcagctctcactaagggaactgtacattctttctttcttggctattcagaccttaccaagaacgttaaaggaaacaagtagaaatcagcagtggagtgtctgtggtaagaaaacatgaactttatgcttcactgttagttgtttgtggaagttattttgtataacaccaaagctgttgtacatttcctactgcctgatttttttcatgtgtctgtgtttgtaatattgtatagtatcttgtgctaggtgaggaaattatttttaattttgataatttaatattcctagtgtgatcagcattgggagttgggtttcagtggggcatgtctatacttagagaaaaaaagtccaaatgaagattttcatgagtcagcccccccgcccgcccccaccccacacccacatcctctcttttccacacacaactatctgtttattttttgtagcagtggccgaaagtcctgcaaggtcataaatctttcagagtgacatcaccaactgtactgcatcttactggatttaggacttctgagatgcttgtgaagtatagatgtggttgtggtcttagattgacagcattagagaagactggttagaacatctggtctcgctggttagtgcctcgttggctgaggactaggtgtgcatttctcctagcttttcatcaggaaatcccaaagtttccaaagctttttgtttacagaataaaacttcaaataaaaccaattcattatttgtccagaaggaagcttggctgagctggccttttaacataggaatgtatttcgttggaaacattctgaaaaatctcagagaactgaacccttacaaactttgttttccctcataaccaaagcttcaggttagaagtttagaaaaatagaatggttgggtacatgatctaaatgtttaatgctaaaggtatatcgtaagggtagtgtttgtttttgaacgataatttagaagttctcatagaaagcgtataacataggtcttcagaaactataaaagaattttcatatagtattaaaatccatagactaaaatctgagaattttttaacatatgcaagtcagccaaacataagctaccaaaataaagagcaatgtgttctggctgttttatacttcaacaattttttccctaagtggtaagcaattactttaaaacatatttttaaaaacatcggtatcgggagctgcggtggctccggccggttgtcctggcacacaaggaggcgaggctatgcgttcgaggccaacctaggcaaaattggaaaaaaaaaaaaaaatcagtatcagaaataatgcttgacataggattcagtgttatactctttggcactttagagcagccttttctctcatttgaaataaggtctttgttagccctacctttactcagaaatttagtcctactataaaaaattaggattttaaaatataatgctgcctgtcatagtgtatttctaaattgctctctttgggagaaaaacattattattgaattgagcatataactatataactatataactatatatatatatatatatatatatatatatatatatatatatatatatata

SEQ ID NO: 458457 - DNA, 3280 bp, Homo sapiens
aggtgttcccgcccctccccctcccgtgtcgctcgctttctgtcagcctctctccctctccctctcccctctccttcctctcgcttcctctctcgcacctgagcgtacgcacctgcccgggcccggctccctcctcctctcccctccctctttccccgcccggccgcgggagcctcgtggctgcgtcaccgccgcccccccagacaagatggacaccgcggaggaagacatatgtagagtgtgtcggtcagaaggaacacctgagaaaccgctttatcatccttgtgtatgtactggcagtattaagtttatccatcaagaatgcttagttcaatggctgaaacacagtcgaaaagaatactgtgaattatgcaagcacagatttgcttttacaccaatttattctccagatatgccttcacggcttccaattcaagacatatttgctggactggttacaagtattggcactgcaatacgatattggtttcattatacacttgtggcctttgcatggttgggagttgttcctcttacagcatgccgcatctacaagtgcttgtttactggctccgtgagctcactactgacgctgccattagatatgctgtcaacggaaaatttgttggcagattgtttgcagggttgttttgtggtgacgtgcacactgtgtgcattcatcagcctggtgtggttgagagagcagatagtccatgggggagcaccaatttggttggagcatgctgccccaccgttcaatgctgcggggcatcaccaaaatgaggctccagcaggaggaaatggtgcagaaaatgttgctgctgatcagcctgctaacccaccagctgagaacgcagtggtgggggaaaaccctgatgcccaggatgaccaggcagaagaggaggaggaggacaatgaggaggaagatgacgctggtgtggaggatgcggcagatgctaataacggagcccagggtaatggctgcttgtgtgtcctcactcttcagcactgcaaatctgttctcaacttgcattgaggaaaagggctggcgttttcaaatttttaatgttgtgaagttctatttctaacttatttttactttattttggcaaactggcatttatggatgtacatatgcataaatatgtttttttctatgaaacagggcatgttttgtgttttaaaatcctttttacacaggccttttttttttttttgggagactgagtctcgctctgtcgcccaggctggagtgcagtggcgctatctcggctcactgcaagctccgcctcctgggttcaagcgattctcctgcctcagcctcccaagtagctggtactacaggtgcgtgccaccacacctggcttattttagttattttagtagagatagggtttcaccatgttggccaggctggtctcggaactcctgactgcaggtgatccgtcctccttgggctcccaaagtgctgggattataggtgtgagcccccacgcctggccaacttgattatattaattttgggttttttgttttgttttgttttgttttttaatttttcaaagaatttgtggatcttggtataaagtcattggaacatatctgttttaacagcaagagatcctaggcagatacttcaaaaggttaaaaattcttaatcctacagaattttaaatgaatcttatcaatgttttgtaaacaaacaatatgaatggccaaaaaattgccctccattttactggcaggtaatttatattgtcttacttaagaattctcccctagtttttcaattgtactttatcgtgttgttttcaatgagataagtattttcatagggaaagcattttccagcataatatttgcttgggtagcatccgggttttagtatttaaccaagagccttttaaatattgaaaacccatagttcagaaaatgttagtattgctgcccttcttcacataaatttttttttaaattatactattattttgcttaattttatattgggttaaaacaaccttcaagaaggttaactaggaaagaagacctttttgttttatttttactatttatatatagaagacaaatcagcatttggtgatagttttacatgaccagttatcaaacggtcatagtatgaagtgtgcagttgttcattattagtaaattatgtttgatttttaaactatttagtactaatagttgagatgaaaactgaagaaaaatgccaatgtgacgtttgtgtatagctagccttaaaaaacttcccatgtttttaggtgacttttttccccctcttagtactctggagaaacaatgaagatgggccatctcaattccagatgtaaacatcttgtgtattttctttcccttattcaagtaatatagaataactttccttaaaatgatttgatccaagatacgtcatttctgtattggcaaaatgccactattaaagtgtaattcttgaatttaggttgaattgatgactttttaaaacaaaacaaacactggacagttctacattgtattgcgtttgcgaatgtgcgtgaacacacgcacacgtgcaggagaatgtagtgccataagaacactggcgctttttaaaactttccaagctagctacttattttcattttcagggttgagtactctaagctctctacttactgtgagaagttttctacattgtaaaattaaaagattatatttaaaatacttctttaggatgttattcagccatcaaaaaaaaacccaactaaaatgtcttaccagtaaagtattattaaaagcctcatttgtggagattcgctgacttccttggttaagctgtcttgtatttacttaatttgtcccctcaaccaggtgttttcttttcagcctgttactgtcctgtgccatttttaaaaatagccatcatgagtaagggcttctttaaaataatccctgacaatatctttggcattaatacgacataaagacaagacagtatatgtatgttttcattcctgttttgtacgagtgcctcattttgtagtcatgaaagtaacatagtaccttaaataaaaatgtaatgactaatctaaggtctaggaataactattgtagaagctaagtagaacacttagtttggggtgtcaattttctatcaacgcaaacaccttagggtacccagaccaattttatgtatatatattctgaaatgctccctttttaatgtggtcatttgttgccttctaagttgagaggacaaaactgaataaagtgaatgttaattgta

SEQ ID NO: 458458 - DNA, 4218 bp, Homo sapiens
  misc_feature (1262)..(1262): n is a, c, g, or t
aggtgttcccgcccctccccctcccgtgtcgctcgctttctgtcagcctctctccctctccctctcccctctccttcctctcgcttcctctctcgcacctgagcgtacgcacctgcccgggcccggctccctcctcctctcccctccctctttccccgcccggccgcgggagcctcgtggctgcgtcaccgccgcccccccagacaagatggacaccgcggaggaagacatatgtagagtgtgtcggtcagaaggaacacctgagaaaccgctttatcatccttgtgtatgtactggcagtattaagtttatccatcaagaatgcttagttcaatggctgaaacacagtcgaaaagaatactgtgaattatgcaagcacagatttgcttttacaccaatttattctccagatatgccttcacggcttccaattcaagacatatttgctggactggttacaagtattggcactgcaatacgatattggtttcattatacacttgtggcctttgcatggttgggagttgttcctcttacagcatgccgcatctacaagtgcttgtttactggctccgtgagctcactactgacgctgccattagatatgctgtcaacggaaaatttgttggcagattgtttgcagggttgttttgtggtgacgtgcacactgtgtgcattcatcagcctggtgtggttgagagagcagatagtccatgggggagcaccaatttggttggagcatgctgccccaccgttcaatgctgcggggcatcaccaaaatgaggctccagcaggaggaaatggtgcagaaaatgttgctgctgatcagcctgctaacccaccagctgagaacgcagtggtgggggaaaaccctgatgcccaggatgaccaggcagaagaggaggaggaggacaatgaggaggaagatgacgctggtgtggaggatgcggcagatgctaataacggagcccaggatgacatgaattggaatgctttagaatgggaccgagctgctgaagagcttacatgggaaagaatgctaggacttgatggatcactagtttttctggaacatgtcttctgggtggtatctttaaatacactgttcattcttgtttttgcattttgcccttaccatattggtcatttctcccttgttggtttgggatttgaagaacacgtgagtataatacttttacaaagttactttcattcattactcccaaatgtgattattaataaaatagtattctaaagagttncatcatttcttcattggcattatgcaagggaatagttaggcaataccgtctcattcttttttaaaaaaaataacagtggctcaagagatagtggtcatgttgccaactaatgaaaatgtgctctgaaatccagtcagctgggtgggcctgaggcataccgtgggaaagtttcccacaggctgattttctgtccatctcaagaacctgtatgttctcttctttccctttccccaggtgccccctgctgaatttagaaaagtaacaatatatcaatcaatttaaaaagggtagaatattttggaatgacgggttgtagtgttttctagagtgctttagttttgacattttatcagtattttccagaggtaaataaattttggaaggattattacttctctgttggggccctagaacaatttagtcttttatggaaaagctgactatctgggatcatatgctcagtttgtatatttgagatctgagagatcacgttctgaagtcttctcatatttagtacacctctgattctcactagttgaatgcaagaacttgaaaggttcaggtaagtgttttgaaaaattttgactttccaaacttttgccacttgctatctgaaactcaggaatcaaaaaataccgacaggcactgttactttcaaaattctttctataagttgagaatgggacagatttgcagagcaagggaaacttgaacagttacttctagtggtaggaaatgaggtggctaggatattacccagctggtgggtgacttgggcagtgtgttcctgctttcagtggttagcctttagcaaatctgctttagagtgagagtagagggcaggctgttgtattacagtgctcttgtttttgtaaaatttaattcactctactgttattttgtctccttgggtaaagtgttatttaatttttcttcattttttagtaatatataacagtcagtgagagaatttggttttcagagatgtcatccaaagcagattttacagttgtttcctggttataaattgtctcaacaattctcttttagtcatttagattgtttaatatgggaaaaccggggtgtagaacatgttgtaaaattaaattttatttacttttttcttatttccaggtccaagcatctcattttgaaggcctaatcacaaccatagttgggtatatacttttagcaataacactgataatttgtcatggcttggcaactcttgtgaaatttcatagatctcgtcgcttactgggagtctgctatattgttgttaaggtctctttgttagtggtggtagaaattggagtattccctctcatttgtggttggtggctggatatctgttccttggaaatgtttgatgctactctgaaagatcgagaactgagctttcagtcggctccaggtactaccatgtttctgcattggctagtgggaatggtatatgtcttctactttgcctccttcattctactactgagagaggtacttcgacctggtgtcctgtggtttctaaggaatttgaatgatccagatttcaatccagtacaggaaatgatccatttgccaatatataggcatctccgaagatttattttgtcagtgattgtctttggctccattgtcctcctgatgctttggcttcctatacgtataattaagagtgtgctgcctaattttcttccatacaatgtcatgctctacagtgatgctccagtgagtgaactgtccctcgagctgcttctgcttcaggttgtcttgccagcattactcgaacagggacacacgaggcagtggctgaaggggctggtgcgagcgtggactgtgaccgccggatacttgctggatcttcattcttatttattgggagaccaggaagaaaatgaaaacagtgcaaatcaacaagttaacaataatcagcatgctcgaaataacaacgctattcctgtggtgggagaaggccttcatgcagcccaccaagccatactccagcagggagggcctgttggctttcagccttaccgccgacctttaaattttccactcaggatatttctgttgattgtcttcatgtgtataacattactgattgccagcctcatctgccttactttaccagtatttgctggccgttggttaatgtcgttttggacggggactgccaaaatccatgagctctacacagctgcttgtggtctctatgtttgctggctaaccataagggctgtgacggtgatggtggcatggatgcctcagggacgcagagtgatcttccagaaggttaaagagtggtctctcatgatcatgaagactttgatagttgcggtgctgttggctggagttgtccctctccttctggggctcctgtttgagctggtcattgtggctcccctgagggttcccttggatcagactcctcttttttatccatggcaggactgggcacttggagtcctgcatgccaaaatcattgcagctataacattgatgggtcctcagtggtggttgaaaactgtaattgaacaggtttacgcaaatggcatccggaacattgaccttcactatattgttcgtaaactggcagctcccgtgatctctgtgctgttgctttccctgtgtgtaccttatgtcatagcttctggtgttgttcctttactaggtgttactgcggaaatgcaaaacttagtccatcggcggatttatccatttttactgatggtcgtggtattgatggcaattttgtccttccaagtccgccagtttaagcgcctttatgaacatattaaaaatgacaagtaccttgtgggtcaacgactcgtgaactacgaacggaaatctggcaaacaaggctcatctccaccacctccacagtcatcccacacgtgcacccatccacatgctcaaacacctgggcacacatgcacacacacacaccctcacactcgcc

SEQ ID NO: 458459 - DNA, 5311 bp, Homo sapiens
  misc_feature (1262)..(1262): n is a, c, g, or t
aggtgttcccgcccctccccctcccgtgtcgctcgctttctgtcagcctctctccctctccctctcccctctccttcctctcgcttcctctctcgcacctgagcgtacgcacctgcccgggcccggctccctcctcctctcccctccctctttccccgcccggccgcgggagcctcgtggctgcgtcaccgccgcccccccagacaagatggacaccgcggaggaagacatatgtagagtgtgtcggtcagaaggaacacctgagaaaccgctttatcatccttgtgtatgtactggcagtattaagtttatccatcaagaatgcttagttcaatggctgaaacacagtcgaaaagaatactgtgaattatgcaagcacagatttgcttttacaccaatttattctccagatatgccttcacggcttccaattcaagacatatttgctggactggttacaagtattggcactgcaatacgatattggtttcattatacacttgtggcctttgcatggttgggagttgttcctcttacagcatgccgcatctacaagtgcttgtttactggctccgtgagctcactactgacgctgccattagatatgctgtcaacggaaaatttgttggcagattgtttgcagggttgttttgtggtgacgtgcacactgtgtgcattcatcagcctggtgtggttgagagagcagatagtccatgggggagcaccaatttggttggagcatgctgccccaccgttcaatgctgcggggcatcaccaaaatgaggctccagcaggaggaaatggtgcagaaaatgttgctgctgatcagcctgctaacccaccagctgagaacgcagtggtgggggaaaaccctgatgcccaggatgaccaggcagaagaggaggaggaggacaatgaggaggaagatgacgctggtgtggaggatgcggcagatgctaataacggagcccaggatgacatgaattggaatgctttagaatgggaccgagctgctgaagagcttacatgggaaagaatgctaggacttgatggatcactagtttttctggaacatgtcttctgggtggtatctttaaatacactgttcattcttgtttttgcattttgcccttaccatattggtcatttctcccttgttggtttgggatttgaagaacacgtgagtataatacttttacaaagttactttcattcattactcccaaatgtgattattaataaaatagtattctaaagagttncatcatttcttcattggcattatgcaagggaatagttaggcaataccgtctcattcttttttaaaaaaaataacagtggctcaagagatagtggtcatgttgccaactaatgaaaatgtgctctgaaatccagtcagctgggtgggcctgaggcataccgtgggaaagtttcccacaggctgattttctgtccatctcaagaacctgtatgttctcttctttccctttccccaggtgccccctgctgaatttagaaaagtaacaatatatcaatcaatttaaaaagggtagaatattttggaatgacgggttgtagtgttttctagagtgctttagttttgacattttatcagtattttccagaggtaaataaattttggaaggattattacttctctgttggggccctagaacaatttagtcttttatggaaaagctgactatctgggatcatatgctcagtttgtatatttgagatctgagagatcacgttctgaagtcttctcatatttagtacacctctgattctcactagttgaatgcaagaacttgaaaggttcaggtaagtgttttgaaaaattttgactttccaaacttttgccacttgctatctgaaactcaggaatcaaaaaataccgacaggcactgttactttcaaaattctttctataagttgagaatgggacagatttgcagagcaagggaaacttgaacagttacttctagtggtaggaaatgaggtggctaggatattacccagctggtgggtgacttgggcagtgtgttcctgctttcagtggttagcctttagcaaatctgctttagagtgagagtagagggcaggctgttgtattacagtgctcttgtttttgtaaaatttaattcactctactgttattttgtctccttgggtaaagtgttatttaatttttcttcattttttagtaatatataacagtcagtgagagaatttggttttcagagatgtcatccaaagcagattttacagttgtttcctggttataaattgtctcaacaattctcttttagtcatttagattgtttaatatgggaaaaccggggtgtagaacatgttgtaaaattaaattttatttacttttttcttatttccaggtccaagcatctcattttgaaggcctaatcacaaccatagttgggtatatacttttagcaataacactgataatttgtcatggcttggcaactcttgtgaaatttcatagatctcgtcgcttactgggagtctgctatattgttgttaaggtctctttgttagtggtggtagaaattggagtattccctctcatttgtggttggtggctggatatctgttccttggaaatgtttgatgctactctgaaagatcgagaactgagctttcagtcggctccaggtactaccatgtttctgcattggctagtgggaatggtatatgtcttctactttgcctccttcattctactactgagagaggtacttcgacctggtgtcctgtggtttctaaggaatttgaatgatccagatttcaatccagtacaggaaatgatccatttgccaatatataggcatctccgaagatttattttgtcagtgattgtctttggctccattgtcctcctgatgctttggcttcctatacgtataattaagagtgtgctgcctaattttcttccatacaatgtcatgctctacagtgatgctccagtgagtgaactgtccctcgagctgcttctgcttcaggttgtcttgccagcattactcgaacagggacacacgaggcagtggctgaaggggctggtgcgagcgtggactgtgaccgccggatacttgctggatcttcattcttatttattgggagaccaggaagaaaatgaaaacagtgcaaatcaacaagttaacaataatcagcatgctcgaaataacaacgctattcctgtggtgggagaaggccttcatgcagcccaccaagccatactccagcagggagggcctgttggctttcagccttaccgccgacctttaaattttccactcaggatatttctgttgattgtcttcatgtgtataacattactgattgccagcctcatctgccttactttaccagtatttgctggccgttggttaatgtcgttttggacggggactgccaaaatccatgagctctacacagctgcttgtggtctctatgtttgctggctaaccataagggctgtgacggtgatggtggcatggatgcctcagggacgcagagtgatcttccagaaggttaaagagtggtctctcatgatcatgaagactttgatagttgcggtgctgttggctggagttgtccctctccttctggggctcctgtttgagctggtcattgtggctcccctgagggttcccttggatcagactcctcttttttatccatggcaggactgggcacttggagtcctgcatgccaaaatcattgcagctataacattgatgggtcctcagtggtggttgaaaactgtaattgaacaggtttacgcaaatggcatccggaacattgaccttcactatattgttcgtaaactggcagctcccgtgatctctgtgctgttgctttccctgtgtgtaccttatgtcatagcttctggtgttgttcctttactaggtacgtaatgctggttgtggagccttgaaggagcacttttattaacattggacattctctttacccctagtaaaaaggatgtctcactccatatgctttatttgtaaatgtgaatccagctaagacaatgatttcaaaataccacttttcttagatttgactattctgggtaagattagaggatcataaagctctttgatacagttcttttctctaccagaagataaaacttgaaatttacatgctgtacaaaataggcaggatcagatttccttcaggttgtcttcttctgactagaagtgctgtgatcatataaaattaagtaacagtgttgttgtatttaagttttaaagaaatattctttggcataaaagatccaaagaggagatgctaatgggcaacacgtttatactgaaatacactgtcttgttgattgtgtagtgaagactcctcatagctccttaaacccaacatattttcaaaattataagcagagacttttccttcccaaatctttttcttctccagaattccgtctctcagcagcaaacattatcatccaacaaattgcataagtcagaaaccttgaaggctatccatgtcaccttattctgtcctccatgtccctctggtctccaagtgtcccattcttccctgaagaatctggtctctcgtctctggagcctttgctcctgacttttgttgagtcattcgtctcctaccctaactttggcaccttcctatctggtttcccagccttgaacctgccatcactaattccttctccacactgggcacaatgacctttcaaaagaatgaatctcattgtacctctttggtgaacatttttttcattggttcctctgtggcctttaatgcagtccaaccttttggcatagtttacaaggctcctccttttgctttgatgtgggcttcagtttgacctcactccatgtcatatactctgagttttgattaaacaaccatggaatggcctcttatcaaacacacaatgtcctctccataactgtctccacattttcatttgtcttatccatctgccagaaatgaccccgtcctccctttaaccgtgagagaggagcttaaaaaaaacacacaaccaaacttgcagtgtaacatgtatacttgtatgttaccttactaggtcaagaaatagaacttttccagccctttggaagccctttgtgtgtgtgcccttctttaccttttgccactggtttgacttctaatagtctcattgcttcttagacagtaaagatattagccatgtgcagtagctacttgggaggctgaggtgggaggttgcttgaagccaggaattgaagaccagtctgagcaacatggcgagacccaacctcta

SEQ ID NO: 458460 - DNA, 3680 bp, Homo sapiens
  misc_feature (1262)..(1262): n is a, c, g, or t
aggtgttcccgcccctccccctcccgtgtcgctcgctttctgtcagcctctctccctctccctctcccctctccttcctctcgcttcctctctcgcacctgagcgtacgcacctgcccgggcccggctccctcctcctctcccctccctctttccccgcccggccgcgggagcctcgtggctgcgtcaccgccgcccccccagacaagatggacaccgcggaggaagacatatgtagagtgtgtcggtcagaaggaacacctgagaaaccgctttatcatccttgtgtatgtactggcagtattaagtttatccatcaagaatgcttagttcaatggctgaaacacagtcgaaaagaatactgtgaattatgcaagcacagatttgcttttacaccaatttattctccagatatgccttcacggcttccaattcaagacatatttgctggactggttacaagtattggcactgcaatacgatattggtttcattatacacttgtggcctttgcatggttgggagttgttcctcttacagcatgccgcatctacaagtgcttgtttactggctccgtgagctcactactgacgctgccattagatatgctgtcaacggaaaatttgttggcagattgtttgcagggttgttttgtggtgacgtgcacactgtgtgcattcatcagcctggtgtggttgagagagcagatagtccatgggggagcaccaatttggttggagcatgctgccccaccgttcaatgctgcggggcatcaccaaaatgaggctccagcaggaggaaatggtgcagaaaatgttgctgctgatcagcctgctaacccaccagctgagaacgcagtggtgggggaaaaccctgatgcccaggatgaccaggcagaagaggaggaggaggacaatgaggaggaagatgacgctggtgtggaggatgcggcagatgctaataacggagcccaggatgacatgaattggaatgctttagaatgggaccgagctgctgaagagcttacatgggaaagaatgctaggacttgatggatcactagtttttctggaacatgtcttctgggtggtatctttaaatacactgttcattcttgtttttgcattttgcccttaccatattggtcatttctcccttgttggtttgggatttgaagaacacgtgagtataatacttttacaaagttactttcattcattactcccaaatgtgattattaataaaatagtattctaaagagttncatcatttcttcattggcattatgcaagggaatagttaggcaataccgtctcattcttttttaaaaaaaataacagtggctcaagagatagtggtcatgttgccaactaatgaaaatgtgctctgaaatccagtcagctgggtgggcctgaggcataccgtgggaaagtttcccacaggctgattttctgtccatctcaagaacctgtatgttctcttctttccctttccccaggtgccccctgctgaatttagaaaagtaacaatatatcaatcaatttaaaaagggtagaatattttggaatgacgggttgtagtgttttctagagtgctttagttttgacattttatcagtattttccagaggtaaataaattttggaaggattattacttctctgttggggccctagaacaatttagtcttttatggaaaagctgactatctgggatcatatgctcagtttgtatatttgagatctgagagatcacgttctgaagtcttctcatatttagtacacctctgattctcactagttgaatgcaagaacttgaaaggttcaggtaagtgttttgaaaaattttgactttccaaacttttgccacttgctatctgaaactcaggaatcaaaaaataccgacaggcactgttactttcaaaattctttctataagttgagaatgggacagatttgcagagcaagggaaacttgaacagttacttctagtggtaggaaatgaggtggctaggatattacccagctggtgggtgacttgggcagtgtgttcctgctttcagtggttagcctttagcaaatctgctttagagtgagagtagagggcaggctgttgtattacagtgctcttgtttttgtaaaatttaattcactctactgttattttgtctccttgggtaaagtgttatttaatttttcttcattttttagtaatatataacagtcagtgagagaatttggttttcagagatgtcatccaaagcagattttacagttgtttcctggttataaattgtctcaacaattctcttttagtcatttagattgtttaatatgggaaaaccggggtgtagaacatgttgtaaaattaaattttatttacttttttcttatttccaggtccaagcatctcattttgaaggcctaatcacaaccatagttgggtatatacttttagcaataacactgataatttgtcatggcttggcaactcttgtgaaatttcatagatctcgtcgcttactgggagtctgctatattgttgttaaggtctctttgttagtggtggtagaaattggagtattccctctcatttgtggttggtggctggatatctgttccttggaaatgtttgatgctactctgaaagatcgagaactgagctttcagtcggctccaggtactaccatgtttctgcattggctagtgggaatggtatatgtcttctactttgcctccttcattctactactgagagaggtacttcgacctggtgtcctgtggtttctaaggaatttgaatgatccagatttcaatccagtacaggaaatgatccatttgccaatatataggcatctccgaagatttattttgtcagtgattgtctttggctccattgtcctcctgatgctttggcttcctatacgtataattaagagtgtgctgcctaattttcttccatacaatgtcatgctctacagtgatgctccagtgagtgaactgtccctcgagctgcttctgcttcaggttgtcttgccagcattactcgaacagggacacacgaggcagtggctgaaggggctggtgcgagcgtggactgtgaccgccggatacttgctggatcttcattcttatttattgggagaccaggaagaaaatgaaaacagtgcaaatcaacaagttaacaataatcagcatgctcgaaataacaacgctattcctgtggtgggagaaggccttcatgcagcccaccaagccatactccagcagggagggcctgttggctttcagccttaccgccgacctttaaattttccactcaggatatttctgttgattgtcttcatgtgtataacattactgattgccagcctcatctgccttactttaccagtatttgctggccgttggttaatgtcgttttggacggggactgccaaaatccatgagctctacacagctgcttgtggtctctatgtttgctggctaaccataagggctgtgacggtgatggtggcatggatgcctcagggacgcagagtgatcttccagaaggttaaagagtggtctctcatgggagtggccctttccttttggggtcccgtttagcttggcatggggtttccctgaggtttccttggatagaattcccttttttttcagggagggatggggccttgagca

SEQ ID NO: 458461 - DNA, 899 bp, Homo sapiens
aggtgttcccgcccctccccctcccgtgtcgctcgctttctgtcagcctctctccctctccctctcccctctccttcctctcgcttcctctctcgcacctgagcgtacgcacctgcccgggcccggctccctcctcctctcccctccctctttccccgcccggccgcgggagcctcgtggctgcgtcaccgccgcccccccagacaagatggacaccgcggaggaagacatatgtagagtgtgtcggtcagaaggaacacctgagaaaccgctttatcatccttgtgtatgtactggcagtattaagtttatccatcaagaatgcttagttcaatggctgaaacacagtcgaaaagaatactgtgaattatgcaagcacagatttgcttttacaccaatttattctccagatatgccttcacggcttccaattcaagacatatttgctggactggttacaagtattggcactgcaatacgatattggtttcattatacacttgtggcctttgcatggttgggagttgttcctcttacagcatgccgcatctacaagtgcttgtttactggctccgtgagctcactactgacgctgccattagatatgctgtcaacggaaaatttgttggcagattgtttgcagggttgttttgtggtgacgtgcacactgtgtgcattcatcagcctggtgtggttgagagagcagatagtccatgggggagcaccaatttggttggagcatgctgccccaccgttcaatgctgcggggcatcaccaaaatgaggctccagcaggaggaaatggtgcagaaaatgttgctgctgatcagcctgggcatcagggttttcccctcatcactgcgttctcagctggtgggttagcaggctgatcgtcgacgc

SEQ ID NO: 458462 - DNA, 1073 bp, Homo sapiens
aggtgttcccgcccctccccctcccgtgtcgctcgctttctgtcagcctctctccctctccctctcccctctccttcctctcgcttcctctctcgcacctgagcgtacgcacctgcccgggcccggctccctcctcctctcccctccctctttccccgcccggccgcgggagcctcgtggctgcgtcaccgccgcccccccagacaagatggacaccgcggaggaagacatatgtagagtgtgtcggtcagaaggaacacctgagaaaccgctttatcatccttgtgtatgtactggcagtattaagtttatccatcaagaatgcttagttcaatggctgaaacacagtcgaaaagaatactgtgaattatgcaagcacagatttgcttttacaccaatttattctccagatatgccttcacggcttccaattcaagacatatttgctggactggttacaagtattggcactgcaatacgatattggtttcattatacacttgtggcctttgcatggttgggagttgttcctcttacagcatgtgagtattcatgcctctgattggagttatttaaacattgcataactacttaatattataaagcaatattgcatcatattattatttgactgatgtttagttatttgatgtcagagtgtcatgtattaggaaagccttacttagaagatgttcatcggaactaagaatgagtttaacaggtcagttttttgagtgaatgtgggaaagaacacagcatacagaatggctaaccatgaaagttcatgaaagcgttgaaaaaatcaaatcaaatcataattagatatgaagtatgctagagctttcaagggctacaaaagacggccgggcgcggtggcttatgcctgtaatcccagcacttcaggaggccgaggcaggcggatcacgaggtcaggagtttgagactagcctggccaacatggagactgaggcaggagaattgcttaaacccaggaggcggaggttgcagtgaactgagatcgcaccactgcactccagcttgggcaacagagcaagactttgtctcgcaaaaaa

SEQ ID NO: 458463 - DNA, 456 bp, Homo sapiens
atcatgaagactttgatagttgcggtgctgttggctggagttgtccctctccttctggggctcctgtttgagctggtcattgtggctcccctgagggttcccttggatcagactcctcttttttatccatggcaggtaaatgtatgtcttttgctcatgttatttcattaaggatttgagatcagaaaataatcctagccaggcatggggcttacgcctataatctagcactttgggaggctgaggtgggaggactgcttgcacccaggagttcgagaccagcctgggcagcatggcaagacctagtctctataaaaaattggctcatgcgtctggtcccagctgcttgggaggcaaaggtgagaggatcacaggaggttgaggctgaagtgagccatgttcatgacactgcactgtagcctgggcaacagagtaagagcctctgtccaaaaaaaa

SEQ ID NO: 458464 - DNA, 483 bp, Homo sapiens
acttaccttgttttggttgtgatttcatcaaattgtgtactctttagacattgtgatttttgtcttttgtttttttgatgaagacattgatatatcgaatgtgatatctttttcctaatgtgaaaatactaacataacaacatgaagatgacaattctctttacctagccacatgtctcatttatcagcttttctattttcagtatttgctggccgttggttaatgtcgttttggacggggactgccaaaatccatgagctctacacagctgcttgtggtctctatgtttgctggctaaccataagggctgtgacggtgatggtggcatggatgcctcagggacgcagagtgatcttccagaaggttaaagagtggtctctcatgtctcatggtatgtgtgtgtaatacaagactgatcttgtatgttaggaatagtgaatatttttccagtcatcttaaatttttttttttggcacatttat

SEQ ID NO: 458465 - DNA, 6164 bp, Homo sapiens
  misc_feature (1262)..(1262): n is a, c, g, or t
aggtgttcccgcccctccccctcccgtgtcgctcgctttctgtcagcctctctccctctccctctcccctctccttcctctcgcttcctctctcgcacctgagcgtacgcacctgcccgggcccggctccctcctcctctcccctccctctttccccgcccggccgcgggagcctcgtggctgcgtcaccgccgcccccccagacaagatggacaccgcggaggaagacatatgtagagtgtgtcggtcagaaggaacacctgagaaaccgctttatcatccttgtgtatgtactggcagtattaagtttatccatcaagaatgcttagttcaatggctgaaacacagtcgaaaagaatactgtgaattatgcaagcacagatttgcttttacaccaatttattctccagatatgccttcacggcttccaattcaagacatatttgctggactggttacaagtattggcactgcaatacgatattggtttcattatacacttgtggcctttgcatggttgggagttgttcctcttacagcatgccgcatctacaagtgcttgtttactggctccgtgagctcactactgacgctgccattagatatgctgtcaacggaaaatttgttggcagattgtttgcagggttgttttgtggtgacgtgcacactgtgtgcattcatcagcctggtgtggttgagagagcagatagtccatgggggagcaccaatttggttggagcatgctgccccaccgttcaatgctgcggggcatcaccaaaatgaggctccagcaggaggaaatggtgcagaaaatgttgctgctgatcagcctgctaacccaccagctgagaacgcagtggtgggggaaaaccctgatgcccaggatgaccaggcagaagaggaggaggaggacaatgaggaggaagatgacgctggtgtggaggatgcggcagatgctaataacggagcccaggatgacatgaattggaatgctttagaatgggaccgagctgctgaagagcttacatgggaaagaatgctaggacttgatggatcactagtttttctggaacatgtcttctgggtggtatctttaaatacactgttcattcttgtttttgcattttgcccttaccatattggtcatttctcccttgttggtttgggatttgaagaacacgtgagtataatacttttacaaagttactttcattcattactcccaaatgtgattattaataaaatagtattctaaagagttncatcatttcttcattggcattatgcaagggaatagttaggcaataccgtctcattcttttttaaaaaaaataacagtggctcaagagatagtggtcatgttgccaactaatgaaaatgtgctctgaaatccagtcagctgggtgggcctgaggcataccgtgggaaagtttcccacaggctgattttctgtccatctcaagaacctgtatgttctcttctttccctttccccaggtgccccctgctgaatttagaaaagtaacaatatatcaatcaatttaaaaagggtagaatattttggaatgacgggttgtagtgttttctagagtgctttagttttgacattttatcagtattttccagaggtaaataaattttggaaggattattacttctctgttggggccctagaacaatttagtcttttatggaaaagctgactatctgggatcatatgctcagtttgtatatttgagatctgagagatcacgttctgaagtcttctcatatttagtacacctctgattctcactagttgaatgcaagaacttgaaaggttcaggtaagtgttttgaaaaattttgactttccaaacttttgccacttgctatctgaaactcaggaatcaaaaaataccgacaggcactgttactttcaaaattctttctataagttgagaatgggacagatttgcagagcaagggaaacttgaacagttacttctagtggtaggaaatgaggtggctaggatattacccagctggtgggtgacttgggcagtgtgttcctgctttcagtggttagcctttagcaaatctgctttagagtgagagtagagggcaggctgttgtattacagtgctcttgtttttgtaaaatttaattcactctactgttattttgtctccttgggtaaagtgttatttaatttttcttcattttttagtaatatataacagtcagtgagagaatttggttttcagagatgtcatccaaagcagattttacagttgtttcctggttataaattgtctcaacaattctcttttagtcatttagattgtttaatatgggaaaaccggggtgtagaacatgttgtaaaattaaattttatttacttttttcttatttccaggtccaagcatctcattttgaaggcctaatcacaaccatagttgggtatatacttttagcaataacactgataatttgtcatggcttggcaactcttgtgaaatttcatagatctcgtcgcttactgggagtctgctatattgttgttaaggtctctttgttagtggtggtagaaattggagtattccctctcatttgtggttggtggctggatatctgttccttggaaatgtttgatgctactctgaaagatcgagaactgagctttcagtcggctccaggtactaccatgtttctgcattggctagtgggaatggtatatgtcttctactttgcctccttcattctactactgagagaggtacttcgacctggtgtcctgtggtttctaaggaatttgaatgatccagatttcaatccagtacaggaaatgatccatttgccaatatataggcatctccgaagatttattttgtcagtgattgtctttggctccattgtcctcctgatgctttggcttcctatacgtataattaagagtgtgctgcctaattttcttccatacaatgtcatgctctacagtgatgctccagtgagtgaactgtccctcgagctgcttctgcttcaggttgtcttgccagcattactcgaacagggacacacgaggcagtggctgaaggggctggtgcgagcgtggactgtgaccgccggatacttgctggatcttcattcttatttattgggagaccaggaagaaaatgaaaacagtgcaaatcaacaagttaacaataatcagcatgctcgaaataacaacgctattcctgtggtgggagaaggccttcatgcagcccaccaagccatactccagcagggagggcctgttggctttcagccttaccgccgacctttaaattttccactcaggatatttctgttgattgtcttcatgtgtataacattactgattgccagcctcatctgccttactttaccagtatttgctggccgttggttaatgtcgttttggacggggactgccaaaatccatgagctctacacagctgcttgtggtctctatgtttgctggctaaccataagggctgtgacggtgatggtggcatggatgcctcagggacgcagagtgatcttccagaaggttaaagagtggtctctcatgatcatgaagactttgatagttgcggtgctgttggctggagttgtccctctccttctggggctcctgtttgagctggtcattgtggctcccctgagggttcccttggatcagactcctcttttttatccatggcaggactgggcacttggagtcctgcatgccaaaatcattgcagctataacattgatgggtcctcagtggtggttgaaaactgtaattgaacaggtttacgcaaatggcatccggaacattgaccttcactatattgttcgtaaactggcagctcccgtgatctctgtgctgttgctttccctgtgtgtaccttatgtcatagcttctggtgttgttcctttactaggtgttactgcggaaatgcaaaacttagtccatcggcggatttatccatttttactgatggtcgtggtattgatggcaattttgtccttccaagtccgccagtttaagcgcctttatgaacatattaaaaatgacaagtaccttgtgggtcaacgactcgtgaactacgaacggaaatctggcaaacaaggctcatctccaccacctccacagtcatcccaagaataaagtagttgtctcaacaacttgaccttcccctttacatgtccttttttgtggacttctctctttggagatttttcccagtgatctctcagcgttgtttttaagttaaatgtatttgacttgtgttctcagcattcagagagcagcggtgtaagattctgctgttctccctggatcttctgacattactgctgtctgagatttgtatatgtgtaaatacaagttccttgataccctaaaaccttggattaaacagaatgtgcattgtacatctttaaacaaaatgtatattaatttattaaatctagttgtcactttattttggacctgctgtgatctcgacaggaaacgtgccacagagcagtagtgcgcaggcaagacttttcagtgacgccttgtggaacgcagttcatgatgtcctagcagctctcactaagggaactgtacattctttctttcttggctattcagaccttaccaagaacgttaaaggaaacaagtagaaatcagcagtggagtgtctgtggtaagaaaacatgaactttatgcttcactgttagttgtttgtggaagttattttgtataacaccaaagctgttgtacatttcctactgcctgatttttttcatgtgtctgtgtttgtaatattgtatagtatcttgtgctaggtgaggaaattatttttaattttgataatttaatattcctagtgtgatcagcattgggagttgggtttcagtggggcatgtctatacttagagaaaaaaagtccaaatgaagattttcatgagtcagcccccccgcccgcccccaccccacacccacatcctctcttttccacacacaactatctgtttattttttgtagcagtggccgaaagtcctgcaaggtcataaatctttcagagtgacatcaccaactgtactgcatcttactggatttaggacttctgagatgcttgtgaagtatagatgtggttgtggtcttagattgacagcattagagaagactggttagaacatctggtctcgctggttagtgcctcgttggctgaggactaggtgtgcatttctcctagcttttcatcaggaaatcccaaagtttccaaagctttttgtttacagaataaaacttcaaataaaaccaattcattatttgtccagaaggaagcttggctgagctggccttttaacataggaatgtatttcgttggaaacattctgaaaaatctcagagaactgaacccttacaaactttgttttccctcataaccaaagcttcaggttagaagtttagaaaaatagaatggttgggtacatgatctaaatgtttaatgctaaaggtatatcgtaagggtagtgtttgtttttgaacgataatttagaagttctcatagaaagcgtataacataggtcttcagaaactataaaagaattttcatatagtattaaaatccatagactaaaatctgagaattttttaacatatgcaagtcagccaaacataagctaccaaaataaagagcaatgtgttctggctgttttatacttcaacaattttttccctaagtggtaagcaattactttaaaacatatttttaaaaacatcggtatcgggagctgcggtggctccggccggttgtcctggcacacaaggaggcgaggctatgcgttcgaggccaacctaggcaaaattggaaaaaaaaaaaaaaatcagtatcagaaataatgcttgacataggattcagtgttatactctttggcactttagagcagccttttctctcatttgaaataaggtctttgttagccctacctttactcagaaatttagtcctactataaaaaattaggattttaaaatataatgctgcctgtcatagtgtatttctaaattgctctctttgggagaaaaacattattattgaattgagcatataactatataactatataactatatatatatatatatatatatatatatatatatatatatatatatatata

SEQ ID NO: 458466 - DNA, 4225 bp, Homo sapiens
cccgcctatttacaaatatctcaagggaaacttgaacagttacttctagtggtaggaaatgaggtggctaggatattacccagctggtgggtgacttgggcagtgtgttcctgctttcagtggttagcctttagcaaatctgctttagagtgagagtagagggcaggctgttgtattacagtgctcttgtttttgtaaaatttaattcactctactgttattttgtctccttgggtaaagtgttatttaatttttcttcattttttagtaatatataacagtcagtgagagaatttggttttcagagatgtcatccaaagcagattttacagttgtttcctggttataaattgtctcaacaattctcttttagtcatttagattgtttaatatgggaaaaccggggtgtagaacatgttgtaaaattaaattttatttacttttttcttatttccaggtccaagcatctcattttgaaggcctaatcacaaccatagttgggtatatacttttagcaataacactgataatttgtcatggcttggcaactcttgtgaaatttcatagatctcgtcgcttactgggagtctgctatattgttgttaaggtctctttgttagtggtggtagaaattggagtattccctctcatttgtggttggtggctggatatctgttccttggaaatgtttgatgctactctgaaagatcgagaactgagctttcagtcggctccaggtactaccatgtttctgcattggctagtgggaatggtatatgtcttctactttgcctccttcattctactactgagagaggtacttcgacctggtgtcctgtggtttctaaggaatttgaatgatccagatttcaatccagtacaggaaatgatccatttgccaatatataggcatctccgaagatttattttgtcagtgattgtctttggctccattgtcctcctgatgctttggcttcctatacgtataattaagagtgtgctgcctaattttcttccatacaatgtcatgctctacagtgatgctccagtgagtgaactgtccctcgagctgcttctgcttcaggttgtcttgccagcattactcgaacagggacacacgaggcagtggctgaaggggctggtgcgagcgtggactgtgaccgccggatacttgctggatcttcattcttatttattgggagaccaggaagaaaatgaaaacagtgcaaatcaacaagttaacaataatcagcatgctcgaaataacaacgctattcctgtggtgggagaaggccttcatgcagcccaccaagccatactccagcagggagggcctgttggctttcagccttaccgccgacctttaaattttccactcaggatatttctgttgattgtcttcatgtgtataacattactgattgccagcctcatctgccttactttaccagtatttgctggccgttggttaatgtcgttttggacggggactgccaaaatccatgagctctacacagctgcttgtggtctctatgtttgctggctaaccataagggctgtgacggtgatggtggcatggatgcctcagggacgcagagtgatcttccagaaggttaaagagtggtctctcatgatcatgaagactttgatagttgcggtgctgttggctggagttgtccctctccttctggggctcctgtttgagctggtcattgtggctcccctgagggttcccttggatcagactcctcttttttatccatggcaggactgggcacttggagtcctgcatgccaaaatcattgcagctataacattgatgggtcctcagtggtggttgaaaactgtaattgaacaggtttacgcaaatggcatccggaacattgaccttcactatattgttcgtaaactggcagctcccgtgatctctgtgctgttgctttccctgtgtgtaccttatgtcatagcttctggtgttgttcctttactaggtgttactgcggaaatgcaaaacttagtccatcggcggatttatccatttttactgatggtcgtggtattgatggcaattttgtccttccaagtccgccagtttaagcgcctttatgaacatattaaaaatgacaagtaccttgtgggtcaacgactcgtgaactacgaacggaaatctggcaaacaaggctcatctccaccacctccacagtcatcccaagaataaagtagttgtctcaacaacttgaccttcccctttacatgtccttttttgtggacttctctctttggagatttttcccagtgatctctcagcgttgtttttaagttaaatgtatttgacttgtgttctcagcattcagagagcagcggtgtaagattctgctgttctccctggatcttctgacattactgctgtctgagatttgtatatgtgtaaatacaagttccttgataccctaaaaccttggattaaacagaatgtgcattgtacatctttaaacaaaatgtatattaatttattaaatctagttgtcactttattttggacctgctgtgatctcgacaggaaacgtgccacagagcagtagtgcgcaggcaagacttttcagtgacgccttgtggaacgcagttcatgatgtcctagcagctctcactaagggaactgtacattctttctttcttggctattcagaccttaccaagaacgttaaaggaaacaagtagaaatcagcagtggagtgtctgtggtaagaaaacatgaactttatgcttcactgttagttgtttgtggaagttattttgtataacaccaaagctgttgtacatttcctactgcctgatttttttcatgtgtctgtgtttgtaatattgtatagtatcttgtgctaggtgaggaaattatttttaattttgataatttaatattcctagtgtgatcagcattgggagttgggtttcagtggggcatgtctatacttagagaaaaaaagtccaaatgaagattttcatgagtcagcccccccgcccgcccccaccccacacccacatcctctcttttccacacacaactatctgtttattttttgtagcagtggccgaaagtcctgcaaggtcataaatctttcagagtgacatcaccaactgtactgcatcttactggatttaggacttctgagatgcttgtgaagtatagatgtggttgtggtcttagattgacagcattagagaagactggttagaacatctggtctcgctggttagtgcctcgttggctgaggactaggtgtgcatttctcctagcttttcatcaggaaatcccaaagtttccaaagctttttgtttacagaataaaacttcaaataaaaccaattcattatttgtccagaaggaagcttggctgagctggccttttaacataggaatgtatttcgttggaaacattctgaaaaatctcagagaactgaacccttacaaactttgttttccctcataaccaaagcttcaggttagaagtttagaaaaatagaatggttgggtacatgatctaaatgtttaatgctaaaggtatatcgtaagggtagtgtttgtttttgaacgataatttagaagttctcatagaaagcgtataacataggtcttcagaaactataaaagaattttcatatagtattaaaatccatagactaaaatctgagaattttttaacatatgcaagtcagccaaacataagctaccaaaataaagagcaatgtgttctggctgttttatacttcaacaattttttccctaagtggtaagcaattactttaaaacatatttttaaaaacatcggtatcgggagctgcggtggctccggccggttgtcctggcacacaaggaggcgaggctatgcgttcgaggccaacctaggcaaaattggaaaaaaaaaaaaaaatcagtatcagaaataatgcttgacataggattcagtgttatactctttggcactttagagcagccttttctctcatttgaaataaggtctttgttagccctacctttactcagaaatttagtcctactataaaaaattaggattttaaaatataatgctgcctgtcatagtgtatttctaaattgctctctttgggagaaaaacattattattgaattgagcatataactatataactatataactatatatatatatatatatatatatatatatatatatatatatatatatata

SEQ ID NO: 458467 - DNA, 6110 bp, Homo sapiens
  misc_feature (1262)..(1262): n is a, c, g, or t
aggtgttcccgcccctccccctcccgtgtcgctcgctttctgtcagcctctctccctctccctctcccctctccttcctctcgcttcctctctcgcacctgagcgtacgcacctgcccgggcccggctccctcctcctctcccctccctctttccccgcccggccgcgggagcctcgtggctgcgtcaccgccgcccccccagacaagatggacaccgcggaggaagacatatgtagagtgtgtcggtcagaaggaacacctgagaaaccgctttatcatccttgtgtatgtactggcagtattaagtttatccatcaagaatgcttagttcaatggctgaaacacagtcgaaaagaatactgtgaattatgcaagcacagatttgcttttacaccaatttattctccagatatgccttcacggcttccaattcaagacatatttgctggactggttacaagtattggcactgcaatacgatattggtttcattatacacttgtggcctttgcatggttgggagttgttcctcttacagcatgccgcatctacaagtgcttgtttactggctccgtgagctcactactgacgctgccattagatatgctgtcaacggaaaatttgttggcagattgtttgcagggttgttttgtggtgacgtgcacactgtgtgcattcatcagcctggtgtggttgagagagcagatagtccatgggggagcaccaatttggttggagcatgctgccccaccgttcaatgctgcggggcatcaccaaaatgaggctccagcaggaggaaatggtgcagaaaatgttgctgctgatcagcctgctaacccaccagctgagaacgcagtggtgggggaaaaccctgatgcccaggatgaccaggcagaagaggaggaggaggacaatgaggaggaagatgacgctggtgtggaggatgcggcagatgctaataacggagcccaggatgacatgaattggaatgctttagaatgggaccgagctgctgaagagcttacatgggaaagaatgctaggacttgatggatcactagtttttctggaacatgtcttctgggtggtatctttaaatacactgttcattcttgtttttgcattttgcccttaccatattggtcatttctcccttgttggtttgggatttgaagaacacgtgagtataatacttttacaaagttactttcattcattactcccaaatgtgattattaataaaatagtattctaaagagttncatcatttcttcattggcattatgcaagggaatagttaggcaataccgtctcattcttttttaaaaaaaataacagtggctcaagagatagtggtcatgttgccaactaatgaaaatgtgctctgaaatccagtcagctgggtgggcctgaggcataccgtgggaaagtttcccacaggctgattttctgtccatctcaagaacctgtatgttctcttctttccctttccccaggtgccccctgctgaatttagaaaagtaacaatatatcaatcaatttaaaaagggtagaatattttggaatgacgggttgtagtgttttctagagtgctttagttttgacattttatcagtattttccagaggtaaataaattttggaaggattattacttctctgttggggccctagaacaatttagtcttttatggaaaagctgactatctgggatcatatgctcagtttgtatatttgagatctgagagatcacgttctgaagtcttctcatatttagtacacctctgattctcactagttgaatgcaagaacttgaaaggttcaggtaagtgttttgaaaaattttgactttccaaacttttgccacttgctatctgaaactcaggaatcaaaaaataccgacaggcactgttactttcaaaattctttctataagttgagaatgggacagatttgcagagcaagggaaacttgaacagttacttctagtggtaggaaatgaggtggctaggatattacccagctggtgggtgacttgggcagtgtgttcctgctttcagtggttagcctttagcaaatctgctttagagtgagagtagagggcaggctgttgtattacagtgctcttgtttttgtaaaatttaattcactctactgttattttgtctccttgggtaaagtgttatttaatttttcttcattttttagtaatatataacagtcagtgagagaatttggttttcagagatgtcatccaaagcagattttacagttgtttcctggttataaattgtctcaacaattctcttttagtcatttagattgtttaatatgggaaaaccggggtgtagaacatgttgtaaaattaaattttatttacttttttcttatttccaggtccaagcatctcattttgaaggcctaatcacaaccatagttgggtatatacttttagcaataacactgataatttgtcatggcttggcaactcttgtgaaatttcatagatctcgtcgcttactgggagtctgctatattgttgttaaggtctctttgttagtggtggtagaaattggagtattccctctcatttgtggttggtggctggatatctgttccttggaaatgtttgatgctactctgaaagatcgagaactgagctttcagtcggctccaggtactaccatgtttctgcattggctagtgggaatggtatatgtcttctactttgcctccttcattctactactgagagaggtacttcgacctggtgtcctgtggtttctaaggaatttgaatgatccagatttcaatccagtacaggaaatgatccatttgccaatatataggcatctccgaagatttattttgtcagtgattgtctttggctccattgtcctcctgatgctttggcttcctatacgtataattaagagtgtgctgcctaattttcttccatacaatgtcatgctctacagtgatgctccagtgagtgaactgtccctcgagctgcttctgcttcaggttgtcttgccagcattactcgaacagggacacacgaggcagtggctgaaggggctggtgcgagcgtggactgtgaccgccggatacttgctggatcttcattcttatttattgggagaccaggaagaaaatgaaaacagtgcaaatcaacaagttaacaataatcagcatgctcgaaataacaacgctattcctgtggtgggagaaggccttcatgcagcccaccaagccatactccagcagggagggcctgttggctttcagccttaccgccgacctttaaattttccactcaggatatttctgttgattgtcttcatgtgtataacattactgattgccagcctcatctgccttactttaccagtatttgctggccgttggttaatgtcgttttggacggggactgccataagggctgtgacggtgatggtggcatggatgcctcagggacgcagagtgatcttccagaaggttaaagagtggtctctcatgatcatgaagactttgatagttgcggtgctgttggctggagttgtccctctccttctggggctcctgtttgagctggtcattgtggctcccctgagggttcccttggatcagactcctcttttttatccatggcaggactgggcacttggagtcctgcatgccaaaatcattgcagctataacattgatgggtcctcagtggtggttgaaaactgtaattgaacaggtttacgcaaatggcatccggaacattgaccttcactatattgttcgtaaactggcagctcccgtgatctctgtgctgttgctttccctgtgtgtaccttatgtcatagcttctggtgttgttcctttactaggtgttactgcggaaatgcaaaacttagtccatcggcggatttatccatttttactgatggtcgtggtattgatggcaattttgtccttccaagtccgccagtttaagcgcctttatgaacatattaaaaatgacaagtaccttgtgggtcaacgactcgtgaactacgaacggaaatctggcaaacaaggctcatctccaccacctccacagtcatcccaagaataaagtagttgtctcaacaacttgaccttcccctttacatgtccttttttgtggacttctctctttggagatttttcccagtgatctctcagcgttgtttttaagttaaatgtatttgacttgtgttctcagcattcagagagcagcggtgtaagattctgctgttctccctggatcttctgacattactgctgtctgagatttgtatatgtgtaaatacaagttccttgataccctaaaaccttggattaaacagaatgtgcattgtacatctttaaacaaaatgtatattaatttattaaatctagttgtcactttattttggacctgctgtgatctcgacaggaaacgtgccacagagcagtagtgcgcaggcaagacttttcagtgacgccttgtggaacgcagttcatgatgtcctagcagctctcactaagggaactgtacattctttctttcttggctattcagaccttaccaagaacgttaaaggaaacaagtagaaatcagcagtggagtgtctgtggtaagaaaacatgaactttatgcttcactgttagttgtttgtggaagttattttgtataacaccaaagctgttgtacatttcctactgcctgatttttttcatgtgtctgtgtttgtaatattgtatagtatcttgtgctaggtgaggaaattatttttaattttgataatttaatattcctagtgtgatcagcattgggagttgggtttcagtggggcatgtctatacttagagaaaaaaagtccaaatgaagattttcatgagtcagcccccccgcccgcccccaccccacacccacatcctctcttttccacacacaactatctgtttattttttgtagcagtggccgaaagtcctgcaaggtcataaatctttcagagtgacatcaccaactgtactgcatcttactggatttaggacttctgagatgcttgtgaagtatagatgtggttgtggtcttagattgacagcattagagaagactggttagaacatctggtctcgctggttagtgcctcgttggctgaggactaggtgtgcatttctcctagcttttcatcaggaaatcccaaagtttccaaagctttttgtttacagaataaaacttcaaataaaaccaattcattatttgtccagaaggaagcttggctgagctggccttttaacataggaatgtatttcgttggaaacattctgaaaaatctcagagaactgaacccttacaaactttgttttccctcataaccaaagcttcaggttagaagtttagaaaaatagaatggttgggtacatgatctaaatgtttaatgctaaaggtatatcgtaagggtagtgtttgtttttgaacgataatttagaagttctcatagaaagcgtataacataggtcttcagaaactataaaagaattttcatatagtattaaaatccatagactaaaatctgagaattttttaacatatgcaagtcagccaaacataagctaccaaaataaagagcaatgtgttctggctgttttatacttcaacaattttttccctaagtggtaagcaattactttaaaacatatttttaaaaacatcggtatcgggagctgcggtggctccggccggttgtcctggcacacaaggaggcgaggctatgcgttcgaggccaacctaggcaaaattggaaaaaaaaaaaaaaatcagtatcagaaataatgcttgacataggattcagtgttatactctttggcactttagagcagccttttctctcatttgaaataaggtctttgttagccctacctttactcagaaatttagtcctactataaaaaattaggattttaaaatataatgctgcctgtcatagtgtatttctaaattgctctctttgggagaaaaacattattattgaattgagcatataactatataactatataactatatatatatatatatatatatatatatatatatatatatatatatatata

SEQ ID NO: 458468 - DNA, 3334 bp, Homo sapiens
aggtgttcccgcccctccccctcccgtgtcgctcgctttctgtcagcctctctccctctccctctcccctctccttcctctcgcttcctctctcgcacctgagcgtacgcacctgcccgggcccggctccctcctcctctcccctccctctttccccgcccggccgcgggagcctcgtggctgcgtcaccgccgcccccccagacaagatggacaccgcggaggaagacatatgtagagtgtgtcggtcagaaggaacacctgagaaaccgctttatcatccttgtgtatgtactggcagtattaagtttatccatcaagaatgcttagttcaatggctgaaacacagtcgaaaagaatactgtgaattatgcaagcacagatttgcttttacaccaatttattctccagatatgccttcacggcttccaattcaagacatatttgctggactggttacaagtattggcactgcaatacgatattggtttcattatacacttgtggcctttgcatggttgggagttgttcctcttacagcatgccgcatctacaagtgcttgtttactggctccgtgagctcactactgacgctgccattagatatgctgtcaacggaaaatttgttggcagattgtttgcagggttgttttgtggtgacgtgcacactgtgtgcattcatcagcctggtgtggttgagagagcagatagtccatgggggagcaccaatttggttggagcatgctgccccaccgttcaatgctgcggggcatcaccaaaatgaggctccagcaggaggaaatggtgcagaaaatgttgctgctgatcagcctgctaacccaccagctgagaacgcagtggtgggggaaaaccctgatgcccaggatgaccaggcagaagaggaggaggaggacaatgaggaggaagatgacgctggtgtggaggatgcggcagatgctaataacggagcccagggtaatggctgcttgtgtgtcctcactcttcagcactgcaaatctgttctcaacttgcattgaggaaaagggctggcgttttcaaatttttaatgttgtgaagttctatttctaacttatttttactttattttggcaaactggcatttatggatgtacatatgcataaatatgtttttttctatgaaacagggcatgttttgtgttttaaaatcctttttacacaggccttttttttttttttgggagactgagtctcgctctgtcgcccaggctggagtgcagtggcgctatctcggctcactgcaagctccgcctcctgggttcaagcgattctcctgcctcagcctcccaagtagctggtactacaggtgcgtgccaccacacctggcttattttagttattttagtagagatagggtttcaccatgttggccaggctggtctcggaactcctgactgcaggtgatccgtcctccttgggctcccaaagtgctgggattataggtgtgagcccccacgcctggccaacttgattatattaattttgggttttttgttttgttttgttttgttttttaatttttcaaagaatttgtggatcttggtataaagtcattggaacatatctgttttaacagcaagagatcctaggcagatacttcaaaaggttaaaaattcttaatcctacagaattttaaatgaatcttatcaatgttttgtaaacaaacaatatgaatggccaaaaaattgccctccattttactggcaggtaatttatattgtcttacttaagaattctcccctagtttttcaattgtactttatcgtgttgttttcaatgagataagtattttcatagggaaagcattttccagcataatatttgcttgggtagcatccgggttttagtatttaaccaagagccttttaaatattgaaaacccatagttcagaaaatgttagtattgctgcccttcttcacataaatttttttttaaattatactattattttgcttaattttatattgggttaaaacaaccttcaagaaggttaactaggaaagaagacctttttgttttatttttactatttatatatagaagacaaatcagcatttggtgatagttttacatgaccagttatcaaacggtcatagtatgaagtgtgcagttgttcattattagtaaattatgtttgatttttaaactatttagtactaatagttgagatgaaaactgaagaaaaatgccaatgtgacgtttgtgtatagctagccttaaaaaacttcccatgtttttaggtgacttttttccccctcttagtactctggagaaacaatgaagatgggccatctcaattccagatgtaaacaaaaagtaatttttatttcaacatttaatgtaactgctattattgtggattcttgtcttgtgtattttctttcccttattcaagtaatatagaataactttccttaaaatgatttgatccaagatacgtcatttctgtattggcaaaatgccactattaaagtgtaattcttgaatttaggttgaattgatgactttttaaaacaaaacaaacactggacagttctacattgtattgcgtttgcgaatgtgcgtgaacacacgcacacgtgcaggagaatgtagtgccataagaacactggcgctttttaaaactttccaagctagctacttattttcattttcagggttgagtactctaagctctctacttactgtgagaagttttctacattgtaaaattaaaagattatatttaaaatacttctttaggatgttattcagccatcaaaaaaaaacccaactaaaatgtcttaccagtaaagtattattaaaagcctcatttgtggagattcgctgacttccttggttaagctgtcttgtatttacttaatttgtcccctcaaccaggtgttttcttttcagcctgttactgtcctgtgccatttttaaaaatagccatcatgagtaagggcttctttaaaataatccctgacaatatctttggcattaatacgacataaagacaagacagtatatgtatgttttcattcctgttttgtacgagtgcctcattttgtagtcatgaaagtaacatagtaccttaaataaaaatgtaatgactaatctaaggtctaggaataactattgtagaagctaagtagaacacttagtttggggtgtcaattttctatcaacgcaaacaccttagggtacccagaccaattttatgtatatatattctgaaatgctccctttttaatgtggtcatttgttgccttctaagttgagaggacaaaactgaataaagtgaatgttaattgta

SEQ ID NO: 458469 - DNA, 3045 bp, Homo sapiens
  misc_feature (309)..(309): n is a, c, g, or t
cggacgagcgaagagctggtgaagagcgtagtagaagggtagcgccctagatccgagtgagacgagagggagtgcgccagataaggggccccgggcacgatgctgggcccaccaaatctatgagggaggccaagagccccctaaaaggcccctacgtgagcccgtcttaaaggccttggaagggcaccccagccttgaggcggtttcttgtttaagggcgttcggcctgtgaaataggcgtttccaattgacccgtttttccaaatttggcgcaattcccatgccataggggcgcactgtggaaagccntcgtagggcctttcgtttcgccatcgggcaaagggattttctcaggcgattagtgggtaccccgggttttcaatcagacgtttaaacgcggcaagttttttttttttttagcaggaataatgtgatttggaaacagagcaaaacagacaagtggatctaaatttctgggcttttctgtgattttaggctccagcaggaggaaatggtgcagaaaatgttgctgctgatcagcctgctaacccaccagctgagaacgcagtggtgggggaaaaccctgatgcccaggatgaccaggcagaagaggaggaggaggacaatgaggaggaagatgacgctggtgtggaggatgcggcagatgctaataacggagcccagggtaatggctgcttgtgtgtcctcactcttcagcactgcaaatctgttctcaacttgcattgaggaaaagggctggcgttttcaaatttttaatgttgtgaagttctatttctaacttatttttactttattttggcaaactggcatttatggatgtacatatgcataaatatgtttttttctatgaaacagggcatgttttgtgttttaaaatcctttttacacaggccttttttttttttttgggagactgagtctcgctctgtcgcccaggctggagtgcagtggcgctatctcggctcactgcaagctccgcctcctgggttcaagcgattctcctgcctcagcctcccaagtagctggtactacaggtgcgtgccaccacacctggcttattttagttattttagtagagatagggtttcaccatgttggccaggctggtctcggaactcctgactgcaggtgatccgtcctccttgggctcccaaagtgctgggattataggtgtgagcccccacgcctggccaacttgattatattaattttgggttttttgttttgttttgttttgttttttaatttttcaaagaatttgtggatcttggtataaagtcattggaacatatctgttttaacagcaagagatcctaggcagatacttcaaaaggttaaaaattcttaatcctacagaattttaaatgaatcttatcaatgttttgtaaacaaacaatatgaatggccaaaaaattgccctccattttactggcaggtaatttatattgtcttacttaagaattctcccctagtttttcaattgtactttatcgtgttgttttcaatgagataagtattttcatagggaaagcattttccagcataatatttgcttgggtagcatccgggttttagtatttaaccaagagccttttaaatattgaaaacccatagttcagaaaatgttagtattgctgcccttcttcacataaatttttttttaaattatactattattttgcttaattttatattgggttaaaacaaccttcaagaaggttaactaggaaagaagacctttttgttttatttttactatttatatatagaagacaaatcagcatttggtgatagttttacatgaccagttatcaaacggtcatagtatgaagtgtgcagttgttcattattagtaaattatgtttgatttttaaactatttagtactaatagttgagatgaaaactgaagaaaaatgccaatgtgacgtttgtgtatagctagccttaaaaaacttcccatgtttttaggtgacttttttccccctcttagtactctggagaaacaatgaagatgggccatctcaattccagatgtaaacaaaaagtaatttttatttcaacatttaatgtaactgctattattgtggattcttgtcttgtgtattttctttcccttattcaagtaatatagaataactttccttaaaatgatttgatccaagatacgtcatttctgtattggcaaaatgccactattaaagtgtaattcttgaatttaggttgaattgatgactttttaaaacaaaacaaacactggacagttctacattgtattgcgtttgcgaatgtgcgtgaacacacgcacacgtgcaggagaatgtagtgccataagaacactggcgctttttaaaactttccaagctagctacttattttcattttcagggttgagtactctaagctctctacttactgtgagaagttttctacattgtaaaattaaaagattatatttaaaatacttctttaggatgttattcagccatcaaaaaaaaacccaactaaaatgtcttaccagtaaagtattattaaaagcctcatttgtggagattcgctgacttccttggttaagctgtcttgtatttacttaatttgtcccctcaaccaggtgttttcttttcagcctgttactgtcctgtgccatttttaaaaatagccatcatgagtaagggcttctttaaaataatccctgacaatatctttggcattaatacgacataaagacaagacagtatatgtatgttttcattcctgttttgtacgagtgcctcattttgtagtcatgaaagtaacatagtaccttaaataaaaatgtaatgactaatctaaggtctaggaataactattgtagaagctaagtagaacacttagtttggggtgtcaattttctatcaacgcaaacaccttagggtacccagaccaattttatgtatatatattctgaaatgctccctttttaatgtggtcatttgttgccttctaagttgagaggacaaaactgaataaagtgaatgttaattgta

SEQ ID NO: 458470 - DNA, 5074 bp, Homo sapiens
  misc_feature (1262)..(1262): n is a, c, g, or t
aggtgttcccgcccctccccctcccgtgtcgctcgctttctgtcagcctctctccctctccctctcccctctccttcctctcgcttcctctctcgcacctgagcgtacgcacctgcccgggcccggctccctcctcctctcccctccctctttccccgcccggccgcgggagcctcgtggctgcgtcaccgccgcccccccagacaagatggacaccgcggaggaagacatatgtagagtgtgtcggtcagaaggaacacctgagaaaccgctttatcatccttgtgtatgtactggcagtattaagtttatccatcaagaatgcttagttcaatggctgaaacacagtcgaaaagaatactgtgaattatgcaagcacagatttgcttttacaccaatttattctccagatatgccttcacggcttccaattcaagacatatttgctggactggttacaagtattggcactgcaatacgatattggtttcattatacacttgtggcctttgcatggttgggagttgttcctcttacagcatgccgcatctacaagtgcttgtttactggctccgtgagctcactactgacgctgccattagatatgctgtcaacggaaaatttgttggcagattgtttgcagggttgttttgtggtgacgtgcacactgtgtgcattcatcagcctggtgtggttgagagagcagatagtccatgggggagcaccaatttggttggagcatgctgccccaccgttcaatgctgcggggcatcaccaaaatgaggctccagcaggaggaaatggtgcagaaaatgttgctgctgatcagcctgctaacccaccagctgagaacgcagtggtgggggaaaaccctgatgcccaggatgaccaggcagaagaggaggaggaggacaatgaggaggaagatgacgctggtgtggaggatgcggcagatgctaataacggagcccaggatgacatgaattggaatgctttagaatgggaccgagctgctgaagagcttacatgggaaagaatgctaggacttgatggatcactagtttttctggaacatgtcttctgggtggtatctttaaatacactgttcattcttgtttttgcattttgcccttaccatattggtcatttctcccttgttggtttgggatttgaagaacacgtgagtataatacttttacaaagttactttcattcattactcccaaatgtgattattaataaaatagtattctaaagagttncatcatttcttcattggcattatgcaagggaatagttaggcaataccgtctcattcttttttaaaaaaaataacagtggctcaagagatagtggtcatgttgccaactaatgaaaatgtgctctgaaatccagtcagctgggtgggcctgaggcataccgtgggaaagtttcccacaggctgattttctgtccatctcaagaacctgtatgttctcttctttccctttccccaggtgccccctgctgaatttagaaaagtaacaatatatcaatcaatttaaaaagggtagaatattttggaatgacgggttgtagtgttttctagagtgctttagttttgacattttatcagtattttccagaggtaaataaattttggaaggattattacttctctgttggggccctagaacaatttagtcttttatggaaaagctgactatctgggatcatatgctcagtttgtatatttgagatctgagagatcacgttctgaagtcttctcatatttagtacacctctgattctcactagttgaatgcaagaacttgaaaggttcaggtaagtgttttgaaaaattttgactttccaaacttttgccacttgctatctgaaactcaggaatcaaaaaataccgacaggcactgttactttcaaaattctttctataagttgagaatgggacagatttgcagagcaagggaaacttgaacagttacttctagtggtaggaaatgaggtggctaggatattacccagctggtgggtgacttgggcagtgtgttcctgctttcagtggttagcctttagcaaatctgctttagagtgagagtagagggcaggctgttgtattacagtgctcttgtttttgtaaaatttaattcactctactgttattttgtctccttgggtaaagtgttatttaatttttcttcattttttagtaatatataacagtcagtgagagaatttggttttcagagatgtcatccaaagcagattttacagttgtttcctggttataaattgtctcaacaattctcttttagtcatttagattgtttaatatgggaaaaccggggtgtagaacatgttgtaaaattaaattttatttacttttttcttatttccaggtccaagcatctcattttgaaggcctaatcacaaccatagttgggtatatacttttagcaataacactgataatttgtcatggcttggcaactcttgtgaaatttcatagatctcgtcgcttactgggagtctgctatattgttgttaaggtctctttgttagtggtggtagaaattggagtattccctctcatttgtggttggtggctggatatctgttccttggaaatgtttgatgctactctgaaagatcgagaactgagctttcagtcggctccaggtactaccatgtttctgcattggctagtgggaatggtatatgtcttctactttgcctccttcattctactactgagagaggtacttcgacctggtgtcctgtggtttctaaggaatttgaatgatccagatttcaatccagtacaggaaatgatccatttgccaatatataggcatctccgaagatttattttgtcagtgattgtctttggctccattgtcctcctgatgctttggcttcctatacgtataattaagagtgtgctgcctaattttcttccatacaatgtcatgctctacagtgatgctccagtgagtgaactgtccctcgagctgcttctgcttcaggttgtcttgccagcattactcgaacagggacacacgaggcagtggctgaaggggctggtgcgagcgtggactgtgaccgccggatacttgctggatcttcattcttatttattgggagaccaggaagaaaatgaaaacagtgcaaatcaacaagttaacaataatcagcatgctcgaaataacaacgctattcctgtggtgggagaaggccttcatgcagcccaccaagccatactccagcagggagggcctgttggctttcagccttaccgccgacctttaaattttccactcaggatatttctgttgattgtcttcatgtgtataacattactgattgccagcctcatctgccttactttaccagtatttgctggccgttggttaatgtcgttttggacggggactgccaaaatccatgagctctacacagctgcttgtggtctctatgtttgctggctaaccataagggctgtgacggtgatggtggcatggatgcctcagggacgcagagtgatcttccagaaggttaaagagtggtctctcatgatcatgaagactttgatagttgcggtgctgttggctggagttgtccctctccttctggggctcctgtttgagctggtcattgtggctcccctgagggttcccttggatcagactcctcttttttatccatggcaggactgggcacttggagtcctgcatgccaaaatcattgcagctataacattgatgggtcctcagtggtggttgaaaactgtaattgaacaggtttacgcaaatggcatccggaacattgaccttcactatattgttcgtaaactggcagctcccgtgatctctgtgctgttgctttccctgtgtgtaccttatgtcatagcttctggtgttgttcctttactaggtgttactgcggaaatgcaaaacttagtccatcggcggatttatccatttttactgatggtcgtggtattgatggcaattttgtccttccaagtccgccagtttaagcgcctttatgaacatattaaaaatgacaagtaccttgtgggtcaacgactcgtgaactacgaacggaaatctggcaaacaaggctcatctccaccacctccacagtcatcccaagaataaagtagttgtctcaacaacttgaccttcccctttacatgtccttttttgtggacttctctctttggagatttttcccagtgatctctcagcgttgtttttaagttaaatgtatttgacttgtgttctcagcattcagagagcagcggtgtaagattctgctgttctccctggatcttctgacattactgctgtctgagatttgtatatgtgtaaatacaagttccttgataccctaaaaccttggattaaacagaatgtgcattgtacatctttaaacaaaatgtatattaatttattaaatctagttgtcactttattttggacctgctgtgatctcgacaggaaacgtgccacagagcagtagtgcgcaggcaagacttttcagtgacgccttgtggaacgcagttcatgatgtcctagcagctctcactaagggaactgtacattctttctttcttggctattcagaccttaccaagaacgttaaaggaaacaagtagaaatcagcagtggagtgtctgtggtgacttttttccccctcttagtactctggagaaacaatgaagatgggccatctcaattccagatgtaaacaaaaagtaatttttatttcaacatttaatgtaactgctattattgtggattcttgtcttgtgtattttctttcccttattcaagtaatatagaataactttccttaaaatgatttgatccaagatacgtcatttctgtattggcaaaatgccactattaaagtgtaattcttgaatttaggttgaattgatgactttttaaaacaaaacaaacactggacagttttaaaaagcgccagtgttcttatggcactacattctcctgcacgttggtgtgttcacgcacattcgcaaacgcaatacaatgtcgacgcggccgcgaat

SEQ ID NO: 458471 - DNA, 4146 bp, Homo sapiens
  misc_feature (1262)..(1262): n is a, c, g, or t
aggtgttcccgcccctccccctcccgtgtcgctcgctttctgtcagcctctctccctctccctctcccctctccttcctctcgcttcctctctcgcacctgagcgtacgcacctgcccgggcccggctccctcctcctctcccctccctctttccccgcccggccgcgggagcctcgtggctgcgtcaccgccgcccccccagacaagatggacaccgcggaggaagacatatgtagagtgtgtcggtcagaaggaacacctgagaaaccgctttatcatccttgtgtatgtactggcagtattaagtttatccatcaagaatgcttagttcaatggctgaaacacagtcgaaaagaatactgtgaattatgcaagcacagatttgcttttacaccaatttattctccagatatgccttcacggcttccaattcaagacatatttgctggactggttacaagtattggcactgcaatacgatattggtttcattatacacttgtggcctttgcatggttgggagttgttcctcttacagcatgccgcatctacaagtgcttgtttactggctccgtgagctcactactgacgctgccattagatatgctgtcaacggaaaatttgttggcagattgtttgcagggttgttttgtggtgacgtgcacactgtgtgcattcatcagcctggtgtggttgagagagcagatagtccatgggggagcaccaatttggttggagcatgctgccccaccgttcaatgctgcggggcatcaccaaaatgaggctccagcaggaggaaatggtgcagaaaatgttgctgctgatcagcctgctaacccaccagctgagaacgcagtggtgggggaaaaccctgatgcccaggatgaccaggcagaagaggaggaggaggacaatgaggaggaagatgacgctggtgtggaggatgcggcagatgctaataacggagcccaggatgacatgaattggaatgctttagaatgggaccgagctgctgaagagcttacatgggaaagaatgctaggacttgatggatcactagtttttctggaacatgtcttctgggtggtatctttaaatacactgttcattcttgtttttgcattttgcccttaccatattggtcatttctcccttgttggtttgggatttgaagaacacgtgagtataatacttttacaaagttactttcattcattactcccaaatgtgattattaataaaatagtattctaaagagttncatcatttcttcattggcattatgcaagggaatagttaggcaataccgtctcattcttttttaaaaaaaataacagtggctcaagagatagtggtcatgttgccaactaatgaaaatgtgctctgaaatccagtcagctgggtgggcctgaggcataccgtgggaaagtttcccacaggctgattttctgtccatctcaagaacctgtatgttctcttctttccctttccccaggtgccccctgctgaatttagaaaagtaacaatatatcaatcaatttaaaaagggtagaatattttggaatgacgggttgtagtgttttctagagtgctttagttttgacattttatcagtattttccagaggtaaataaattttggaaggattattacttctctgttggggccctagaacaatttagtcttttatggaaaagctgactatctgggatcatatgctcagtttgtatatttgagatctgagagatcacgttctgaagtcttctcatatttagtacacctctgattctcactagttgaatgcaagaacttgaaaggttcaggtaagtgttttgaaaaattttgactttccaaacttttgccacttgctatctgaaactcaggaatcaaaaaataccgacaggcactgttactttcaaaattctttctataagttgagaatgggacagatttgcagagcaagggaaacttgaacagttacttctagtggtaggaaatgaggtggctaggatattacccagctggtgggtgacttgggcagtgtgttcctgctttcagtggttagcctttagcaaatctgctttagagtgagagtagagggcaggctgttgtattacagtgctcttgtttttgtaaaatttaattcactctactgttattttgtctccttgggtaaagtgttatttaatttttcttcattttttagtaatatataacagtcagtgagagaatttggttttcagagatgtcatccaaagcagattttacagttgtttcctggttataaattgtctcaacaattctcttttagtcatttagattgtttaatatgggaaaaccggggtgtagaacatgttgtaaaattaaattttatttacttttttcttatttccaggtccaagcatctcattttgaaggcctaatcacaaccatagttgggtatatacttttagcaataacactgataatttgtcatggcttggcaactcttgtgaaatttcatagatctcgtcgcttactgggagtctgctatattgttgttaaggtctctttgttagtggtggtagaaattggagtattccctctcatttgtggttggtggctggatatctgttccttggaaatgtttgatgctactctgaaagatcgagaactgagctttcagtcggctccaggtactaccatgtttctgcattggctagtgggaatggtatatgtcttctactttgcctccttcattctactactgagagaggtacttcgacctggtgtcctgtggtttctaaggaatttgaatgatccagatttcaatccagtacaggaaatgatccatttgccaatatataggcatctccgaagatttattttgtcagtgattgtctttggctccattgtcctcctgatgctttggcttcctatacgtataattaagagtgtgctgcctaattttcttccatacaatgtcatgctctacagtgatgctccagtgagtgaactgtccctcgagctgcttctgcttcaggttgtcttgccagcattactcgaacagggacacacgaggcagtggctgaaggggctggtgcgagcgtggactgtgaccgccggatacttgctggatcttcattcttatttattgggagaccaggaagaaaatgaaaacagtgcaaatcaacaagttaacaataatcagcatgctcgaaataacaacgctattcctgtggtgggagaaggccttcatgcagcccaccaagccatactccagcagggagggcctgttggctttcagccttaccgccgacctttaaattttccactcaggatatttctgttgattgtcttcatgtgtataacattactgattgccagcctcatctgccttactttaccagtatttgctggccgttggttaatgtcgttttggacggggactgccaaaatccatgagctctacacagctgcttgtggtctctatgtttgctggctaaccataagggctgtgacggtgatggtggcatggatgcctcagggacgcagagtgatcttccagaaggttaaagagtggtctctcatggtgatctctgtgctgttgctttccctgtgtgtaccttatgtcatagcttctggtgttgttcctttactaggtgttactgcggaaatgcaaaacttagtccatcggcggatttatccatttttactgatggtcgtggtattgatggcaattttgtccttccaagtccgccagtttaagcgcctttatgaacatattaaaaatgacaagtaccttgtgggtcaacgactcgtgaactacgaacggaaatctggcaaacaaggctcatctccaccacctccacagtcatcccaagaataaagtagttgtctcaacaacttgaccttcccctttacatgtccttttttgtggacttctctctttggagatttttcccagtgatctctcagcgttgtttttaagttaaatgtatttgacttgtgttctcagcattcagagagcagcggtgtaagattctgctgttctccctggatcttctgacattactgctgtctgagatttgtatatgtgtaaatacaagttccttgataccctaaaaccttggattaaacagaatgtgcattgtacatctttaaac

SEQ ID NO: 458472 - DNA, 4026 bp, Homo sapiens
  misc_feature (1262)..(1262): n is a, c, g, or t
aggtgttcccgcccctccccctcccgtgtcgctcgctttctgtcagcctctctccctctccctctcccctctccttcctctcgcttcctctctcgcacctgagcgtacgcacctgcccgggcccggctccctcctcctctcccctccctctttccccgcccggccgcgggagcctcgtggctgcgtcaccgccgcccccccagacaagatggacaccgcggaggaagacatatgtagagtgtgtcggtcagaaggaacacctgagaaaccgctttatcatccttgtgtatgtactggcagtattaagtttatccatcaagaatgcttagttcaatggctgaaacacagtcgaaaagaatactgtgaattatgcaagcacagatttgcttttacaccaatttattctccagatatgccttcacggcttccaattcaagacatatttgctggactggttacaagtattggcactgcaatacgatattggtttcattatacacttgtggcctttgcatggttgggagttgttcctcttacagcatgccgcatctacaagtgcttgtttactggctccgtgagctcactactgacgctgccattagatatgctgtcaacggaaaatttgttggcagattgtttgcagggttgttttgtggtgacgtgcacactgtgtgcattcatcagcctggtgtggttgagagagcagatagtccatgggggagcaccaatttggttggagcatgctgccccaccgttcaatgctgcggggcatcaccaaaatgaggctccagcaggaggaaatggtgcagaaaatgttgctgctgatcagcctgctaacccaccagctgagaacgcagtggtgggggaaaaccctgatgcccaggatgaccaggcagaagaggaggaggaggacaatgaggaggaagatgacgctggtgtggaggatgcggcagatgctaataacggagcccaggatgacatgaattggaatgctttagaatgggaccgagctgctgaagagcttacatgggaaagaatgctaggacttgatggatcactagtttttctggaacatgtcttctgggtggtatctttaaatacactgttcattcttgtttttgcattttgcccttaccatattggtcatttctcccttgttggtttgggatttgaagaacacgtgagtataatacttttacaaagttactttcattcattactcccaaatgtgattattaataaaatagtattctaaagagttncatcatttcttcattggcattatgcaagggaatagttaggcaataccgtctcattcttttttaaaaaaaataacagtggctcaagagatagtggtcatgttgccaactaatgaaaatgtgctctgaaatccagtcagctgggtgggcctgaggcataccgtgggaaagtttcccacaggctgattttctgtccatctcaagaacctgtatgttctcttctttccctttccccaggtgccccctgctgaatttagaaaagtaacaatatatcaatcaatttaaaaagggtagaatattttggaatgacgggttgtagtgttttctagagtgctttagttttgacattttatcagtattttccagaggtaaataaattttggaaggattattacttctctgttggggccctagaacaatttagtcttttatggaaaagctgactatctgggatcatatgctcagtttgtatatttgagatctgagagatcacgttctgaagtcttctcatatttagtacacctctgattctcactagttgaatgcaagaacttgaaaggttcaggtaagtgttttgaaaaattttgactttccaaacttttgccacttgctatctgaaactcaggaatcaaaaaataccgacaggcactgttactttcaaaattctttctataagttgagaatgggacagatttgcagagcaagggaaacttgaacagttacttctagtggtaggaaatgaggtggctaggatattacccagctggtgggtgacttgggcagtgtgttcctgctttcagtggttagcctttagcaaatctgctttagagtgagagtagagggcaggctgttgtattacagtgctcttgtttttgtaaaatttaattcactctactgttattttgtctccttgggtaaagtgttatttaatttttcttcattttttagtaatatataacagtcagtgagagaatttggttttcagagatgtcatccaaagcagattttacagttgtttcctggttataaattgtctcaacaattctcttttagtcatttagattgtttaatatgggaaaaccggggtgtagaacatgttgtaaaattaaattttatttacttttttcttatttccaggtccaagcatctcattttgaaggcctaatcacaaccatagttgggtatatacttttagcaataacactgataatttgtcatggcttggcaactcttgtgaaatttcatagatctcgtcgcttactgggagtctgctatattgttgttaaggtctctttgttagtggtggtagaaattggagtattccctctcatttgtggttggtggctggatatctgttccttggaaatgtttgatgctactctgaaagatcgagaactgagctttcagtcggctccaggtactaccatgtttctgcattggctagtgggaatggtatatgtcttctactttgcctccttcattctactactgagagaggtacttcgacctggtgtcctgtggtttctaaggaatttgaatgatccagatttcaatccagtacaggaaatgatccatttgccaatatataggcatctccgaagatttattttgtcagtgattgtctttggctccattgtcctcctgatgctttggcttcctatacgtataattaagagtgtgctgcctaattttcttccatacaatgtcatgctctacagtgatgctccagtgagtgaactgtccctcgagctgcttctgcttcaggttgtcttgccagcattactcgaacagggacacacgaggcagtggctgaaggggctggtgcgagcgtggactgtgaccgccggatacttgctggatcttcattcttatttattgggagaccaggaagaaaatgaaaacagtgcaaatcaacaagttaacaataatcagcatgctcgaaataacaacgctattcctgtggtgggagaaggccttcatgcagcccaccaagccatactccagcagggagggcctgttggctttcagccttaccgccgacctttaaattttccactcaggatatttctgttgattgtcttcatgtgtataacattactgattgccagcctcatctgccttactttaccagtatttgctggccgttggttaatgtcgttttggacggggactgccaaaatccatgagctctacacagctgcttgtggtctctatgtttgctggctaaccataagggctgtgacggtgatggtggcatggatgcctcagggacgcagagtgatcttccagaaggttaaagagtggtctctcatgatcatgaagactttgatagttgcggtgctgttggctggagttgtccctctccttctggggctcctgtttgagctggtcattgtggctcccctgagggttcccttggatcagactcctcttttttatccatggcaggtaaatgtatgtcttttgctcatgttatttcattaaggatttgagatcagaaaataatcctagccaggcatggggcttacgcctataatctagcactttgggaggctgaggtgggaggactgcttgcacccaggagttcgagaccagcctgggcagcatggcaagacctagtctctataaaaaattggctcatgcgtctggtcccagctgcttgggaggcaaaggtgagaggatcacaggaggttgaggctgaagtgagccatgttcatgacactgcactgtagcctgggcaacagagtaagagcctctgtccaaaaaa

SEQ ID NO: 458473 - DNA, 2524 bp, Homo sapiens
aggtgttcccgcccctccccctcccgtgtcgctcgctttctgtcagcctctctccctctccctctcccctctccttcctctcgcttcctctctcgcacctgagcgtacgcacctgcccgggcccggctccctcctcctctcccctccctctttccccgcccggccgcgggagcctcgtggctgcgtcaccgccgcccccccagacaagatggacaccgcggaggaagacatatgtagagtgtgtcggtcagaaggaacacctgagaaaccgctttatcatccttgtgtatgtactggcagtattaagtttatccatcaagaatgcttagttcaatggctgaaacacagtcgaaaagaatactgtgaattatgcaagcacagatttgcttttacaccaatttattctccagatatgccttcacggcttccaattcaagacatatttgctggactggttacaagtattggcactgcaatacgatattggtttcattatacacttgtggcctttgcatggttgggagttgttcctcttacagcatgccgcatctacaagtgcttgtttactggctccgtgagctcactactgacgctgccattagatatgctgtcaacggaaaatttgttggcagattgtttgcagggttgttttgtggtgacgtgcacactgtgtgcattcatcagcctggtgtggttgagagagcagatagtccatgggggagcaccaatttggttggagcatgctgccccaccgttcaatgctgcggggcatcaccaaaatgaggctccagcaggaggaaatggtgcagaaaatgttgctgctgatcagcctgctaacccaccagctgagaacgcagtggtgggggaaaaccctgatgcccaggatgaccaggcagaagaggaggaggaggacaatgaggaggaagatgacgctggtgtggaggatgcggcagatgctaataacggagcccagggtaatggctgcttgtgtgtcctcactcttcagcactgcaaatctgttctcaacttgcattgaggaaaagggctggcgttttcaaatttttaatgttgtgaagttctatttctaacttatttttactttattttggcaaactggcatttatggatgtacatatgcataaatatgtttttttctatgaaacagggcatgttttgtgttttaaaatcctttttacacaggccttttttttttttttgggagactgagtctcgctctgtcgcccaggctggagtgcagtggcgctatctcggctcactgcaagctccgcctcctgggttcaagcgattctcctgcctcagcctcccaagtagctggtactacaggtgcgtgccaccacacctggcttattttagttattttagtagagatagggtttcaccatgttggccaggctggtctcggaactcctgactgcaggtgatccgtcctccttgggctcccaaagtgctgggattataggtgtgagcccccacgcctggccaacttgattatattaattttgggttttttgttttgttttgttttgttttttaatttttcaaagaatttgtggatcttggtataaagtcattggaacatatctgttttaacagcaagagatcctaggcagatacttcaaaaggttaaaaattcttaatcctacagaattttaaatgaatcttatcaatgttttgtaaacaaacaatatgaatggccaaaaaattgccctccattttactggcaggtaatttatattgtcttacttaagaattctcccctagtttttcaattgtactttatcgtgttgttttcaatgagataagtattttcatagggaaagcattttccagcataatatttgcttgggtagcatccgggttttagtatttaaccaagagccttttaaatattgaaaacccatagttcagaaaatgttagtattgctgcccttcttcacataaatttttttttaaattatactattattttgcttaattttatattgggttaaaacaaccttcaagaaggttaactaggaaagaagacctttttgttttatttttactatttatatatagaagacaaatcagcatttggtgatagttttacatgaccagttatcaaacggtcatagtatgaagtgtgcagttgttcattattagtaaattatgtttgatttttaaactatttagtactaatagttgagatgaaaactgaagaaaaatgccaatgtgacgtttgtgtatagctagccttaaaaaacttcccatgtttttaggtgacttttttccccctcttagtactctggagaaacaatgaagatgggccatctcaattccagatgtaaacaaaaagtaatttttatttcaacatttaatgtaactgctattattgtggattcttgtcttgtgtattttctttcccttattcaagtaatatagaataactttccttaaaatgatttgatccaagatacgtcatttctgtattggcaaaatgccactattaaagtgtaattcttga

SEQ ID NO: 458474 - DNA, 1468 bp, Homo sapiens
  misc_feature (8)..(8): n is a, c, g, or t
cgcctggnaccacacccagctaatttttgtactgttagcagaaacagggtttcatcacgttggccaggcgtggtttcgatctcctgacctcgtgatctgcctgctttggcctcccaaagtgctgggattacaggcatgagccactgtgcccggcctttatgctgagttttaagggctgtatgagacaccaggtggtgggagggagctgttttgagagcagggaatttaggatacttaggaaattagaaaattagagaagtcataggatcttggaactaagggagaaccttagagtcctgtggagcagaacccagcatttgtatgtggagaaacggaggcccagagaagttgtgacttatccgggtcactctgcaggtctgggtgtcccacccgagtccatgtcagggctctttctgcacaccaagccccatgcccacctctgtgtgactggctgtggtgggaggggcctcctaggctagaggtgctgggatcccttttcagtccagaaataatgagcttagagggtctggaagtagcatggactaaaacccaggaaggatccacagggactgttgatgccagtgaggactccaggaagccggatcacggggactgttgatgccagtgaggactccaggaagctgctgttgggacagccctgctttgggagtctgaggttccaggaaaccccaggaatccggattctcatccctgagacctactcaggactagcccaggggaccgagctaggaaacctgcttgaggtggtagaggcagccaggggtgtgcagtggtccgggcgggcttcgatcagttccaggttggttgcttctccaaactggctccaagacaggcatgtggctcaagttggtctggactcaatcccgggactttaggacttttgctagaaatctggtgtggtgcaggagcgactccaggattcactctgtgggctgctgtggactcagactcccccaggactagaggctgcttctccctggtgggaggagttacaaccttgcaagggttctaaagacccccgggtgctgggtggtgggcttttcctgacaacttccataagttattggaacctaaattcacactgcttagcatcgtaatagtctgatcaaccctgctcagtgttgtcatacttgccctattaccagggagagaaatagagaggtgggtgcctccctagagtatccacccacactgtgtactgaatgcccctcctcaacctgtctctcgtggggacctgcacctgcttttcctactaactgctggcttgtatttattcccctaaagcctgttccataacccagtgtggttcttagacttgagcaaacctcagaaacacctggagggcttatccccagtcctgattctgtaggtctggggtgaggccttatagtgtgcattttaacaacgtccccagtgtttcccaatgctgctggtgcacaccaagtgt

SEQ ID NO: 458475 - DNA, 5058 bp, Homo sapiens
  misc_feature (1395)..(1395): n is a, c, g, or t
tctcagatcctgacggtgcagcagcccgcagcctcagccagggagtcccagccgctttcaatggaggagaagcccggccagccacagcctcagcaccatcacagccaccaccatccgcaccatcaccctcagcagcagcagcagcagccgcaccaccaccaccattattatttctacaaccacagccacaaccaccaccaccaccatcatcaccagcagcctcaccaatacctgcagcatggagccgagggcagccccaaggcccagccaaagccgctgaaacatgagcagaaacacaccctccagcagcaccaggaaacgccgaagaagaaaacaggctatggtgaactaaacggtaatgctggagaaagagaaatatctttaaagaacctgagttctgatgaagccaccaaccctatttccagggtcctcaatggcaaccagcaagttgtagacactagcctgaagcagactgtaaaggccaacacctttgggaaagcaggaattaaaaccaagaatttcattcagaaaaacagtatggacaaaaagaatgggaagtcttatgaaaataaatctggagagaatcagtctgtagataagtctgatactataccaattccaaatggtgtggtaacaaataattctggttatattactaatggttatatgggtaaaggagcagataatgatggtagtggatctgagagcggatatacaactcctaaaaaaaggaaagctaggcgcaatagtgccaagggttgtgaaaaccttaatatagtgcaggacaaaataatgcaacaagagaccagtgtcccaaccttaaaacagggacttgaaactttcaagcctgactatagtgaacaaaagggaaatcgagtagatggttcgaagcccatttggaagtatgaaactgggcctggaggaacaagtcgaggaaaacctgctgtgggtgatatgcttcggaaaagctcagatagtaaacctggtgtgagcagcaaaaagtttgatgatcggcccaaaggaaagcatgcttcagctgttgcctccaaagaggactcgtggaccctatttaaaccacccccagtttttccagtggacaatagcagtgctaaaatagttcctaaaataagttatgcaagcaaagttaaggaaaacctcaacaaaactatacagaactcttctgtgtcaccaacttcatcttcatcatcttcatcatctaccggggaaactcagacccaatcatcaagtcgcttatcccaggtccctatgtcagcgctgaaatctgttacttctgccaacttttctaatgggcctgttttagcagggactgatggaaatgtttatcctccagggggtcagccactgctaactactgctgctaatactctaacaccnatctcttctgggacagattcagttctccaggacatgagtctaacttcagcagctgttgaacaaattaagactagcctttttatctatccttcaaatatgcaaactatgctgttgagcacagcacaagtggatctgccctctcagacagatcagcaaaacctgggggatatcttccagaatcagtggggtttatcatttataaatgagcccagtgctggccctgagactgttactgggaagtcatcagagcataaagtgatggaggtgacatttcaaggagaatatcctgctactttggtttcacagggtgctgaaataattccctcaggaactgagcatcctgtgtttcccaaggcttacgagctggagaaacggactagtcctcaagttctgggtagcattctaaaatctgggactactagtgagagtggagccttatccttggaacccagtcatataggtgacctgcagaaagcagacaccagtagtcaaggtgctttagtgtttctctcaaaggactacgagatagaaagtcaaaatcctctggcctctcctacgaacactttgttaggctctgccaaagaacagagataccagagaggcctagaaaggaatgatagctggggttcttttgacctgagggctgctattgtatatcacactaaagaaatggaatctatttggaatttgcagaagcaagatcccaaaaggataatcacttacaatgaagccatggatagtccagatcaatgaaggaccagactgcctattcgtaacctttctgcagcattagagccatcgttcatgggggacacaaggcttttatgctcctagatcttcaacgcagcagaggaaccataagtagaatcacaggataatatatacaaatatatatatatacatatatatatatatagttatttaaaaaaggcaactgaaagtaattagacttcttaaggaatcaaatttatttcaagagactacacatggttatttaatctccggtactgaataggttttttttcttctgttagtttttgtttttaagtgtgaatgcaagtgattaatgaatacagacttaacaagtgtggttctaaagttcctgctgtcatcaacttgggcaacaaatgacccactggaaaggcaaatccacttaaaagatctctgtatcttgttctgtgactgaagtgatacactaatcacggggaacccagaatgattcaacattttccccccactcctcccttgatctttttggttttactttaattaagccctgcgagaatgctggataaatgccttgaagttagcagggtgtatttttttagcgaatatgatttgcatgtcttgccaggagttaagcggcctctggggtgttggggaaatactttatttctttccatttattttttgtggggcggggataggggagggcattgaagttctacaattctggaatagttagttgatggtacatagttaacttggcttcggttacatattggactttaacaactgaagaatctatgcgtgtcatttaaagaaaagttgcagaacaagcaattggcttagatatacaatctggaaaaatattcctgtgcccatattttaatgtaattgtataactgggagcaaaaatatattctgcttttcaactgtaggtgctccagacttgctctccgtcactaacactaaatgtgctgttttccttgtttttcatcaaacatttaagacaaacttagacctttctgtaaattatcttttaatttctcagcaaaatctaaaaggggaagaaaaaagtccatgaaaactaaaacttttcatgtttttagccagtgagaagataataaaccctgactgtagaaggtgtgttttcatgcaaactatacttctgagcttgttagcttctaattatatcttaataaatatattttattactagagcaagatgggtttttaaggaaaataatgtgaaattctggaaattttctttggggcagagaagagcattagccctgtcttatcattacattgccatcctgttgcactgcagcttgtgtatagcatgctaaaataaatttttgtgtgtgtgtgcagaaattaagggtccaattgagattgggtgatgttagtaacataataacaagttgtctggcctgacacagcatcacatcacacacacagaaattagtatatccatgtatgtcaaatacaggttaaaatatcagggcatttatataaagagttgtagtcttctgataaaagtagactggatcccctggggtatttggggagaaagtaactactttggctctacccctagaaatgtccagttttgagtgactgtagtatggatgggttttcttgttttgttgattatttgaggcttttaaaacaagtagttcatgaaagaagctgttggactcaacatagagtagagtaactatctttttagtctggatttctgccctgcttagattttaaaagtataagcatggattgccaattccacttgatgtaaacaaaacttttttttatacataatatatatatatatatataaaataacttattgtatcagtccaggttcagaaacttgtggtaggccagttccagatagtttcatttcacctgtaaactgtatcactttgactgatattgtaattttcaaatgtataatatgtttacagatgtgccctgcatttagtctgccttgttcctattttgatttttgttgagtctcctgcctgcttgccaaaagctaggatgcttcaggcccatgtacaattgaaagcagaggcatccttgagctttaaagcattgaacaaactggaaaatgcaacataccacataactgaagtgaaaaaagtctgtgtttttgtgtttttttaaataaaaattttcaaaaagttaaaaaaaaagacatataaggttgattaaagggaaaaaaggctccagtttgttttacaggttttaaagttctgctgtgtgttcaattgccttgtgtaaccacttgtcgccttagggccagattcccctctctagtccccttttttaaatgtccattttgcttgcctggaattttaaagttcttccgtctcacaactcacaagaaactttctgggtttgtgacatacagaggttgaattgagtatatatttgaaaaggaaaaaacaaaaaacaaacccagaccccacctgaattgggctttttaacttagaagcaacacttgattaaacatctttagaaagctattgcttttctaatttccttccatatccctcaggcctcagtgttcagagaagccaaaaagaatgtatcacttctctgtctgtccaaaggtttttgagagtctcacttctaaatgaaacaatgcaacatttcactttgatttctccactgaaatttccttgattatatggttagaggtatgtagttaggaatgtctgttaactttctgagaaccctagtgccccatcatattaactgtcagtattttgggggcattaggttaatagacttaattgcctaggtacaagcaggactttgggacaaatctctttgtgctgtttggtaacacttaactctatttgttgcaatctttctccttaggtcctcacacaattccttacagagcacttattaaaaaaaaatcttaagagt

SEQ ID NO: 458476 - DNA, 542 bp, Homo sapiens
gtaaacataataagtaaaattgtggaaagacgttgtaatattgaagggatagtcaaaaaacaaacccagaccccacctgaattgggctttttaacttagaagcaacacttgattaaacatctttagaaagctattgcttttctaatttccttccatatccctcaggcctcagtgttcagagaagccaaaaagaatgtatcacttctctgtctgtccaaaggtttttgagagtctcacttctaaatgaaacaatgcaacatttcactttgatttctccactgaaatttccttgattatatggttagaggtatgtagttaggaatgtctgttaactttctgagaaccctagtgccccatcatattaactgtcagtattttgggggcattaggttaatagacttaattgcctaggtacaagcaggactttgggacaaatctctttgtgctgtttggtaacacttaactctatttgttgcaatctttctccttaggtcctcacacaattccttacagagcacttattaaaaaaaaatcttaagagt

SEQ ID NO: 458477 - DNA, 4876 bp, Homo sapiens
  misc_feature (1213)..(1213): n is a, c, g, or t
ctgacaggtgtcttctcatagagatgtgaaataatataaagctacagctcatcgcatagtgtctagcatacagtaaatagttcttaaatgttaggtattagtgtaatttacatgttgtgatttttttttttaatcctttttttcccctcccctaggctatggtgaactaaacggtaatgctggagaaagagaaatatctttaaagaacctgagttctgatgaagccaccaaccctatttccagggtcctcaatggcaaccagcaagttgtagacactagcctgaagcagactgtaaaggccaacacctttgggaaagcaggaattaaaaccaagaatttcattcagaaaaacagtatggacaaaaagaatgggaagtcttatgaaaataaatctggagagaatcagtctgtagataagtctgatactataccaattccaaatggtgtggtaacaaataattctggttatattactaatggttatatgggtaaaggagcagataatgatggtagtggatctgagagcggatatacaactcctaaaaaaaggaaagctaggcgcaatagtgccaagggttgtgaaaaccttaatatagtgcaggacaaaataatgcaacaagagaccagtgtcccaaccttaaaacagggacttgaaactttcaagcctgactatagtgaacaaaagggaaatcgagtagatggttcgaagcccatttggaagtatgaaactgggcctggaggaacaagtcgaggaaaacctgctgtgggtgatatgcttcggaaaagctcagatagtaaacctggtgtgagcagcaaaaagtttgatgatcggcccaaaggaaagcatgcttcagctgttgcctccaaagaggactcgtggaccctatttaaaccacccccagtttttccagtggacaatagcagtgctaaaatagttcctaaaataagttatgcaagcaaagttaaggaaaacctcaacaaaactatacagaactcttctgtgtcaccaacttcatcttcatcatcttcatcatctaccggggaaactcagacccaatcatcaagtcgcttatcccaggtccctatgtcagcgctgaaatctgttacttctgccaacttttctaatgggcctgttttagcagggactgatggaaatgtttatcctccagggggtcagccactgctaactactgctgctaatactctaacaccnatctcttctgggacagattcagttctccaggacatgagtctaacttcagcagctgttgaacaaattaagactagcctttttatctatccttcaaatatgcaaactatgctgttgagcacagcacaagtggatctgccctctcagacagatcagcaaaacctgggggatatcttccagaatcagtggggtttatcatttataaatgagcccagtgctggccctgagactgttactgggaagtcatcagagcataaagtgatggaggtgacatttcaaggagaatatcctgctactttggtttcacagggtgctgaaataattccctcaggaactgagcatcctgtgtttcccaaggcttacgagctggagaaacggactagtcctcaagttctgggtagcattctaaaatctgggactactagtgagagtggagccttatccttggaacccagtcatataggtgacctgcagaaagcagacaccagtagtcaaggtgctttagtgtttctctcaaaggactacgagatagaaagtcaaaatcctctggcctctcctacgaacactttgttaggctctgccaaagaacagagataccagagaggcctagaaaggaatgatagctggggttcttttgacctgagggctgctattgtatatcacactaaagaaatggaatctatttggaatttgcagaagcaagatcccaaaaggataatcacttacaatgaagccatggatagtccagatcaatgaaggaccagactgcctattcgtaacctttctgcagcattagagccatcgttcatgggggacacaaggcttttatgctcctagatcttcaacgcagcagaggaaccataagtagaatcacaggataatatatacaaatatatatatatacatatatatatatatagttatttaaaaaaggcaactgaaagtaattagacttcttaaggaatcaaatttatttcaagagactacacatggttatttaatctccggtactgaataggttttttttcttctgttagtttttgtttttaagtgtgaatgcaagtgattaatgaatacagacttaacaagtgtggttctaaagttcctgctgtcatcaacttgggcaacaaatgacccactggaaaggcaaatccacttaaaagatctctgtatcttgttctgtgactgaagtgatacactaatcacggggaacccagaatgattcaacattttccccccactcctcccttgatctttttggttttactttaattaagccctgcgagaatgctggataaatgccttgaagttagcagggtgtatttttttagcgaatatgatttgcatgtcttgccaggagttaagcggcctctggggtgttggggaaatactttatttctttccatttattttttgtggggcggggataggggagggcattgaagttctacaattctggaatagttagttgatggtacatagttaacttggcttcggttacatattggactttaacaactgaagaatctatgcgtgtcatttaaagaaaagttgcagaacaagcaattggcttagatatacaatctggaaaaatattcctgtgcccatattttaatgtaattgtataactgggagcaaaaatatattctgcttttcaactgtaggtgctccagacttgctctccgtcactaacactaaatgtgctgttttccttgtttttcatcaaacatttaagacaaacttagacctttctgtaaattatcttttaatttctcagcaaaatctaaaaggggaagaaaaaagtccatgaaaactaaaacttttcatgtttttagccagtgagaagataataaaccctgactgtagaaggtgtgttttcatgcaaactatacttctgagcttgttagcttctaattatatcttaataaatatattttattactagagcaagatgggtttttaaggaaaataatgtgaaattctggaaattttctttggggcagagaagagcattagccctgtcttatcattacattgccatcctgttgcactgcagcttgtgtatagcatgctaaaataaatttttgtgtgtgtgtgcagaaattaagggtccaattgagattgggtgatgttagtaacataataacaagttgtctggcctgacacagcatcacatcacacacacagaaattagtatatccatgtatgtcaaatacaggttaaaatatcagggcatttatataaagagttgtagtcttctgataaaagtagactggatcccctggggtatttggggagaaagtaactactttggctctacccctagaaatgtccagttttgagtgactgtagtatggatgggttttcttgttttgttgattatttgaggcttttaaaacaagtagttcatgaaagaagctgttggactcaacatagagtagagtaactatctttttagtctggatttctgccctgcttagattttaaaagtataagcatggattgccaattccacttgatgtaaacaaaacttttttttatacataatatatatatatatatataaaataacttattgtatcagtccaggttcagaaacttgtggtaggccagttccagatagtttcatttcacctgtaaactgtatcactttgactgatattgtaattttcaaatgtataatatgtttacagatgtgccctgcatttagtctgccttgttcctattttgatttttgttgagtctcctgcctgcttgccaaaagctaggatgcttcaggcccatgtacaattgaaagcagaggcatccttgagctttaaagcattgaacaaactggaaaatgcaacataccacataactgaagtgaaaaaagtctgtgtttttgtgtttttttaaataaaaattttcaaaaagttaaaaaaaaagacatataaggttgattaaagggaaaaaaggctccagtttgttttacaggttttaaagttctgctgtgtgttcaattgccttgtgtaaccacttgtcgccttagggccagattcccctctctagtccccttttttaaatgtccattttgcttgcctggaattttaaagttcttccgtctcacaactcacaagaaactttctgggtttgtgacatacagaggttgaattgagtatatatttgaaaaggaaaaaacaaaaaacaaacccagaccccacctgaattgggctttttaacttagaagcaacacttgattaaacatctttagaaagctattgcttttctaatttccttccatatccctcaggcctcagtgttcagagaagccaaaaagaatgtatcacttctctgtctgtccaaaggtttttgagagtctcacttctaaatgaaacaatgcaacatttcactttgatttctccactgaaatttccttgattatatggttagaggtatgtagttaggaatgtctgttaactttctgagaaccctagtgccccatcatattaactgtcagtattttgggggcattaggttaatagacttaattgcctaggtacaagcaggactttgggacaaatctctttgtgctgtttggtaacacttaactctatttgttgcaatctttctccttaggtcctcacacaattccttacagagcacttattaaaaaaaaatcttaagagt

SEQ ID NO: 458478 - DNA, 5915 bp, Homo sapiens
  misc_feature (1395)..(1395): n is a, c, g, or t
tctcagatcctgacggtgcagcagcccgcagcctcagccagggagtcccagccgctttcaatggaggagaagcccggccagccacagcctcagcaccatcacagccaccaccatccgcaccatcaccctcagcagcagcagcagcagccgcaccaccaccaccattattatttctacaaccacagccacaaccaccaccaccaccatcatcaccagcagcctcaccaatacctgcagcatggagccgagggcagccccaaggcccagccaaagccgctgaaacatgagcagaaacacaccctccagcagcaccaggaaacgccgaagaagaaaacaggctatggtgaactaaacggtaatgctggagaaagagaaatatctttaaagaacctgagttctgatgaagccaccaaccctatttccagggtcctcaatggcaaccagcaagttgtagacactagcctgaagcagactgtaaaggccaacacctttgggaaagcaggaattaaaaccaagaatttcattcagaaaaacagtatggacaaaaagaatgggaagtcttatgaaaataaatctggagagaatcagtctgtagataagtctgatactataccaattccaaatggtgtggtaacaaataattctggttatattactaatggttatatgggtaaaggagcagataatgatggtagtggatctgagagcggatatacaactcctaaaaaaaggaaagctaggcgcaatagtgccaagggttgtgaaaaccttaatatagtgcaggacaaaataatgcaacaagagaccagtgtcccaaccttaaaacagggacttgaaactttcaagcctgactatagtgaacaaaagggaaatcgagtagatggttcgaagcccatttggaagtatgaaactgggcctggaggaacaagtcgaggaaaacctgctgtgggtgatatgcttcggaaaagctcagatagtaaacctggtgtgagcagcaaaaagtttgatgatcggcccaaaggaaagcatgcttcagctgttgcctccaaagaggactcgtggaccctatttaaaccacccccagtttttccagtggacaatagcagtgctaaaatagttcctaaaataagttatgcaagcaaagttaaggaaaacctcaacaaaactatacagaactcttctgtgtcaccaacttcatcttcatcatcttcatcatctaccggggaaactcagacccaatcatcaagtcgcttatcccaggtccctatgtcagcgctgaaatctgttacttctgccaacttttctaatgggcctgttttagcagggactgatggaaatgtttatcctccagggggtcagccactgctaactactgctgctaatactctaacaccnatctcttctgggacagattcagttctccaggacatgagtctaacttcagcagctgttgaacaaattaagactagcctttttatctatccttcaaatatgcaaactatgctgttgagcacagcacaagtggatctgccctctcagacagatcagcaaaacctgggggatatcttccagaatcagtggggtttatcatttataaatgagcccagtgctggccctgagactgttactgggaagtcatcagagcataaagtgatggaggtgacatttcaaggagaatatcctgctactttggtttcacagggtgctgaaataattccctcaggaactgagcatcctgtgtttcccaaggcttacgagctggagaaacggactagtcctcaagttctgggtagcattctaaaatctgggactactagtgagagtggagccttatccttggaacccagtcatataggtgacctgcagaaagcagacaccagtagtcaaggtgctttagtgtttctctcaaaggactacgagatagaaagtcaaaatcctctggcctctcctacgaacactttgttaggctctgccaaagaacagagataccagagaggcctagaaaggaatgatagctggggttcttttgacctgagggctgctattgtatatcacactaaagaaatggaatctatttggaatttgcagaagcaagatcccaaaaggataatcacttacaatgaagccatggatagtccagatcaatgaaggaccagactgcctattcgtaacctttctgcagcattagagccatcgttcatgggggacacaaggcttttatgctcctagatcttcaacgcagcagaggaaccataagtagaatcacaggataatatatacaaatatatatatatacatatatatatatatagttatttaaaaaaggcaactgaaagtaattagacttcttaaggaatcaaatttatttcaagagactacacatggttatttaatctccggtactgaataggttttttttcttctgttagtttttgtttttaagtgtgaatgcaagtgattaatgaatacagacttaacaagtgtggttctaaagttcctgctgtcatcaacttgggcaacaaatgacccactggaaaggcaaatccacttaaaagatctctgtatcttgttctgtgactgaagtgatacactaatcacggggaacccagaatgattcaacattttccccccactcctcccttgatctttttggttttactttaattaagccctgcgagaatgctggataaatgccttgaagttagcagggtgtatttttttagcgaatatgatttgcatgtcttgccaggagttaagcggcctctggggtgttggggaaatactttatttctttccatttattttttgtggggcggggataggggagggcattgaagttctacaattctggaatagttagttgatggtacatagttaacttggcttcggttacatattggactttaacaactgaagaatctatgcgtgtcatttaaagaaaagttgcagaacaagcaattggcttagatatacaatctggaaaaatattcctgtgcccatattttaatgtaattgtataactgggagcaaaaatatattctgcttttcaactgtaggtgctccagacttgctctccgtcactaacactaaatgtgctgttttccttgtttttcatcaaacatttaagacaaacttagacctttctgtaaattatcttttaatttctcagcaaaatctaaaaggggaagaaaaaagtccatgaaaactaaaacttttcatgtttttagccagtgagaagataataaaccctgactgtagaaggtgtgttttcatgcaaactatacttctgagcttgttagcttctaattatatcttaataaatatattttattactagagcaagatgggtttttaaggaaaataatgtgaaattctggaaattttctttggggcagagaagagcattagccctgtcttatcattacattgccatcctgttgcactgcagcttgtgtatagcatgctaaaataaatttttgtgtgtgtgtgcagaaattaagggtccaattgagattgggtgatgttagtaacataataacaagttgtctggcctgacacagcatcacatcacacacacagaaattagtatatccatgtatgtcaaatacaggttaaaatatcagggcatttatataaagagttgtagtcttctgataaaagtagactggatcccctggggtatttggggagaaagtaactactttggctctacccctagaaatgtccagttttgagtgactgtagtatggatgggttttcttgttttgttgattatttgaggcttttaaaacaagtagttcatgaaagaagctgttggactcaacatagagtagagtaactatctttttagtctggatttctgccctgcttagattttaaaagtataagcatggattgccaattccacttgatgtaaacaaaacttttttttatacataatatatatatatatatataaaataacttattgtatcagtccaggttcagaaacttgtggtaggccagttccagatagtttcatttcacctgtaaactgtatcactttgactgatattgtaattttcaaatgtataatatgtttacagatgtgccctgcatttagtctgccttgttcctattttgatttttgttgagtctcctgcctgcttgccaaaagctaggatgcttcaggcccatgtacaattgaaagcagaggcatccttgagctttaaagcattgaacaaactggaaaatgcaacataccacataactgaagtgaaaaaagtctgtgtttttgtgtttttttaaataaaaattttcaaaaagttaaaaaaaaagacatataaggttgattaaagggaaaaaaggctccagtttgttttacaggttttaaagttctgctgtgtgttcaattgccttgtgtaaccacttgtcgccttagggccagattcccctctctagtccccttttttaaatgtccattttgcttgcctggaattttaaagttcttccgtctcacaactcacaagaaactttctgggtttgtgacatacagaggttgaattgagtatatatttgaaaaggaaaaaacaaaaaacaaacccagaccccacctgaattgggctttttaacttagaagcaacacttgattaaacatctttagaaagctattgcttttctaatttccttccatatccctcaggcctcagtgttcagagaagccaaaaagaatgtatcacttctctgtctgtccaaaggtttttgagagtctcacttctaaatgaaacaatgcaacatttcactttgatttctccactgaaatttccttgattatatggttagaggtatgtagttaggaatgtctgttaactttctgagaaccctagtgccccatcatattaactgtcagtattttgggggcattaggttaatagacttaattgcctaggtacaagcaggactttgggacaaatctctttgtgctgtttggtaacacttaactctatttgttgcaatctttctccttaggtcctcacacaattccttacagagcacttattaaaaaaaaatcttaagagttgatctgttttctgattattttgtgtaagcttctaaacaaacttcagctgtgattaatttagcacatttaaataacgtgttattgtttggtataaagaattttccttcaactcagagtattagtactgtagcataaaccaaatacagtctagaggggatttttaacatccctccattataaagactgaaaaaggggtgtgtgtgtgtgtgtgtgttatgtatgtatgtatgtgtgtgtgaggaaaagatggagatattaaaaattagtaaatgaatgtgtataagacattagtattcagagaatgaacttgtatttattttgtgccatttgttttcattacacagaaaaaagtcaggtggtttaaatccttaaaagggtagtattgaaaaatggcactaagaatgaaattatgacctatttttttaatagctatgaagatactaattatgggtgaagatttctttttaaatctgttttgattattgtaggcttctgtgtcacataccactcttgtaggtgtcctcaataatccccttttcccacaaaatacacagggtgtattatctttctctttattcacccccactttgctgaactgaagttaattacatagcctttcttctaacctccttagtaatgaaccttcacataaagtgtatttacagcgtctgtggtagccagcccttcctcctctactttctaggaggggatagccaataactaggaatttaatgacagatttttttttctttgaaataaatggccagagtttctccattttagaattttgttgtcctccttaatcatctgcttacctagtcattactcaatctgcagaaacttcataaaggaaaag

SEQ ID NO: 458479 - DNA, 707 bp, Homo sapiens
gctctgaacttggaggcagagacccaagcagctggaggctctgtgtgtggcaggagcagcgactggacccagagccatgtggctgtgccctctggccctcaacctcatcttgatggcagcctctggtgctgcgtgcgaagtgaaggacgtttgtgttggaagccctggtatccccggcactcctggatcccacggcctgccaggcagggacgggagagatggtgtcaaaggagaccctggccctccaggccccatgggtccgcctggagaaacaccatgtcctcctgggaataatgggctgcctggagcccctggtgtccctggagagcgtggagagaagggggaggctggcgagagaggccctccagggcttccagctcatctagatgaggagctccaagccacactccacgacttcagacatcaaatcctgcagacaaggggagccctcagtctgcaggtgctccagtaatggacagctaggcagagcaacggtcttcctcgcagtcaactggcgcagttccattccaccgtctcgtggactggccacaattttccaatgggaaccgggccactaggtagccccaacgcaagggcaatgggaccggggtcccgtgacatcccttaaggaaggttaattcgccccgtttccgcaccgcgctggggacccccacaatggcccttgtcacaccgggcccgggttaacc

SEQ ID NO: 458480 - DNA, 2549 bp, Homo sapiens
gctctgaacttggaggcagagacccaagcagctggaggctctgtgtgtgggtcgctgatttcttggagcctgaaaagaagcaggagcagcgactggacccagagccatgtggctgtgccctctggccctcaacctcatcttgatggcagcctctggtgctgcgtgcgaagtgaaggacgtttgtgttggaagccctggtatccccggcactcctggatcccacggcctgccaggcagggacgggagagatggtgtcaaaggagaccctggccctccaggccccatgggtccgcctggagaaacaccatgtcctcctgggaataatgggctgcctggagcccctggtgtccctggagagcgtggagagaagggggaggctggcgagagaggccctccagggcttccagctcatctagatgaggagctccaagccacactccacgacttcagacatcaaatcctgcagacaaggggagccctcagtctgcagggctccataatgacagtaggagagaaggtcttctccagcaatgggcagtccatcacttttgatgccattcaggaggcatgtgccagagcaggcggccgcattgctgtcccaaggaatccagaggaaaatgaggccattgcaagcttcgtgaagaagtacaacacatatgcctatgtaggcctgactgagggtcccagccctggagacttccgctactcagatgggacccctgtaaactacaccaactggtaccgaggggagcctgcaggtcggggaaaagagcagtgtgtggagatgtacacagatgggcagtggaatgacaggaactgcctgtactcccgactgaccatctgtgagttctgagaggcatttaggccatgggacagggaggatcctgtctggccttcagtttccatccccaggatccacttggtctgtgagatgctagaactccctttcaacagaattcacttgtggctattagagctggaggcacccttagccacttcattcccctgatgggccctgactcttccccataatcactgaccagccttgacactccccttgcaaaccatcccagcactgcaccccaggcagccactcctagccttggcctttggcatgagatggaggcctccttattccccatctggtccagttccttcacttacagatggcagcagtgaggccttggggtagaaggatcctccaaagtcacacagagtgcctgcctcctggtcccctcagctctgcctctgcagcccactgcctgcccagtgccatcaggatgagcagtaccggccaagcataatgacagagagaggcagatttcagggaagccctgactgtgtggagctaaggacacagtggagattctctggcactctgaggtctctgtggcaggcctggtcaggctctccaggtggtcagagggcccagtggtgccccagcacggtggtgcccaagccaaccctgtgactgacatgtacgattcactcctttgagtctttggatgccaactcagccccctgacctggaggcagccggccaaggcctctagggaagagccccccactgcagacatgacccgagtaactttctgctgatgaacaaatctgcaccccacttcagacctcggtgggcattcacaccaccccccatgccaccggctccactttccccttttattaatacattcacccagataatcattaaaattaacatgtgccaggtcttaggatgtgtcttggggtgggcacagtacccggtgactcttggggatatttatttattttccctgagcctatatcttcatctgtgaaatggggataaaaatacttgttgctgtcacaattattaccatctctccagctagcaaaattactaccagagccgttactacacacaaaggctattgaccgagcacataccatgtgccacacaccttgacaaaatcttttaatacagtttattatgtactattcaatctttacacaatgtcacgggaccagtattgtttacccaattttttataaggacactgaagcttagaggagtgaaatgttttgagtgttatttcagagagcaaatggcaaagactggatccaaacccatcttcctggacctgaagttcatgctcccagccaccccacccctgagctgaataaagatgatttaagcataaaaaaaaaaaaaaaaaacaaagacaacaagctgtcacaaaaaaaagaacagaaaaaaaaaaaaaaaaagggggggcgacaaaaaaacaccccacaggggcaccacagaggacggcaacccccgaaagtgcaaacacaaggggccaccccaacaaggagcacctcaataagagagcacgagcagacgggcacgcgcgtaaaacacggcgcgtcacagaccggcggaaacaaccgcgcacacccgcgggaaactcctggcaaaaggagccgcctcacacacgagaggagggcacgcaaacacatgggggacaaacatacccacgaagcagtcaacacgcgccgaaagcgcagactacacaccacgagacgcgaca

SEQ ID NO: 458481 - DNA, 2665 bp, Homo sapiens
gctctgaacttggaggcagagacccaagcagctggaggctctgtgtgtgggtcgctgatttcttggagcctgaaaagaaggtaactgggcatatgagggacagatggagtgagtcagtgacaggagcagcgactggacccagagccatgtggctgtgccctctggccctcaacctcatcttgatggcagcctctggtgctgcgtgcgaagtgaaggacgtttgtgttggaagccctggtatccccggcactcctggatcccacggcctgccaggcagggacgggagagatggtgtcaaaggagaccctggccctccaggccccatgggtccgcctggagaaacaccatgtcctcctgggaataatgggctgcctggagcccctggtgtccctggagagcgtggagagaagggggaggctggcgagagaggccctccagggcttccagctcatctagatgaggagctccaagccacactccacgacttcagacatcaaatcctgcagacaaggggagccctcagtctgcagggctccataatgacagtaggagagaaggtcttctccagcaatgggcagtccatcacttttgatgccattcaggaggcatgtgccagagcaggcggccgcattgctgtcccaaggaatccagaggaaaatgaggccattgcaagcttcgtgaagaagtacaacacatatgcctatgtaggcctgactgagggtcccagccctggagacttccgctactcagatgggacccctgtaaactacaccaactggtaccgaggggagcctgcaggtcggggaaaagagcagtgtgtggagatgtacacagatgggcagtggaatgacaggaactgcctgtactcccgactgaccatctgtgagttctgagaggcatttaggccatgggacagggaggatcctgtctggccttcagtttccatccccaggatccacttggtctgtgagatgctagaactccctttcaacagaattcacttgtggctattagagctggaggcacccttagccacttcattcccctgatgggccctgactcttccccataatcactgaccagccttgacactccccttgcaaaccatcccagcactgcaccccaggcagccactcctagccttggcctttggcatgagatggaggcctccttattccccatctggtccagttccttcacttacagatggcagcagtgaggccttggggtagaaggatcctccaaagtcacacagagtgcctgcctcctggtcccctcagctctgcctctgcagcccactgcctgcccagtgccatcaggatgagcagtaccggccaagcataatgacagagagaggcagatttcagggaagccctgactgtgtggagctaaggacacagtggagattctctggcactctgaggtctctgtggcaggcctggtcaggctctccaggtggtcagagggcccagtggtgccccagcacggtggtgcccaagccaaccctgtgactgacatgtacgattcactcctttgagtctttggatgccaactcagccccctgacctggaggcagccggccaaggcctctagggaagagccccccactgcagacatgacccgagtaactttctgctgatgaacaaatctgcaccccacttcagacctcggtgggcattcacaccaccccccatgccaccggctccactttccccttttattaatacattcacccagataatcattaaaattaacatgtgccaggtcttaggatgtgtcttggggtgggcacagtacccggtgactcttggggatatttatttattttccctgagcctatatcttcatctgtgaaatggggataaaaatacttgttgctgtcacaattattaccatctctccagctagcaaaattactaccagagccgttactacacacaaaggctattgaccgagcacataccatgtgccacacaccttgacaaaatcttttaatacagtttattatgtactattcaatctttacacaatgtcacgggaccagtattgtttacccaattttttataaggacactgaagcttagaggagtgaaatgttttgagtgttatttcagagagcaaatggcaaagactggatccaaacccatcttcctggacctgaagttcatgctcccagccaccccacccctgagctgaataaagatgatttaagcataaaaaaaaaaaaaaaaaaaaaaagattaaaaggaaaaagaactcaattacaaacaaaaaaaaaagggggggcggcgccctgaagaaattccccgaggagggcgcaacatgtttgcagctaccccaccgatgttgtgtgcaagaaggggggcccaaaaaggaggacgggttataatacacgaagcacgcggccgcgccgtaataacaaacgcgtgtgacagcgggaaaaaaagagcgctccgtcggggagcactcgggagaacggaacaccatactcaggggggcgggcgaaccactgtgcggcaacacaagcaccccagagaggatatagagccccaacaggcgaacgatatacaaagtcagggcgacatatcgtcgttcaaaccacaggaatataacgtgccggagaaaatgtgcccaccgagcagactgatcgacacactttttacgg

SEQ ID NO: 458482 - DNA, 2790 bp, Homo sapiens
gctctgaacttggaggcagagacccaagcagctggaggctctgtgtgtggatccatccctaccagggactcagcagggcctaagcagggggagtgggagaacagaccccaagaggaaggaagacctcatcactgactgtgagagggtcatcaccccccgatgatcaccttgaagggtccaggctgtgggccctattcatctcttttcattctcaggtcgctgatttcttggagcctgaaaagaagcaggagcagcgactggacccagagccatgtggctgtgccctctggccctcaacctcatcttgatggcagcctctggtgctgcgtgcgaagtgaaggacgtttgtgttggaagccctggtatccccggcactcctggatcccacggcctgccaggcagggacgggagagatggtgtcaaaggagaccctggccctccaggccccatgggtccgcctggagaaacaccatgtcctcctgggaataatgggctgcctggagcccctggtgtccctggagagcgtggagagaagggggaggctggcgagagaggccctccagggcttccagctcatctagatgaggagctccaagccacactccacgacttcagacatcaaatcctgcagacaaggggagccctcagtctgcagggctccataatgacagtaggagagaaggtcttctccagcaatgggcagtccatcacttttgatgccattcaggaggcatgtgccagagcaggcggccgcattgctgtcccaaggaatccagaggaaaatgaggccattgcaagcttcgtgaagaagtacaacacatatgcctatgtaggcctgactgagggtcccagccctggagacttccgctactcagatgggacccctgtaaactacaccaactggtaccgaggggagcctgcaggtcggggaaaagagcagtgtgtggagatgtacacagatgggcagtggaatgacaggaactgcctgtactcccgactgaccatctgtgagttctgagaggcatttaggccatgggacagggaggatcctgtctggccttcagtttccatccccaggatccacttggtctgtgagatgctagaactccctttcaacagaattcacttgtggctattagagctggaggcacccttagccacttcattcccctgatgggccctgactcttccccataatcactgaccagccttgacactccccttgcaaaccatcccagcactgcaccccaggcagccactcctagccttggcctttggcatgagatggaggcctccttattccccatctggtccagttccttcacttacagatggcagcagtgaggccttggggtagaaggatcctccaaagtcacacagagtgcctgcctcctggtcccctcagctctgcctctgcagcccactgcctgcccagtgccatcaggatgagcagtaccggccaagcataatgacagagagaggcagatttcagggaagccctgactgtgtggagctaaggacacagtggagattctctggcactctgaggtctctgtggcaggcctggtcaggctctccaggtggtcagagggcccagtggtgccccagcacggtggtgcccaagccaaccctgtgactgacatgtacgattcactcctttgagtctttggatgccaactcagccccctgacctggaggcagccggccaaggcctctagggaagagccccccactgcagacatgacccgagtaactttctgctgatgaacaaatctgcaccccacttcagacctcggtgggcattcacaccaccccccatgccaccggctccactttccccttttattaatacattcacccagataatcattaaaattaacatgtgccaggtcttaggatgtgtcttggggtgggcacagtacccggtgactcttggggatatttatttattttccctgagcctatatcttcatctgtgaaatggggataaaaatacttgttgctgtcacaattattaccatctctccagctagcaaaattactaccagagccgttactacacacaaaggctattgaccgagcacataccatgtgccacacaccttgacaaaatcttttaatacagtttattatgtactattcaatctttacacaatgtcacgggaccagtattgtttacccaattttttataaggacactgaagcttagaggagtgaaatgttttgagtgttatttcagagagcaaatggcaaagactggatccaaacccatcttcctggacctgaagttcatgctcccagccaccccacccctgagctgaataaagatgatttaagcataaaaaaaaaaaaaaaaaaaaaaagattaaaaggaaaaagaactcaattacaaacaaaaaaaaaagggggggcggcgccctgaagaaattccccgaggagggcgcaacatgtttgcagctaccccaccgatgttgtgtgcaagaaggggggcccaaaaaggaggacgggttataatacacgaagcacgcggccgcgccgtaataacaaacgcgtgtgacagcgggaaaaaaagagcgctccgtcggggagcactcgggagaacggaacaccatactcaggggggcgggcgaaccactgtgcggcaacacaagcaccccagagaggatatagagccccaacaggcgaacgatatacaaagtcagggcgacatatcgtcgttcaaaccacaggaatataacgtgccggagaaaatgtgcccaccgagcagactgatcgacacactttttacgg

SEQ ID NO: 458483 - DNA, 2595 bp, Homo sapiens
gctctgaacttggaggcagagacccaagcagctggaggctctgtgtgtggcaggagcagcgactggacccagagccatgtggctgtgccctctggccctcaacctcatcttgatggcagcctctggtgctgcgtgcgaagtgaaggacgtttgtgttggaagccctggtatccccggcactcctggatcccacggcctgccaggcagggacgggagagatggtgtcaaaggagaccctggccctccaggccccatgggtccgcctggagaaacaccatgtcctcctgggaataatgggctgcctggagcccctggtgtccctggagagcgtggagagaagggggaggctggcgagagaggccctccagggcttccagctcatctagatgaggagctccaagccacactccacgacttcagacatcaaatcctgcagacaaggggagccctcagtctgcagggctccataatgacagtaggagagaaggtcttctccagcaatgggcagtccatcacttttgatgccattcaggaggcatgtgccagagcaggcggccgcattgctgtcccaaggaatccagaggaaaatgaggccattgcaagcttcgtgaagaagtacaacacatatgcctatgtaggcctgactgagggtcccagccctggagacttccgctactcagatgggacccctgtaaactacaccaactggtaccgaggggagcctgcaggtcggggaaaagagcagtgtgtggagatgtacacagatgggcagtggaatgacaggaactgcctgtactcccgactgaccatctgtgagttctgagaggcatttaggccatgggacagggaggatcctgtctggccttcagtttccatccccaggatccacttggtctgtgagatgctagaactccctttcaacagaattcacttgtggctattagagctggaggcacccttagccacttcattcccctgatgggccctgactcttccccataatcactgaccagccttgacactccccttgcaaaccatcccagcactgcaccccaggcagccactcctagccttggcctttggcatgagatggaggcctccttattccccatctggtccagttccttcacttacagatggcagcagtgaggccttggggtagaaggatcctccaaagtcacacagagtgcctgcctcctggtcccctcagctctgcctctgcagcccactgcctgcccagtgccatcaggatgagcagtaccggccaagcataatgacagagagaggcagatttcagggaagccctgactgtgtggagctaaggacacagtggagattctctggcactctgaggtctctgtggcaggcctggtcaggctctccaggtggtcagagggcccagtggtgccccagcacggtggtgcccaagccaaccctgtgactgacatgtacgattcactcctttgagtctttggatgccaactcagccccctgacctggaggcagccggccaaggcctctagggaagagccccccactgcagacatgacccgagtaactttctgctgatgaacaaatctgcaccccacttcagacctcggtgggcattcacaccaccccccatgccaccggctccactttccccttttattaatacattcacccagataatcattaaaattaacatgtgccaggtcttaggatgtgtcttggggtgggcacagtacccggtgactcttggggatatttatttattttccctgagcctatatcttcatctgtgaaatggggataaaaatacttgttgctgtcacaattattaccatctctccagctagcaaaattactaccagagccgttactacacacaaaggctattgaccgagcacataccatgtgccacacaccttgacaaaatcttttaatacagtttattatgtactattcaatctttacacaatgtcacgggaccagtattgtttacccaattttttataaggacactgaagcttagaggagtgaaatgttttgagtgttatttcagagagcaaatggcaaagactggatccaaacccatcttcctggacctgaagttcatgctcccagccaccccacccctgagctgaataaagatgatttaagcataaaaaaaaaaaaaaaaaaaaaaagattaaaaggaaaaagaactcaattacaaacaaaaaaaaaagggggggcggcgccctgaagaaattccccgaggagggcgcaacatgtttgcagctaccccaccgatgttgtgtgcaagaaggggggcccaaaaaggaggacgggttataatacacgaagcacgcggccgcgccgtaataacaaacgcgtgtgacagcgggaaaaaaagagcgctccgtcggggagcactcgggagaacggaacaccatactcaggggggcgggcgaaccactgtgcggcaacacaagcaccccagagaggatatagagccccaacaggcgaacgatatacaaagtcagggcgacatatcgtcgttcaaaccacaggaatataacgtgccggagaaaatgtgcccaccgagcagactgatcgacacactttttacgg

SEQ ID NO: 458484 - DNA, 1800 bp, Homo sapiens
gcgtctagaggatctccatctcaggcaggacgatctcaggccatgggacagggaggatcctgtctggccttcagtttccatccccaggatccacttggtctgtgagatgctagaactccctttcaacagaattcacttgtggctattagagctggaggcacccttagccacttcattcccctgatgggccctgactcttccccataatcactgaccagccttgacactccccttgcaaaccatcccagcactgcaccccaggcagccactcctagccttggcctttggcatgagatggaggcctccttattccccatctggtccagttccttcacttacagatggcagcagtgaggccttggggtagaaggatcctccaaagtcacacagagtgcctgcctcctggtcccctcagctctgcctctgcagcccactgcctgcccagtgccatcaggatgagcagtaccggccaagcataatgacagagagaggcagatttcagggaagccctgactgtgtggagctaaggacacagtggagattctctggcactctgaggtctctgtggcaggcctggtcaggctctccaggtggtcagagggcccagtggtgccccagcacggtggtgcccaagccaaccctgtgactgacatgtacgattcactcctttgagtctttggatgccaactcagccccctgacctggaggcagccggccaaggcctctagggaagagccccccactgcagacatgacccgagtaactttctgctgatgaacaaatctgcaccccacttcagacctcggtgggcattcacaccaccccccatgccaccggctccactttccccttttattaatacattcacccagataatcattaaaattaacatgtgccaggtcttaggatgtgtcttggggtgggcacagtacccggtgactcttggggatatttatttattttccctgagcctatatcttcatctgtgaaatggggataaaaatacttgttgctgtcacaattattaccatctctccagctagcaaaattactaccagagccgttactacacacaaaggctattgaccgagcacataccatgtgccacacaccttgacaaaatcttttaatacagtttattatgtactattcaatctttacacaatgtcacgggaccagtattgtttacccaattttttataaggacactgaagcttagaggagtgaaatgttttgagtgttatttcagagagcaaatggcaaagactggatccaaacccatcttcctggacctgaagttcatgctcccagccaccccacccctgagctgaataaagatgatttaagcataaaaaaaaaaaaaaaaaaaaaaagattaaaaggaaaaagaactcaattacaaacaaaaaaaaaagggggggcggcgccctgaagaaattccccgaggagggcgcaacatgtttgcagctaccccaccgatgttgtgtgcaagaaggggggcccaaaaaggaggacgggttataatacacgaagcacgcggccgcgccgtaataacaaacgcgtgtgacagcgggaaaaaaagagcgctccgtcggggagcactcgggagaacggaacaccatactcaggggggcgggcgaaccactgtgcggcaacacaagcaccccagagaggatatagagccccaacaggcgaacgatatacaaagtcagggcgacatatcgtcgttcaaaccacaggaatataacgtgccggagaaaatgtgcccaccgagcagactgatcgacacactttttacgg

SEQ ID NO: 458485 - DNA, 1881 bp, Homo sapiens
aggacagggaggatcctgtctggccttcagcctccatcctgaagctccacttggtttgtgagatgctgaaactccctttcaacagaattcacttgtggctattagagctggaggcacccttagctacttcattcccctgatgggccctgactcttccccataatcactgaccagccttgacactccccttgcaaaccctcccagcactgcaccccaggcagccactcctaacctttgcctttggcatgagatgcaaccctccttattctctatctggtccagttccttcacttacagatggtagcagtgaggtcttggggtagaaggaccctccgaagtcacacagagtgcctgcttcctggtgcccttagctctccctctgcagcccagtgccatcaggatgagcagtcccagccaagcataatgacagagagaggccttggggtagaaggatcctccaaagtcacacagagtgcctgcctcctggtcccctcagctctgcctctgcagcccactgcctgcccagtgccatcaggatgagcagtaccggccaagcataatgacagagagaggcagatttcagggaagccctgactgtgtggagctaaggacacagtggagattctctggcactctgaggtctctgtggcaggcctggtcaggctctccaggtggtcagagggcccagtggtgccccagcacggtggtgcccaagccaaccctgtgactgacatgtacgattcactcctttgagtctttggatgccaactcagccccctgacctggaggcagccggccaaggcctctagggaagagccccccactgcagacatgacccgagtaactttctgctgatgaacaaatctgcaccccacttcagacctcggtgggcattcacaccaccccccatgccaccggctccactttccccttttattaatacattcacccagataatcattaaaattaacatgtgccaggtcttaggatgtgtcttggggtgggcacagtacccggtgactcttggggatatttatttattttccctgagcctatatcttcatctgtgaaatggggataaaaatacttgttgctgtcacaattattaccatctctccagctagcaaaattactaccagagccgttactacacacaaaggctattgaccgagcacataccatgtgccacacaccttgacaaaatcttttaatacagtttattatgtactattcaatctttacacaatgtcacgggaccagtattgtttacccaattttttataaggacactgaagcttagaggagtgaaatgttttgagtgttatttcagagagcaaatggcaaagactggatccaaacccatcttcctggacctgaagttcatgctcccagccaccccacccctgagctgaataaagatgatttaagcataaaaaaaaaaaaaaaaaaaaaaagattaaaaggaaaaagaactcaattacaaacaaaaaaaaaagggggggcggcgccctgaagaaattccccgaggagggcgcaacatgtttgcagctaccccaccgatgttgtgtgcaagaaggggggcccaaaaaggaggacgggttataatacacgaagcacgcggccgcgccgtaataacaaacgcgtgtgacagcgggaaaaaaagagcgctccgtcggggagcactcgggagaacggaacaccatactcaggggggcgggcgaaccactgtgcggcaacacaagcaccccagagaggatatagagccccaacaggcgaacgatatacaaagtcagggcgacatatcgtcgttcaaaccacaggaatataacgtgccggagaaaatgtgcccaccgagcagactgatcgacacactttttacgg

SEQ ID NO: 458486 - DNA, 2166 bp, Homo sapiens
gctctgaacttggaggcagagacccaagcagctggaggctctgtgtgtgggtcgctgatttcttggagcctgaaaagaagcaggagcagcgactggacccagagccatgtggctgtgccctctggccctcaacctcatcttgatggcagcctctggtgctgcgtgcgaagtgaaggacgtttgtgttggaagccctggtatccccggcactcctggatcccacggcctgccaggcagggacgggagagatggtgtcaaaggagaccctggccctccaggccccatgggtccgcctggagaaacaccatgtcctcctgggaataatgggctgcctggagcccctggtgtccctggagagcgtggagagaagggggaggctggcgagagaggccctccagggcttccagctcatctagatgaggagctccaagccacactccacgacttcagacatcaaatcctgcagacaaggggagccctcagtctgcagggctccataatgacagtaggagagaaggtcttctccagcaatgggcagtccatcacttttgatgccattcaggaggcatgtgccagagcaggcggccgcattgctgtcccaaggaatccagaggaaaatgaggccattgcaagcttcgtgaagaagtacaacacatatgcctatgtaggcctgactgagggtcccagccctggagacttccgctactcagatgggacccctgtaaactacaccaactggtaccgaggggagcctgcaggtcggggaaaagagcagtgtgtggagatgtacacagatgggcagtggaatgacaggaactgcctgtactcccgactgaccatctgtgagttctgagaggcatttaggccatgggacagggaggatcctgtctggccttcagtttccatccccaggatccacttggtctgtgagatgctagaactccctttcaacagaattcacttgtggctattagagctggaggcacccttagccacttcattcccctgatgggccctgactcttccccataatcactgaccagccttgacactccccttgcaaaccatcccagcactgcaccccaggcagccactcctagccttggcctttggcatgagatggaggcctccttattccccatctggtccagttccttcacttacagatggcagcagtgaggccttggggtagaaggatcctccaaagtcacacagagtgcctgcctcctggtcccctcagctctgcctctgcagcccactgcctgcccagtgccatcaggatgagcagtaccggccaagcataatgacagagagaggcagatttcagggaagccctgactgtgtggagctaaggacacagtggagattctctggcactctgaggtctctgtggcaggcctggtcaggctctccaggtggtcagagggcccagtggtgccccagcacggtggtgcccaagccaaccctgtgactgacatgtacgattcactcctttgagtctttggatgccaactcagccccctgacctggaggcagccggccaaggcctctagggaagagccccccactgcagacatgacccgagtaactttctgctgatgaacaaatctgcaccccacttcagacctcggtgggcattcacaccaccccccatgccaccggctccactttccccttttattaatacattcacccagataatcattaaaattaacatgtgccaggtcttaggatgtgtcttggggtgggcacagtacccggtgactcttggggatatttatttattttccctgagcctatatcttcatctgtgaaatggggataaaaatacttgttgctgtcacaattattaccatctctccagctagcaaaattactaccagagccgttactacacacaaaggctattgaccgagcacataccatgtgccacacaccttgacaaaatcttttaatacagtttattatgtactattcaatctttacacaatgtcacgggaccagtattgtttacccaattttttataaggacactgaagcttagaggagtgaaatgttttgagtgttatttcagagagcaaatggcaaagactggatccaaacccatcttcctggacctgaagttcatgctcccagccaaccgtgacaagtgggccgagctgatat

SEQ ID NO: 458487 - DNA, 2375 bp, Homo sapiens
gctctgaacttggaggcagagacccaagcagctggaggctctgtgtgtgggtcgctgatttcttggagcctgaaaagaagcaggagcagcgactggacccagagccatgtggctgtgccctctggccctcaacctcatcttgatggcagcctctggtgctgcgtgcgaagtgaaggacgtttgtgttggaagccctggtatccccggcactcctggatcccacggcctgccaggcagggacgggagagatggtgtcaaaggagaccctggccctccaggccccatgggtccgcctggagaaacaccatgtcctcctgggaataatgggctgcctggagcccctggtgtccctggagagcgtggagagaagggggaggctggcgagagaggccctccagggcttccagctcatctagatgaggagctccaagccacactccacgacttcagacatcaaatcctgcagacaaggggagccctcagtctgcagggctccataatgacagtaggagagaaggtcttctccagcaatgggcagtccatcacttttgatgccattcaggaggcatgtgccagagcaggcggccgcattgctgtcccaaggaatccagaggaaaatgaggccattgcaagcttcgtgaagaagtacaacacatatgcctatgtaggcctgactgagggtcccagccctggagacttccgctactcagatgggacccctgtaaactacaccaactggtaccgaggggagcctgcaggtcggggaaaagagcagtgtgtggagatgtacacagatgggcagtggaatgacaggaactgcctgtactcccgactgaccatctgtgagttctgagaggcatttaggccatgggacagggaggatcctgtctggccttcagtttccatccccaggatccacttggtctgtgagatgctagaactccctttcaacagaattcacttgtggctattagagctggaggcacccttagccacttcattcccctgatgggccctgactcttccccataatcactgaccagccttgacactccccttgcaaaccatcccagcactgcaccccaggcagccactcctagccttggcctttggcatgagatggaggcctccttattccccatctggtccagttccttcacttacagatggcagcagtgaggccttggggtagaaggatcctccaaagtcacacagagtgcctgcctcctggtcccctcagctctgcctctgcagcccactgcctgcccagtgccatcaggatgagcagtaccggccaagcataatgacagagagaggcagatttcagggaagccctgactgtgtggagctaaggacacagtggagattctctggcactctgaggtctctgtggcaggcctggtcaggctctccaggtggtcagagggcccagtggtgccccagcacggtggtgcccaagccaaccctgtgactgacatgtacgattcactcctttgagtctttggatgccaactcagccccctgacctggaggcagccggccaaggcctctagggaagagccccccactgcagacatgacccgagtaactttctgctgatgaacaaatctgcaccccacttcagacctcggtgggcattcacaccaccccccatgccaccggctccactttccccttttattaatacattcacccagataatcattaaaatttattatgtactattcaatctttacacaatgtcacgggaccagtattgtttacccaattttttataaggacactgaagcttagaggagtgaaatgttttgagtgttatttcagagagcaaatggcaaagactggatccaaacccatcttcctggacctgaagttcatgctcccagccaccccacccctgagctgaataaagatgatttaagcataaaaaaaaaaaaaaaaaaaaaaagattaaaaggaaaaagaactcaattacaaacaaaaaaaaaagggggggcggcgccctgaagaaattccccgaggagggcgcaacatgtttgcagctaccccaccgatgttgtgtgcaagaaggggggcccaaaaaggaggacgggttataatacacgaagcacgcggccgcgccgtaataacaaacgcgtgtgacagcgggaaaaaaagagcgctccgtcggggagcactcgggagaacggaacaccatactcaggggggcgggcgaaccactgtgcggcaacacaagcaccccagagaggatatagagccccaacaggcgaacgatatacaaagtcagggcgacatatcgtcgttcaaaccacaggaatataacgtgccggagaaaatgtgcccaccgagcagactgatcgacacactttttacgg

SEQ ID NO: 458488 - DNA, 1822 bp, Homo sapiens
gctctgaacttggaggcagagacccaagcagctggaggctctgtgtgtgggtcgctgatttcttggagcctgaaaagaagcaggagcagcgactggacccagagccatgtggctgtgccctctggccctcaacctcatcttgatggcagcctctggtgctgcgtgcgaagtgaaggacgtttgtgttggaagccctggtatccccggcactcctggatcccacggcctgccaggcagggacgggagagatggtgtcaaaggagaccctggccctccaggccccatgggtccgcctggagaaacaccatgtcctcctgggaataatgggctgcctggagcccctggtgtccctggagagcgtggagagaagggggaggctggcgagagaggccctccagggcttccagctcatctagatgaggagctccaagccacactccacgacttcagacatcaaatcctgcagacaaggggagccctcagtctgcagggctccataatgacagtaggagagaaggtcttctccagcaatgggcagtccatcacttttgatgccattcaggaggcatgtgccagagcaggcggccgcattgctgtcccaaggaatccagaggaaaatgaggccattgcaagcttcgtgaagaagtacaacacatatgcctatgtaggcctgactgagggtcccagccctggagacttccgctactcagatgggacccctgtaaactacaccaactggtaccgaggggagcctgcaggtcggggaaaagagcagtgtgtggagatgtacacagatgggcagtggaatgacaggaactgcctgtactcccgactgaccatctgtgagttctgagaggcatttaggccatgggacagggaggatcctgtctggccttcagtttccatccccaggatccacttggtctgtgagatgctagaactccctttcaacagaattcacttgtggctattagagctggaggcacccttagccacttcattcccctgatgggccctgactcttccccataatcactgaccagccttgacactccccttgcaaaccatcccagcactgcaccccaggcagccactcctagccttggcctttggcatgagatggaggcctccttattccccatctggtccagttccttcacttacagatggcagcagtgaggccttggggtagaaggatcctccaaagtcacacagagtgcctgcctcctggtcccctcagctctgcctctgcagcccactgcctgcccagtgccatcaggatgagcagtaccggccaagcataatgacagagagaggcagatttcagggaagccctgactgtgtggagctaaggacacagtggagattctctggcactctgaggtctctgtggcaggcctggtcaggctctccaggtggtcagagggcccagtggtgccccagcacggtggtgcccaagccaaccctgtgactgacatgtacgattcactcctttgagtctttggatgccaactcagccccctgacctggaggcagccggccaaggcctctagggaagagccccccactgcagacatgacccgagtaactttctgctgatgaacaaatctgcaccccacttcagacctcggtgggcattcacaccaccccccatgccaccggctccactttccccttttattaatacattcacccagataatcattaaaattaacatgtgccaggtcttaggatgtgtcttggggtgggcacagtacccggtgatctgtgctacggagaatactctagattctacctacgaagcatgccagctttgcccaac

SEQ ID NO: 458489 - DNA, 770 bp, Homo sapiens
cagagacccaagcagctggaggctctgtgtgtgggtgagtttagccacatcccctaggtgttctccagcttgaggatcgcaggcagagaggaccagcccagcagccacaggcctgaccaaggcccaggttgggaaggagggcaactccccattttccactgggaggtgtttcacagcatggtcaacatggatgacctacaaagaccctcatgctttgatatcttccttggccagatccatccctaccagggactcagcagggcctaagcagggggagtgggagaacagaccccaagaggaaggaagacctcatcactgactgtgagagggtcatcaccccccgatgatcaccttgaagggtccaggctgtgggccctattcatctcttttcattctcaggtcgctgatttcttggagcctgaaaagaaggtaactgggcatatgagggacagatggagtgagtcagtgagtgagtgacctcatccttccttctaacagcctgggagggacagggcaggttttctgcagagcatggaagattcagctgaaatcagagaggtgaagccagtttcccagggtaacatagtgaggcactgaaagaaaggagactgcactggagcccaggtccctgggctccccagagctccttactcttcctcctcctcagcagtcttgagaccccacaacctccagccggaggcctgaagcatgaggccatgccaggtgccaggtgatgcttggaattttcccgggtgcttcgggtcttccca

SEQ ID NO: 458490 - DNA, 2625 bp, Homo sapiens
gctctgaacttggaggcagagacccaagcagctggaggctctgtgtgtgggtcgctgatttcttggagcctgaaaagaagcaggagcagcgactggacccagagccatgtggctgtgccctctggccctcaacctcatcttgatggcagcctctggtgctgcgtgcgaagtgaaggacgtttgtgttggaagccctggtatccccggcactcctggatcccacggcctgccaggcagggacgggagagatggtgtcaaaggagaccctggccctccaggccccatgggtccgcctggagaaacaccatgtcctcctgggaataatgggctgcctggagcccctggtgtccctggagagcgtggagagaagggggaggctggcgagagaggccctccagggcttccagctcatctagatgaggagctccaagccacactccacgacttcagacatcaaatcctgcagacaaggggagccctcagtctgcagggctccataatgacagtaggagagaaggtcttctccagcaatgggcagtccatcacttttgatgccattcaggaggcatgtgccagagcaggcggccgcattgctgtcccaaggaatccagaggaaaatgaggccattgcaagcttcgtgaagaagtacaacacatatgcctatgtaggcctgactgagggtcccagccctggagacttccgctactcagatgggacccctgtaaactacaccaactggtaccgaggggagcctgcaggtcggggaaaagagcagtgtgtggagatgtacacagatgggcagtggaatgacaggaactgcctgtactcccgactgaccatctgtgagttctgagaggcatttaggccatgggacagggaggatcctgtctggccttcagtttccatccccaggatccacttggtctgtgagatgctagaactccctttcaacagaattcacttgtggctattagagctggaggcacccttagccacttcattcccctgatgggccctgactcttccccataatcactgaccagccttgacactccccttgcaaaccatcccagcactgcaccccaggcagccactcctagccttggcctttggcatgagatggaggcctccttattccccatctggtccagttccttcacttacagatggcagcagtgaggccttggggtagaaggatcctccaaagtcacacagagtgcctgcctcctggtcccctcagctctgcctctgcagcccactgcctgcccagtgccatcaggatgagcagtaccggccaagcataatgacagagagaggcagatttcagggaagccctgactgtgtggagctaaggacacagtggagattctctggcactctgaggtctctgtggcaggcctggtcaggctctccaggtggtcagagggcccagtggtgccccagcacggtggtgcccaagccaaccctgtgactgacatgtacgattcactcctttgagtctttggatgccaactcagccccctgacctggaggcagccggccaaggcctctagggaagagccccccactgcagacatgacccgagtaactttctgctgatgaacaaatctgcaccccacttcagacctcggtgggcattcacaccaccccccatgccaccggctccactttccccttttattaatacattcacccagataatcattaaaattaacatgtgccaggtcttaggatgtgtcttggggtgggcacagtacccggtgactcttggggatatttatttattttccctgagcctatatcttcatctgtgaaatggggataaaaatacttgttgctgtcacaattattaccatctctccagctagcaaaattactaccagagccgttactacacacaaaggctattgaccgagcacataccatgtgccacacaccttgacaaaatcttttaatacagtttattatgtactattcaatctttacacaatgtcacgggaccagtattgtttacccaattttttataaggacactgaagcttagaggagtgaaatgttttgagtgttatttcagagagcaaatggcaaagactggatccaaacccatcttcctggacctgaagttcatgctcccagccaccccacccctgagctgaataaagatgatttaagcataaaaaaaaaaaaaaaaaaaaaaagattaaaaggaaaaagaactcaattacaaacaaaaaaaaaagggggggcggcgccctgaagaaattccccgaggagggcgcaacatgtttgcagctaccccaccgatgttgtgtgcaagaaggggggcccaaaaaggaggacgggttataatacacgaagcacgcggccgcgccgtaataacaaacgcgtgtgacagcgggaaaaaaagagcgctccgtcggggagcactcgggagaacggaacaccatactcaggggggcgggcgaaccactgtgcggcaacacaagcaccccagagaggatatagagccccaacaggcgaacgatatacaaagtcagggcgacatatcgtcgttcaaaccacaggaatataacgtgccggagaaaatgtgcccaccgagcagactgatcgacacactttttacgg

SEQ ID NO: 458491 - DNA, 2572 bp, Homo sapiens
gctctgaacttggaggcagagacccaagcagctggaggctctgtgtgtgggtcgctgatttcttggagcctgaaaagaagcaggagcagcgactggacccagagccatgtggctgtgccctctggccctcaacctcatcttgatggcagcctctggtgctgcgtgcgaagtgaaggacgtttgtgttggaagccctggtatccccggcactcctggatcccacggcctgccaggcagggacgggagagatggtgtcaaaggagaccctggccctccaggccccatgggtccgcctggagaaacaccatgtcctcctgggaataatgggctgcctggagcccctggtgtccctggagagcgtggagagaagggggaggctggcgagagaggccctccagggcttccagctcatctagatgaggagctccaagccacactccacgacttcagacatcaaatcctgcagacaaggggagccctcagtctgcagggctccataatgacagtaggagagaaggtcttctccagcaatgggcagtccatcacttttgatgccattcaggaggcatgtgccagagcaggcggccgcattgctgtcccaaggaatccagaggaaaatgaggccattgcaagcttcgtgaagaagtacaacacatatgcctatgtaggcctgactgagggtcccagccctggagacttccgctactcagatgggacccctgtaaactacaccaactggtaccgaggggagcctgcaggtcggggaaaagagcagtgtgtggagatgtacacagatgggcagtggaatgacaggaactgcctgtactcccgactgaccatctgtgagttctgagaggcatttaggccatgggacagggaggatcctgtctggccttcagtttccatccccaggatccacttggtctgtgagatgctagaactccctttcaacagaattcacttgtggctattagagctggaggcacccttagccacttcattcccctgatgggccctgactcttccccataatcactgaccagccttgacactccccttgcaaaccatcccagcactgcaccccaggcagccactcctagccttggcctttggcatgagatggaggcctccttattccccatctggtccagttccttcacttacagatggcagcagtgaggccttggggtagaaggatcctccaaagtcacacagagtgccatcaggatgagcagtaccggccaagcataatgacagagagaggcagatttcagggaagccctgactgtgtggagctaaggacacagtggagattctctggcactctgaggtctctgtggcaggcctggtcaggctctccaggtggtcagagggcccagtggtgccccagcacggtggtgcccaagccaaccctgtgactgacatgtacgattcactcctttgagtctttggatgccaactcagccccctgacctggaggcagccggccaaggcctctagggaagagccccccactgcagacatgacccgagtaactttctgctgatgaacaaatctgcaccccacttcagacctcggtgggcattcacaccaccccccatgccaccggctccactttccccttttattaatacattcacccagataatcattaaaattaacatgtgccaggtcttaggatgtgtcttggggtgggcacagtacccggtgactcttggggatatttatttattttccctgagcctatatcttcatctgtgaaatggggataaaaatacttgttgctgtcacaattattaccatctctccagctagcaaaattactaccagagccgttactacacacaaaggctattgaccgagcacataccatgtgccacacaccttgacaaaatcttttaatacagtttattatgtactattcaatctttacacaatgtcacgggaccagtattgtttacccaattttttataaggacactgaagcttagaggagtgaaatgttttgagtgttatttcagagagcaaatggcaaagactggatccaaacccatcttcctggacctgaagttcatgctcccagccaccccacccctgagctgaataaagatgatttaagcataaaaaaaaaaaaaaaaaaaaaaagattaaaaggaaaaagaactcaattacaaacaaaaaaaaaagggggggcggcgccctgaagaaattccccgaggagggcgcaacatgtttgcagctaccccaccgatgttgtgtgcaagaaggggggcccaaaaaggaggacgggttataatacacgaagcacgcggccgcgccgtaataacaaacgcgtgtgacagcgggaaaaaaagagcgctccgtcggggagcactcgggagaacggaacaccatactcaggggggcgggcgaaccactgtgcggcaacacaagcaccccagagaggatatagagccccaacaggcgaacgatatacaaagtcagggcgacatatcgtcgttcaaaccacaggaatataacgtgccggagaaaatgtgcccaccgagcagactgatcgacacactttttacgg

SEQ ID NO: 458492 - DNA, 2718 bp, Homo sapiens
gctctgaacttggaggcagagacccaagcagctggaggctctgtgtgtgggtgagtttagccacatcccctaggtgttctccagcttgaggatcgcaggcagagaggaccagcccagcagccacaggcctgaccaaggcccaggtcgctgatttcttggagcctgaaaagaagcaggagcagcgactggacccagagccatgtggctgtgccctctggccctcaacctcatcttgatggcagcctctggtgctgcgtgcgaagtgaaggacgtttgtgttggaagccctggtatccccggcactcctggatcccacggcctgccaggcagggacgggagagatggtgtcaaaggagaccctggccctccaggccccatgggtccgcctggagaaacaccatgtcctcctgggaataatgggctgcctggagcccctggtgtccctggagagcgtggagagaagggggaggctggcgagagaggccctccagggcttccagctcatctagatgaggagctccaagccacactccacgacttcagacatcaaatcctgcagacaaggggagccctcagtctgcagggctccataatgacagtaggagagaaggtcttctccagcaatgggcagtccatcacttttgatgccattcaggaggcatgtgccagagcaggcggccgcattgctgtcccaaggaatccagaggaaaatgaggccattgcaagcttcgtgaagaagtacaacacatatgcctatgtaggcctgactgagggtcccagccctggagacttccgctactcagatgggacccctgtaaactacaccaactggtaccgaggggagcctgcaggtcggggaaaagagcagtgtgtggagatgtacacagatgggcagtggaatgacaggaactgcctgtactcccgactgaccatctgtgagttctgagaggcatttaggccatgggacagggaggatcctgtctggccttcagtttccatccccaggatccacttggtctgtgagatgctagaactccctttcaacagaattcacttgtggctattagagctggaggcacccttagccacttcattcccctgatgggccctgactcttccccataatcactgaccagccttgacactccccttgcaaaccatcccagcactgcaccccaggcagccactcctagccttggcctttggcatgagatggaggcctccttattccccatctggtccagttccttcacttacagatggcagcagtgaggccttggggtagaaggatcctccaaagtcacacagagtgcctgcctcctggtcccctcagctctgcctctgcagcccactgcctgcccagtgccatcaggatgagcagtaccggccaagcataatgacagagagaggcagatttcagggaagccctgactgtgtggagctaaggacacagtggagattctctggcactctgaggtctctgtggcaggcctggtcaggctctccaggtggtcagagggcccagtggtgccccagcacggtggtgcccaagccaaccctgtgactgacatgtacgattcactcctttgagtctttggatgccaactcagccccctgacctggaggcagccggccaaggcctctagggaagagccccccactgcagacatgacccgagtaactttctgctgatgaacaaatctgcaccccacttcagacctcggtgggcattcacaccaccccccatgccaccggctccactttccccttttattaatacattcacccagataatcattaaaattaacatgtgccaggtcttaggatgtgtcttggggtgggcacagtacccggtgactcttggggatatttatttattttccctgagcctatatcttcatctgtgaaatggggataaaaatacttgttgctgtcacaattattaccatctctccagctagcaaaattactaccagagccgttactacacacaaaggctattgaccgagcacataccatgtgccacacaccttgacaaaatcttttaatacagtttattatgtactattcaatctttacacaatgtcacgggaccagtattgtttacccaattttttataaggacactgaagcttagaggagtgaaatgttttgagtgttatttcagagagcaaatggcaaagactggatccaaacccatcttcctggacctgaagttcatgctcccagccaccccacccctgagctgaataaagatgatttaagcataaaaaaaaaaaaaaaaaaaaaaagattaaaaggaaaaagaactcaattacaaacaaaaaaaaaagggggggcggcgccctgaagaaattccccgaggagggcgcaacatgtttgcagctaccccaccgatgttgtgtgcaagaaggggggcccaaaaaggaggacgggttataatacacgaagcacgcggccgcgccgtaataacaaacgcgtgtgacagcgggaaaaaaagagcgctccgtcggggagcactcgggagaacggaacaccatactcaggggggcgggcgaaccactgtgcggcaacacaagcaccccagagaggatatagagccccaacaggcgaacgatatacaaagtcagggcgacatatcgtcgttcaaaccacaggaatataacgtgccggagaaaatgtgcccaccgagcagactgatcgacacactttttacgg

SEQ ID NO: 458493 - DNA, 2668 bp, Homo sapiens
  misc_feature (1563)..(1563): n is a, c, g, or t
gctctgaacttggaggcagagacccaagcagctggaggctctgtgtgtgggtcgctgatttcttggagcctgaaaagaagcaggagcagcgactggacccagagccatgtggctgtgccctctggccctcaacctcatcttgatggcagcctctggtgctgcgtgcgaagtgaaggacgtttgtgttggaagccctggtatccccggcactcctggatcccacggcctgccaggcagggacgggagagatggtgtcaaaggagaccctggccctccaggccccatgggtccgcctggagaaacaccatgtcctcctgggaataatgggctgcctggagcccctggtgtccctggagagcgtggagagaagggggaggctggcgagagaggccctccagggcttccagctcatctagatgaggagctccaagccacactccacgacttcagacatcaaatcctgcagacaaggggagccctcagtctgcagggctccataatgacagtaggagagaaggtcttctccagcaatgggcagtccatcacttttgatgccattcaggaggcatgtgccagagcaggcggccgcattgctgtcccaaggaatccagaggaaaatgaggccattgcaagcttcgtgaagaagtacaacacatatgcctatgtaggcctgactgagggtcccagccctggagacttccgctactcagatgggacccctgtaaactacaccaactggtaccgaggggagcctgcaggtcggggaaaagagcagtgtgtggagatgtacacagatgggcagtggaatgacaggaactgcctgtactcccgactgaccatctgtgagttctgagaggcatttaggccatgggacagggaggatcctgtctggccttcagtttccatccccaggatccacttggtctgtgagatgctagaactccctttcaacagaattcacttgtggctattagagctggaggcacccttagccacttcattcccctgatgggccctgactcttccccataatcactgaccagccttgacactccccttgcaaaccatcccagcactgcaccccaggcagccactcctagccttggcctttggcatgagatggaggcctccttattccccatctggtccagttccttcacttacagatggcagcagtgaggccttggggtagaaggatcctccaaagtcacacagagtgcctgcctcctggtcccctcagctctgcctctgcagcccactgcctgcccagtgccatcaggatgagcagtaccggccaagcataatgacagagagaggcagatttcagggaagccctgactgtgtggagctaaggacacagtggagattctctggcactctgaggtctctgtggcaggcctggtcaggctctccaggtggtcagagggcccagtggtgccccagcacggtggtgcccaagccaaccctgtgactgacatgtacgattcactcctttgagtctttggatgccaactcagccccctgacctggaggcagccggccaaggcctctagggaagagccncctgacctggaggcagccggccaaggcctctagggaagagccccccactgcagacatgacccgagtaactttctgctgatgaacaaatctgcaccccacttcagacctcggtgggcattcacaccaccccccatgccaccggctccactttccccttttattaatacattcacccagataatcattaaaattaacatgtgccaggtcttaggatgtgtcttggggtgggcacagtacccggtgactcttggggatatttatttattttccctgagcctatatcttcatctgtgaaatggggataaaaatacttgttgctgtcacaattattaccatctctccagctagcaaaattactaccagagccgttactacacacaaaggctattgaccgagcacataccatgtgccacacaccttgacaaaatcttttaatacagtttattatgtactattcaatctttacacaatgtcacgggaccagtattgtttacccaattttttataaggacactgaagcttagaggagtgaaatgttttgagtgttatttcagagagcaaatggcaaagactggatccaaacccatcttcctggacctgaagttcatgctcccagccaccccacccctgagctgaataaagatgatttaagcataaaaaaaaaaaaaaaaaaaaaaagattaaaaggaaaaagaactcaattacaaacaaaaaaaaaagggggggcggcgccctgaagaaattccccgaggagggcgcaacatgtttgcagctaccccaccgatgttgtgtgcaagaaggggggcccaaaaaggaggacgggttataatacacgaagcacgcggccgcgccgtaataacaaacgcgtgtgacagcgggaaaaaaagagcgctccgtcggggagcactcgggagaacggaacaccatactcaggggggcgggcgaaccactgtgcggcaacacaagcaccccagagaggatatagagccccaacaggcgaacgatatacaaagtcagggcgacatatcgtcgttcaaaccacaggaatataacgtgccggagaaaatgtgcccaccgagcagactgatcgacacactttttacgg

SEQ ID NO: 458494 - DNA, 2018 bp, Homo sapiens
gctctgaacttggaggcagagacccaagcagctggaggctctgtgtgtgggtcgctgatttcttggagcctgaaaagaagcaggagcagcgactggacccagagccatgtggctgtgccctctggccctcaacctcatcttgatggcagcctctggtgctgcgtgcgaagtgaaggacgtttgtgttggaagccctggtatccccggcactcctggatcccacggcctgccaggcagggacgggagagatggtgtcaaaggagaccctggccctccaggccccatgggtccgcctggagaaacaccatgtcctcctgggaataatgggctgcctggagcccctggtgtccctggagagcgtggagagaagggggaggctggcgagagaggccctccagggcttccagctcatctagatgaggagctccaagccacactccacgacttcagacatcaaatcctgcagacaaggggagccctcagtctgcagggctccataatgacagtaggagagaaggtcttctccagcaatgggcagtccatcacttttgatgccattcaggaggcatgtgccagagcaggcggccgcattgctgtcccaaggaatccagaggaaaatgaggccattgcaagcttcgtgaagaagtacaacacatatgcctatgtaggcctgactgagggtcccagccctggagacttccgctactcagatgggacccctgtaaactacaccaactggtaccgaggggagcctgcaggtcggggaaaagagcagtgtgtggagatgtacacagatgggcagtggaatgacaggaactgcctgtactcccgactgaccatctgtgagttctgagaggcatttaggccatgggacagggaggatcctgtctggccttcagtttccatccccaggatccacttggtctgtgagatgctagaactccctttcaacagaattcacttgtggctattagagctggaggcacccttagccacttcattcccctgatgggccctgactcttccccataatcactgaccagccttgacactccccttgcaaaccatcccagcactgcaccccaggcagccactcctagccttggcctttggcatgagatggaggcctccttattccccatctggtccagttccttcacttacagatggcagcagtgaggccttggggtagaaggatcctccaaagtcacacagagtgcctgcctcctggtcccctcagctctgcctctgcagcccactgcctgcccagtgccatcaggatgagcagtaccggccaagcataatgacagagagaggcagatttcagggaagccctgactgtgtggagctaaggacacagtggagattctctggcactctgaggtctctgtggcaggcctggtcaggctctccaggtggtcagagggcccagtggtgccccagcacggtggtgcccaagccaaccctgtgactgacatgtacgattcactcctttgagtctttggatgccaactcagccccctgacctggaggcagccggccaaggcctctagggaagagccccccactgcagacatgacccgagtaactttctgctgatgaacaaatctgcaccccacttcagacctcggtgggcattcacaccaccccccatgccaccggctccactttccccttttattaatacattcacccagataatcattaaaattaacatgtgccaggtcttaggatgtgtcttggggtgggcacagtacccggtgactcttggggatatttatttattttccctgagcctatatcttcatctgtgaaatggggataaaaatacttgttgctgtcacaattattaccatctctccagctagcaaaattactaccagagccgttactacacacaaaggctattgaccgagcacataccatgtgccacacaccttgacaaaatcttttaatacagtttattatgtactattcaatctttacacattccacagggggccggtaccgagctgata

SEQ ID NO: 458495 - DNA, 1062 bp, Homo sapiens
gctctgaacttggaggcagagacccaagcagctggaggctctgtgtgtgggtcgctgatttcttggagcctgaaaagaagcaggagcagcgactggacccagagccatgtggctgtgccctctggccctcaacctcatcttgatggcagcctctggtgctgcgtgcgaagtgaaggacgtttgtgttggaagccctggtatccccggcactcctggatcccacggcctgccaggcagggacgggagagatggtgtcaaaggagaccctggccctccaggccccatgggtccgcctggagaaacaccatgtcctcctgggaataatgggctgcctggagcccctggtgtccctggagagcgtggagagaagggggaggctggcgagagaggccctccagggcttccagctcatctagatgaggagctccaagccacactccacgacttcagacatcaaatcctgcagacaaggggagccctcagtctgcagggctccataatgacagtaggagagaaggtcttctccagcaatgggcagtccatcacttttgatgccattcaggaggcatgtgccagagcaggcggccgcattgctgtcccaaggaatccagaggaaaatgaggccattgcaagcttcgtgaagaagtacaacacatatgcctatgtaggcctgactgagggtcccagccctggagacttccgctactcagatgggacccctgtaaactacaccaactggtaccgaggggagcctgcaggtcggggaaaagagcagtgtgtggagatgtacacagatgggcagtggaatgacaggaactgcctgtactcccgactgaccatctgtgagttctgagaggcatttaggccatgggacagggaggatcctgtctggccttcagtttccatccccaggatccacttggtctgtgagatgctagaactccctttcaacagaattcacttgtggctattagagctggaggcacccttagccacttcattccccttttccagactggtgtcactcaggaatcaactagaccatatacgatcactgcccta

SEQ ID NO: 458496 - DNA, 550 bp, Homo sapiens
ggcgccagaggaccccgatatttgtggttctggccatagatgaatacacgggtaaaacttctacaggcacggtatatgttagagtacccgatttcaatgacaattgtccaacagctgtcctcgaaaaagatgcagtttgcagttcttcaccttccggggttgtctccgctagaacactgaataatagatacactggcccctatacatttgcactggaagatcaacctgtaaagttgcctgccgtatggagtatcacaaccctcaatgctacctcggccctcctcagagcccaggaacagatacctcctggagtataccacatctccctggtacttacagacagccagaaccacaaatatcggcgctaacattactgcaggccacctactcatgcacctaattggaagcgccaccctagcaatatcaaccattaaccttccctctacacttatcatcttcacaattctaattctactgactatcctagaaatcgctgtcgccttaatccaagcctacgttttcacacttctagtaagcctctacccgccaa

SEQ ID NO: 458497 - DNA, 353 bp, Homo sapiens
ttttcttagacattaactgcagacggctggcaggatagaagcagcggctcacttggactttttcaccagggaaatcagagacaatgatggggctcttccccagaactacaggggctctggccatcttcgtggtggtcatattggttcatggagaattgcgaatagagactaaaggtcaatatgatgaagaagagatgactatgcaacaagctaaaagaaggcaaaaacgtgaatgggtgaaatttgccaaaccctgcagagaaggagaagataactcaaaaagaaacccaattgccaagattacttcagattaccaagcaacccagaaaatctacagtgggcggggccgagcc

SEQ ID NO: 458498 - DNA, 5535 bp, Homo sapiens
ttttcttagacattaactgcagacggctggcaggatagaagcagcggctcacttggactttttcaccagggaaatcagagacaatgatggggctcttccccagaactacaggggctctggccatcttcgtggtggtcatattggttcatggagaattgcgaatagagactaaaggtcaatatgatgaagaagagatgactatgcaacaagctaaaagaaggcaaaaacgtgaatgggtgaaatttgccaaaccctgcagagaaggagaagataactcaaaaagaaacccaattgccaagattacttcagattaccaagcaacccagaaaatcacctaccgaatctctggagtgggaatcgatcagccgccttttggaatctttgttgttgacaaaaacactggagatattaacataacagctatagtcgaccgggaggaaactccaagcttcctgatcacatgtcgggctctaaatgcccaaggactagatgtagagaaaccacttatactaacggttaaaattttggatattaatgataatcctccagtattttcacaacaaattttcatgggtgaaattgaagaaaatagtgcctcaaactcactggtgatgatactaaatgccacagatgcagatgaaccaaaccacttgaattctaaaattgccttcaaaattgtctctcaggaaccagcaggcacacccatgttcctcctaagcagaaacactggggaagtccgtactttgaccaattctcttgaccgagagcaagctagcagctatcgtctggttgtgagtggtgcagacaaagatggagaaggactatcaactcaatgtgaatgtaatattaaagtgaaagatgtcaacgataacttcccaatgtttagagactctcagtattcagcacgtattgaagaaaatattttaagttctgaattacttcgatttcaagtaacagatttggatgaagagtacacagataattggcttgcagtatatttctttacctctgggaatgaaggaaattggtttgaaatacaaactgatcctagaactaatgaaggcatcctgaaagtggtgaaggctctagattatgaacaactacaaagcgtgaaacttagtattgctgtcaaaaacaaagctgaatttcaccaatcagttatctctcgataccgagttcagtcaaccccagtcacaattcaggtaataaatgtaagagaaggaattgcattccgtcctgcttccaagacatttactgtgcaaaaaggcataagtagcaaaaaattggtggattatatcctgggaacatatcaagccatcgatgaggacactaacaaagctgcctcaaatgtcaaatatgtcatgggacgtaacgatggtggatacctaatgattgattcaaaaactgctgaaatcaaatttgtcaaaaatatgaaccgagattctactttcatagttaacaaaacaatcacagctgaggttctggccatagatgaatacacgggtaaaacttctacaggcacggtatatgttagagtacccgatttcaatgacaattgtccaacagctgtcctcgaaaaagatgcagtttgcagttcttcaccttccggggttgtctccgctagaacactgaataatagatacactggcccctatacatttgcactggaagatcaacctgtaaagttgcctgccgtatggagtatcacaaccctcaatgctacctcggccctcctcagagcccaggaacagatacctcctggagtataccacatctccctggtacttacagacagccagaacaatcggtgtgagatgccacgcagcttgacactggaagtctgtcagtgtgacaacaggggcatctgtggaacttcttacccaaccacaagccctgggaccaggtatggcaggccgcactcagggaggctggggcctgccgccatcggcctgctgctccttggtctcctgctgctgctgttggccccccttctgctgttgacctgtgactgtggggcaggttctactgggggagtgacaggtggttttatcccagttcctgatggctcagaaggaacaattcatcagtggggaattgaaggagcccatcctgaagacaaggaaatcacaaatatttgtgtgcctcctgtaacagccaatggagccgatttcatggaaagttctgaagtttgtacaaatacgtatgccagaggcacagcggtggaaggcacttcaggaatggaaatgaccactaagcttggagcagccactgaatctggaggtgctgcaggctttgcaacagggacagtgtcaggagctgcttcaggattcggagcagccactggagttggcatctgttcctcagggcagtctggaaccatgagaacaaggcattccactggaggaaccaataaggactacgctgatggggcgataagcatgaattttctggactcctacttttctcagaaagcatttgcctgtgcggaggaagacgatggccaggaagcaaatgactgcttgttgatctatgataatgaaggcgcagatgccactggttctcctgtgggctccgtgggttgttgcagttttattgctgatgacctggatgacagcttcttggactcacttggacccaaatttaaaaaacttgcagagataagccttggtgttgatggtgaaggcaaagaagttcagccaccctctaaagacagcggttatgggattgaatcctgtggccatcccatagaagtccagcagacaggatttgttaagtgccagactttgtcaggaagtcaaggagcttctgctttgtccgcctctgggtctgtccagccagctgtttccatccctgaccctctgcagcatggtaactatttagtaacggagacttactcggcttctggttccctcgtgcaaccttccactgcaggctttgatccacttctcacacaaaatgtgatagtgacagaaagggtgatctgtcccatttccagtgttcctggcaacctagctggcccaacgcagctacgagggtcacatactatgctctgtacagaggatccttgctcccgtctaatatgaccagaatgagctggaataccacactgaccaaatctggatctttggactaaagtattcaaaatagcatagcaaagctcactgtattgggctaataatttggcacttattagcttctctcataaactgatcacgattataaattaaatgtttgggttcataccccaaaagcaatatgttgtcactcctaattctcaagtactattcaaattgtagtaaatcttaaagtttttcaaaaccctaaaatcatattcgccaggaaattttcctaaacattcttaagcttctatttttcccctgccaaaggaaggtgtttatcattttaaaatgcaatgtgatttagtggattaagcaggagcgctggttcttgtctccattgccttttcttatatcattgataatgatgtaagaatcacaaggggccgggcgcggtggctcacgcctgtaatcccagcactttgggaggccgaggcaggtggatcatgaggtcaggagatcgagaccatcctggctaacaaggtgaaaccccgtctctactaaaaatacaaaaaattagccgggcgcagtggcgggcgcctgtagtcccagctactcgggaggctgaggcaggagaatggcatgaacccgggaagcggagcttgcagtgagccgagattgcgccactgcagtccgcagtccggcctgggcgacagagcgagactccgtctcaaaaaaaaaaaaaaaaaaagaatcacaaggtatttgctaaagcattttgagctgcttggaaaaagggaagtagttgcagtagagtttcttccatcttcttggtgctgggaagccatatatgtgtcttttactcaagctaaggggtataagcttatgtgttgaatttgctacatctatatttcacatattctcacaataagagaattttgaaatagaaatatcatagaacatttaagaaagtttagtataaataatattttgtgtgttttaatccctttgaagggatctatccaaagaaaatattttacactgagctccttcctacacgtctcagtaacagatcctgtgttagtctttgaaaatagctcattttttaaatgtcagtgagtagatgtagcatacatatgatgtataatgacgtgtattatgttaacaatgtctgcagattttgtaggaatacaaaacatggccttttttataagcaaaacgggccaatgactagaataacacatagggcaatctgtgaatatgtattataagcagcattccagaaaagtagttggtgaaataattttcaagtcaaaaagggatatggaaagggaattatgagtaacctctattttttaagccttgcttttaaattaaacagctacagccatttaagccttgaggataataaagcttgagagtaataatgttaggttagcaaaggtttagatgtatcacttcatgcatgctaccatgatagtaatgcagctcttcgagtcatttctggtcattcaagatattcacccttttgcccatagaaagcaccctacctcacctgcttactgacattgtcttagctgatcacaagatcattatcagcctccattattccttactgtatataaaatacagagttttatattttcctttcttcgtttttcaccatattcaaaacctaaatttgtttttgcagatggaatgcaaagtaatcaagtgtttgtgctttcacctagaagggtgtggtcctgaaggaaagaggtcccctaaatatcccccaccctggtgctcctccctctccctggtaccctgactaccaggaagtcaggtgctagagcagctggagaagtgcaggcagcctgtgcttccacagatgggggtgctgctgcaacaaggctttcaatgtgcccatcttaggtgggagaagctagatcctgtgcagcagcctggtaagtcctgaggaggttccattgctcttcctgctgctgtcctttgcttctcaacggtggctcgctctacagtctagagcacatgcagctaacttgtgcctctgcttatgcatgagggttaaattaacaaccataaccttcatttgaagttcaaaggtgtattcaggatcctcaaagcattttaaccttgccgcttaaaacccaatttaccgtgaaatgggaattttgctgcattgttaaactgtagtggaaaccatgctatagtaataaaggttatataagagagaaattgaaattaaatgtgtttttaaatttcaaaaaaaaatcaatctttaggatgacttaaaaattgatttgccatgtaaaatgtatctgcattttttacacaaaacttgttttaagcataaaattttaaaactgtactacttgatgtattatacattttgaaccatatgtattaaaccataaacagtataatgttgttataataaaacaggcaataaatttataaataaaagctgaactactctcta

SEQ ID NO: 458499 - DNA, 3477 bp, Homo sapiens
ttttcttagacattaactgcagacggctggcaggatagaagcagcggctcacttggactttttcaccagggaaatcagagacaatgatggggctcttccccagaactacaggggctctggccatcttcgtggtggtcatattggttcatggagaattgcgaatagagactaaaggtcaatatgatgaagaagagatgactatgcaacaagctaaaagaaggcaaaaacgtgaatgggtgaaatttgccaaaccctgcagagaaggagaagataactcaaaaagaaacccaattgccaagattacttcagattaccaagcaacccagaaaatcacctaccgaatctctggagtgggaatcgatcagccgccttttggaatctttgttgttgacaaaaacactggagatattaacataacagctatagtcgaccgggaggaaactccaagcttcctgatcacatgtcgggctctaaatgcccaaggactagatgtagagaaaccacttatactaacggttaaaattttggatattaatgataatcctccagtattttcacaacaaattttcatgggtgaaattgaagaaaatagtgcctcaaactcactggtgatgatactaaatgccacagatgcagatgaaccaaaccacttgaattctaaaattgccttcaaaattgtctctcaggaaccagcaggcacacccatgttcctcctaagcagaaacactggggaagtccgtactttgaccaattctcttgaccgagagcaagctagcagctatcgtctggttgtgagtggtgcagacaaagatggagaaggactatcaactcaatgtgaatgtaatattaaagtgaaagatgtcaacgataacttcccaatgtttagagactctcagtattcagcacgtattgaagaaaatattttaagttctgaattacttcgatttcaagtaacagatttggatgaagagtacacagataattggcttgcagtatatttctttacctctgggaatgaaggaaattggtttgaaatacaaactgatcctagaactaatgaaggcatcctgaaagtggtgaaggctctagattatgaacaactacaaagcgtgaaacttagtattgctgtcaaaaacaaagctgaatttcaccaatcagttatctctcgataccgagttcagtcaaccccagtcacaattcaggtaataaatgtaagagaaggaattgcattccgtcctgcttccaagacatttactgtgcaaaaaggcataagtagcaaaaaattggtggattatatcctgggaacatatcaagccatcgatgaggacactaacaaagctgcctcaaatgtcaaatatgtcatgggacgtaacgatggtggatacctaatgattgattcaaaaactgctgaaatcaaatttgtcaaaaatatgaaccgagattctactttcatagttaacaaaacaatcacagctgaggttctggccatagatgaatacacgggtaaaacttctacaggcacggtatatgttagagtacccgatttcaatgacaattgtccaacagctgtcctcgaaaaagatgcagtttgcagttcttcaccttccggggttgtctccgctagaacactgaataatagatacactggcccctatacatttgcactggaagatcaacctgtaaagttgcctgccgtatggagtatcacaaccctcaatgctacctcggccctcctcagagcccaggaacagatacctcctggagtataccacatctccctggtacttacagacagccagaacaatcggtgtgagatgccacgcagcttgacactggaagtctgtcagtgtgacaacaggggcatctgtggaacttcttacccaaccacaagccctgggaccaggtatggcaggccgcactcagggaggctggggcctgccgccatcggcctgctgctccttggtctcctgctgctgctgttggccccccttctgctgttgacctgtgactgtggggcaggttctactgggggagtgacaggtggttttatcccagttcctgatggctcagaaggaacaattcatcagtggggaattgaaggagcccatcctgaagacaaggaaatcacaaatatttgtgtgcctcctgtaacagccaatggagccgatttcatggaaagttctgaagtttgtacaaatacgtatgccagaggcacagcggtggaaggcacttcaggaatggaaatgaccactaagcttggagcagccactgaatctggaggtgctgcaggctttgcaacagggacagtgtcaggagctgcttcaggattcggagcagccactggagttggcatctgttcctcagggcagtctggaaccatgagaacaaggcattccactggaggaaccaataaggactacgctgatggggcgataagcatgaattttctggactcctacttttctcagaaagcatttgcctgtgcggaggaagacgatggccaggaagcaaatgactgcttgttgatctatgataatgaaggcgcagatgccactggttctcctgtgggctccgtgggttgttgcagttttattgctgatgacctggatgacagcttcttggactcacttggacccaaatttaaaaaacttgcagagataagccttggtgttgatggtgaaggcaaagaagttcagccaccctctaaagacagcggttatgggattgaatcctgtggccatcccatagaagtccagcagacaggatttgttaagtgccagactttgtcaggaagtcaaggagcttctgctttgtccgcctctgggtctgtccagccagctgtttccatccctgaccctctgcagcatggtaactatttagtaacggagacttactcggcttctggttccctcgtgcaaccttccactgcaggctttgatccacttctcacacaaaatgtgatagtgacagaaagggtgatctgtcccatttccagtgttcctggcaacctagctggcccaacgcagctacgagggtcacatactatgctctgtacagaggatccttgctcccgtctaatatgaccagaatgagctggaataccacactgaccaaatctggatctttggactaaagtattcaaaatagcatagcaaagctcactgtattgggctaataatttggcacttattagcttctctcataaactgatcacgattataaattaaatgtttgggttcataccccaaaagcaatatgttgtcactcctaattctcaagtactattcaaattgtagtaaatcttaaagtttttcaaaaccctaaaatcatattcgccaggaaattttcctaaacattcttaagcttctatttttcccctgccaaaggaaggtgtttatcattttaaaatgcaatgtgatttagtggataaccttctctcatgacaagttcactctggaacagctagaccagatacgg

SEQ ID NO: 458500 - DNA, 4192 bp, Homo sapiens
gtctctgatccctcatgggttctgcctgcccttgtatctcttgtacaatgctcccaaagggctttgctgatctctgcacttctttcctgggacactccccccaccaccaccctttgcacacaccagtgaccaaagtgtatgcagtgatctcacagaagacatcaaaaatggtgcatgcaccgtgaatgtgctcacagaggcacgtgcacaagattctgcacccttggccttaatctcagtatgacttaaggtgcaggaacatttttaacaggttttaaaaaaacaaaaaacccttctgggaggaaaaaaataaaaagcagatacaacagctcaactgttcccactcctaactctccactatgtgcttataacttcactacctcggccctcctcagagcccaggaacagatacctcctggagtataccacatctccctggtacttacagacagccagaacaatcggtgtgagatgccacgcagcttgacactggaagtctgtcagtgtgacaacaggggcatctgtggaacttcttacccaaccacaagccctgggaccaggtatggcaggccgcactcagggaggctggggcctgccgccatcggcctgctgctccttggtctcctgctgctgctgttggccccccttctgctgttgacctgtgactgtggggcaggttctactgggggagtgacaggtggttttatcccagttcctgatggctcagaaggaacaattcatcagtggggaattgaaggagcccatcctgaagacaaggaaatcacaaatatttgtgtgcctcctgtaacagccaatggagccgatttcatggaaagttctgaagtttgtacaaatacgtatgccagaggcacagcggtggaaggcacttcaggaatggaaatgaccactaagcttggagcagccactgaatctggaggtgctgcaggctttgcaacagggacagtgtcaggagctgcttcaggattcggagcagccactggagttggcatctgttcctcagggcagtctggaaccatgagaacaaggcattccactggaggaaccaataaggactacgctgatggggcgataagcatgaattttctggactcctacttttctcagaaagcatttgcctgtgcggaggaagacgatggccaggaagcaaatgactgcttgttgatctatgataatgaaggcgcagatgccactggttctcctgtgggctccgtgggttgttgcagttttattgctgatgacctggatgacagcttcttggactcacttggacccaaatttaaaaaacttgcagagataagccttggtgttgatggtgaaggcaaagaagttcagccaccctctaaagacagcggttatgggattgaatcctgtggccatcccatagaagtccagcagacaggatttgttaagtgccagactttgtcaggaagtcaaggagcttctgctttgtccgcctctgggtctgtccagccagctgtttccatccctgaccctctgcagcatggtaactatttagtaacggagacttactcggcttctggttccctcgtgcaaccttccactgcaggctttgatccacttctcacacaaaatgtgatagtgacagaaagggtgatctgtcccatttccagtgttcctggcaacctagctggcccaacgcagctacgagggtcacatactatgctctgtacagaggatccttgctcccgtctaatatgaccagaatgagctggaataccacactgaccaaatctggatctttggactaaagtattcaaaatagcatagcaaagctcactgtattgggctaataatttggcacttattagcttctctcataaactgatcacgattataaattaaatgtttgggttcataccccaaaagcaatatgttgtcactcctaattctcaagtactattcaaattgtagtaaatcttaaagtttttcaaaaccctaaaatcatattcgccaggaaattttcctaaacattcttaagcttctatttttcccctgccaaaggaaggtgtttatcattttaaaatgcaatgtgatttagtggattaagcaggagcgctggttcttgtctccattgccttttcttatatcattgataatgatgtaagaatcacaaggggccgggcgcggtggctcacgcctgtaatcccagcactttgggaggccgaggcaggtggatcatgaggtcaggagatcgagaccatcctggctaacaaggtgaaaccccgtctctactaaaaatacaaaaaattagccgggcgcagtggcgggcgcctgtagtcccagctactcgggaggctgaggcaggagaatggcatgaacccgggaagcggagcttgcagtgagccgagattgcgccactgcagtccgcagtccggcctgggcgacagagcgagactccgtctcaaaaaaaaaaaaaaaaaaagaatcacaaggtatttgctaaagcattttgagctgcttggaaaaagggaagtagttgcagtagagtttcttccatcttcttggtgctgggaagccatatatgtgtcttttactcaagctaaggggtataagcttatgtgttgaatttgctacatctatatttcacatattctcacaataagagaattttgaaatagaaatatcatagaacatttaagaaagtttagtataaataatattttgtgtgttttaatccctttgaagggatctatccaaagaaaatattttacactgagctccttcctacacgtctcagtaacagatcctgtgttagtctttgaaaatagctcattttttaaatgtcagtgagtagatgtagcatacatatgatgtataatgacgtgtattatgttaacaatgtctgcagattttgtaggaatacaaaacatggccttttttataagcaaaacgggccaatgactagaataacacatagggcaatctgtgaatatgtattataagcagcattccagaaaagtagttggtgaaataattttcaagtcaaaaagggatatggaaagggaattatgagtaacctctattttttaagccttgcttttaaattaaacagctacagccatttaagccttgaggataataaagcttgagagtaataatgttaggttagcaaaggtttagatgtatcacttcatgcatgctaccatgatagtaatgcagctcttcgagtcatttctggtcattcaagatattcacccttttgcccatagaaagcaccctacctcacctgcttactgacattgtcttagctgatcacaagatcattatcagcctccattattccttactgtatataaaatacagagttttatattttcctttcttcgtttttcaccatattcaaaacctaaatttgtttttgcagatggaatgcaaagtaatcaagtgtttgtgctttcacctagaagggtgtggtcctgaaggaaagaggtcccctaaatatcccccaccctggtgctcctccctctccctggtaccctgactaccaggaagtcaggtgctagagcagctggagaagtgcaggcagcctgtgcttccacagatgggggtgctgctgcaacaaggctttcaatgtgcccatcttaggtgggagaagctagatcctgtgcagcagcctggtaagtcctgaggaggttccattgctcttcctgctgctgtcctttgcttctcaacggtggctcgctctacagtctagagcacatgcagctaacttgtgcctctgcttatgcatgagggttaaattaacaaccataaccttcatttgaagttcaaaggtgtattcaggatcctcaaagcattttaaccttgccgcttaaaacccaatttaccgtgaaatgggaattttgctgcattgttaaactgtagtggaaaccatgctatagtaataaaggttatataagagagaaattgaaattaaatgtgtttttaaatttcaaaaaaaaatcaatctttaggatgacttaaaaattgatttgccatgtaaaatgtatctgcattttttacacaaaacttgttttaagcataaaattttaaaactgtactacttgatgtattatacattttgaaccatatgtattaaaccataaacagtataatgttgttataataaaacaggcaataaatttataaataaaagctgaactactctcta

SEQ ID NO: 458501 - DNA, 605 bp, Homo sapiens
ggagagaataattggcctacctgcaacagagaggacaaggaggcaggtgtagacagatttacccacttgaacccattatagccctcatcactgctcaaacatcactctattatcaaccctattgtttgtggcaactaactctgctaatgaaaataagtagtaagagtgtaagacactgctgtggttggaataggtcttccaaagctcatgtgttgaaaacttaatccccactgcagtagtgttgagaggtgagacctgtaagaggaaatgaggtcatgagagctctgtcctcatgcatggattaatggtgttaccatgggagtgggttcattacagtaagagtgagttgttataagggtgagttcagcccccacgtgctctcatgctctcttgtccttccaccttccaccgtgggatgatgaagtccaaaggcctttgtcagattctgacaccttgatattgagcttcccaaccttcaaaactgtgagaaataaatgtgttttctttatgaattatccagtctgtgatattctgttatagcaacacaaaatagactgaaaagacacttcgtcctactgttgatttgcatgattctttctctacag

SEQ ID NO: 458502 - DNA, 348 bp, Homo sapiens
cctgtcttttctatttctggctgttgtcactgaaaatcttatttctttgtacacttttaaaattagtatatttttagagctttttcacccgtttatatgccctcctttgtgactctcacataacacattgtgggatgttatcacctctagtcatataattgtattttctcccacttacttgtttgcatggtgactgcttatagacacccaagacccattttataaaaatgcaacaaacaacagcataagatattacagaatgttctcccttgtttttagaagtttgtacaaatacgtatgccagaggcacagcggtggaaggcacttcaggaatggaaatgaccacta

SEQ ID NO: 458503 - DNA, 461 bp, Homo sapiens
ggcgccagaggaccccgatatttgtggttctggccatagatgaatacacgggtaaaacttctacaggcacggtatatgttagagtacccgatttcaatgacaattgtccaacagctgtcctcgaaaaagatgcagtttgcagttcttcaccttccggggttgtctccgctagaacactgaataatagatacactggcccctatacatttgcactggaagatcaacctgtaaagttgcctgccgtatggagtatcacaaccctcaatgctacctcggccctcctcagagcccaggaacagatacctcctggagtataccacatctccctggtacttacagacagccagaacacaaatatcgggccggggacatcttcctcctcatcttcctccttgtcctcctcatcctcctcatcctcatctttgtcctcatcatcctgaccatggccagaccacaaatag

SEQ ID NO: 458504 - DNA, 4083 bp, Homo sapiens
ggcgccagaggaccccgatatttgtggttctggccatagatgaatacacgggtaaaacttctacaggcacggtatatgttagagtacccgatttcaatgacaattgtccaacagctgtcctcgaaaaagatgcagtttgcagttcttcaccttccggggttgtctccgctagaacactgaataatagatacactggcccctatacatttgcactggaagatcaacctgtaaagttgcctgccgtatggagtatcacaaccctcaatgctacctcggccctcctcagagcccaggaacagatacctcctggagtataccacatctccctggtacttacagacagccagaacaatcggtgtgagatgccacgcagcttgacactggaagtctgtcagtgtgacaacaggggcatctgtggaacttcttacccaaccacaagccctgggaccaggtatggcaggccgcactcagggaggctggggcctgccgccatcggcctgctgctccttggtctcctgctgctgctgttggccccccttctgctgttgacctgtgactgtggggcaggttctactgggggagtgacaggtggttttatcccagttcctgatggctcagaaggaacaattcatcagtggggaattgaaggagcccatcctgaagacaaggaaatcacaaatatttgtgtgcctcctgtaacagccaatggagccgatttcatggaaagttctgaagtttgtacaaatacgtatgccagaggcacagcggtggaaggcacttcaggaatggaaatgaccactaagcttggagcagccactgaatctggaggtgctgcaggctttgcaacagggacagtgtcaggagctgcttcaggattcggagcagccactggagttggcatctgttcctcagggcagtctggaaccatgagaacaaggcattccactggaggaaccaataaggactacgctgatggggcgataagcatgaattttctggactcctacttttctcagaaagcatttgcctgtgcggaggaagacgatggccaggaagcaaatgactgcttgttgatctatgataatgaaggcgcagatgccactggttctcctgtgggctccgtgggttgttgcagttttattgctgatgacctggatgacagcttcttggactcacttggacccaaatttaaaaaacttgcagagataagccttggtgttgatggtgaaggcaaagaagttcagccaccctctaaagacagcggttatgggattgaatcctgtggccatcccatagaagtccagcagacaggatttgttaagtgccagactttgtcaggaagtcaaggagcttctgctttgtccgcctctgggtctgtccagccagctgtttccatccctgaccctctgcagcatggtaactatttagtaacggagacttactcggcttctggttccctcgtgcaaccttccactgcaggctttgatccacttctcacacaaaatgtgatagtgacagaaagggtgatctgtcccatttccagtgttcctggcaacctagctggcccaacgcagctacgagggtcacatactatgctctgtacagaggatccttgctcccgtctaatatgaccagaatgagctggaataccacactgaccaaatctggatctttggactaaagtattcaaaatagcatagcaaagctcactgtattgggctaataatttggcacttattagcttctctcataaactgatcacgattataaattaaatgtttgggttcataccccaaaagcaatatgttgtcactcctaattctcaagtactattcaaattgtagtaaatcttaaagtttttcaaaaccctaaaatcatattcgccaggaaattttcctaaacattcttaagcttctatttttcccctgccaaaggaaggtgtttatcattttaaaatgcaatgtgatttagtggattaagcaggagcgctggttcttgtctccattgccttttcttatatcattgataatgatgtaagaatcacaaggggccgggcgcggtggctcacgcctgtaatcccagcactttgggaggccgaggcaggtggatcatgaggtcaggagatcgagaccatcctggctaacaaggtgaaaccccgtctctactaaaaatacaaaaaattagccgggcgcagtggcgggcgcctgtagtcccagctactcgggaggctgaggcaggagaatggcatgaacccgggaagcggagcttgcagtgagccgagattgcgccactgcagtccgcagtccggcctgggcgacagagcgagactccgtctcaaaaaaaaaaaaaaaaaaagaatcacaaggtatttgctaaagcattttgagctgcttggaaaaagggaagtagttgcagtagagtttcttccatcttcttggtgctgggaagccatatatgtgtcttttactcaagctaaggggtataagcttatgtgttgaatttgctacatctatatttcacatattctcacaataagagaattttgaaatagaaatatcatagaacatttaagaaagtttagtataaataatattttgtgtgttttaatccctttgaagggatctatccaaagaaaatattttacactgagctccttcctacacgtctcagtaacagatcctgtgttagtctttgaaaatagctcattttttaaatgtcagtgagtagatgtagcatacatatgatgtataatgacgtgtattatgttaacaatgtctgcagattttgtaggaatacaaaacatggccttttttataagcaaaacgggccaatgactagaataacacatagggcaatctgtgaatatgtattataagcagcattccagaaaagtagttggtgaaataattttcaagtcaaaaagggatatggaaagggaattatgagtaacctctattttttaagccttgcttttaaattaaacagctacagccatttaagccttgaggataataaagcttgagagtaataatgttaggttagcaaaggtttagatgtatcacttcatgcatgctaccatgatagtaatgcagctcttcgagtcatttctggtcattcaagatattcacccttttgcccatagaaagcaccctacctcacctgcttactgacattgtcttagctgatcacaagatcattatcagcctccattattccttactgtatataaaatacagagttttatattttcctttcttcgtttttcaccatattcaaaacctaaatttgtttttgcagatggaatgcaaagtaatcaagtgtttgtgctttcacctagaagggtgtggtcctgaaggaaagaggtcccctaaatatcccccaccctggtgctcctccctctccctggtaccctgactaccaggaagtcaggtgctagagcagctggagaagtgcaggcagcctgtgcttccacagatgggggtgctgctgcaacaaggctttcaatgtgcccatcttaggtgggagaagctagatcctgtgcagcagcctggtaagtcctgaggaggttccattgctcttcctgctgctgtcctttgcttctcaacggtggctcgctctacagtctagagcacatgcagctaacttgtgcctctgcttatgcatgagggttaaattaacaaccataaccttcatttgaagttcaaaggtgtattcaggatcctcaaagcattttaaccttgccgcttaaaacccaatttaccgtgaaatgggaattttgctgcattgttaaactgtagtggaaaccatgctatagtaataaaggttatataagagagaaattgaaattaaatgtgtttttaaatttcaaaaaaaaatcaatctttaggatgacttaaaaattgatttgccatgtaaaatgtatctgcattttttacacaaaacttgttttaagcataaaattttaaaactgtactacttgatgtattatacattttgaaccatatgtattaaaccataaacagtataatgttgttataataaaacaggcaataaatttataaataaaagctgaactactctcta

SEQ ID NO: 458505 - DNA, 2819 bp, Homo sapiens
ttttcttagacattaactgcagacggctggcaggatagaagcagcggctcacttggactttttcaccagggaaatcagagacaatgatggggctcttccccagaactacaggggctctggccatcttcgtggtggtcatattggttcatggagaattgcgaatagagactaaaggtcaatatgatgaagaagagatgactatgcaacaagctaaaagaaggcaaaaacgtgaatgggtgaaatttgccaaaccctgcagagaaggagaagataactcaaaaagaaacccaattgccaagattacttcagattaccaagcaacccagaaaatcacctaccgaatctctggagtgggaatcgatcagccgccttttggaatctttgttgttgacaaaaacactggagatattaacataacagctatagtcgaccgggaggaaactccaagcttcctgatcacatgtcgggctctaaatgcccaaggactagatgtagagaaaccacttatactaacggttaaaattttggatattaatgataatcctccagtattttcacaacaaattttcatgggtgaaattgaagaaaatagtgcctcaaactcactggtgatgatactaaatgccacagatgcagatgaaccaaaccacttgaattctaaaattgccttcaaaattgtctctcaggaaccagcaggcacacccatgttcctcctaagcagaaacactggggaagtccgtactttgaccaattctcttgaccgagagcaagctagcagctatcgtctggttgtgagtggtgcagacaaagatggagaaggactatcaactcaatgtgaatgtaatattaaagtgaaagatgtcaacgataacttcccaatgtttagagactctcagtattcagcacgtattgaagaaaatattttaagttctgaattacttcgatttcaagtaacagatttggatgaagagtacacagataattggcttgcagtatatttctttacctctgggaatgaaggaaattggtttgaaatacaaactgatcctagaactaatgaaggcatcctgaaagtggtgaaggctctagattatgaacaactacaaagcgtgaaacttagtattgctgtcaaaaacaaagctgaatttcaccaatcagttatctctcgataccgagttcagtcaaccccagtcacaattcaggtaataaatgtaagagaaggaattgcattccgtcctgcttccaagacatttactgtgcaaaaaggcataagtagcaaaaaattggtggattatatcctgggaacatatcaagccatcgatgaggacactaacaaagctgcctcaaatgtcaaatatgtcatgggacgtaacgatggtggatacctaatgattgattcaaaaactgctgaaatcaaatttgtcaaaaatatgaaccgagattctactttcatagttaacaaaacaatcacagctgaggttctggccatagatgaatacacgggtaaaacttctacaggcacggtatatgttagagtacccgatttcaatgacaattgtccaacagctgtcctcgaaaaagatgcagtttgcagttcttcaccttccggggttgtctccgctagaacactgaataatagatacactggcccctatacatttgcactggaagatcaacctgtaaagttgcctgccgtatggagtatcacaaccctcaatgctacctcggccctcctcagagcccaggaacagatacctcctggagtataccacatctccctggtacttacagacagccagaacaatcggtgtgagatgccacgcagcttgacactggaagtctgtcagtgtgacaacaggggcatctgtggaacttcttacccaaccacaagccctgggaccaggtatggcaggccgcactcagggaggctggggcctgccgccatcggcctgctgctccttggtctcctgctgctgctgttggccccccttctgctgttgacctgtgactgtggggcaggttctactgggggagtgacaggtggttttatcccagttcctgatggctcagaaggaacaattcatcagtggggaattgaaggagcccatcctgaagacaaggaaatcacaaatatttgtgtgcctcctgtaacagccaatggagccgatttcatggaaagttctgaagtttgtacaaatacgtatgccagaggcacagcggtggaaggcacttcaggaatggaaatgaccactaagcttggagcagccactgaatctggaggtgctgcaggctttgcaacagggacagtgtcaggagctgcttcaggattcggagcagccactggagttggcatctgttcctcagggcagtctggaaccatgagaacaaggcattccactggaggaaccaataaggactacgctgatggggcgataagcatgaattttctggactcctacttttctcagaaagcatttgcctgtgcggaggaagacgatggccaggaagcaaatgactgcttgttgatctatgataatgaaggcgcagatgccactggttctcctgtgggctccgtgggttgttgcagttttattgctgatgacctggatgacagcttcttggactcacttggacccaaatttaaaaaacttgcagagataagccttggtgttgatggtgaaggcaaagaagttcagccaccctctaaagacagcggttatgggattgaatcctgtggccatcccatagaagtccagcagacactttgaaggtgagggggaatggaatggtgaaaggcaaaaagaaataaggaccggtca

SEQ ID NO: 458506 - DNA, 2676 bp, Homo sapiens
gcgtctgctgcagcggccgcggtggctgaggaggcccgagaggagtcggtggcagcggcggcggcgggaccggcagcagcagcagcagcagcagcagcaaccactagcctcctgccccgcggcgctgccgcacgagccccacgagccgctcaccccgccgttctcagcgctgcccgaccccgctggcgcgccctcccgccgccagtcccggcagcgccctcagttgtcctccgactcgccctcggccttccgcgccagccgcagccacagccgcaacgccacccgcagccacagccacagccacagccccaggcatagccttcggcacagccccggctccggctcctgcggcagctcctctgggcaccgtccctgcgccgacatcctggaggttgggatgctcttgtccaaaatcaactcgcttgcccacctgcgcgccgcgccctgcaacgacctgcacgccaccaagctggcgcccggcaaggagaaggagcccctggagtcgcagtaccaggtgggcccgctactgggcagcggcggcttcggctcggtctactcaggcatccgcgtctccgacaacttgccggtggccatcaaacacgtggagaaggaccggatttccgactggggagagctgcctaatggcactcgagtgcccatggaagtggtcctgctgaagaaggtgagctcgggtttctccggcgtcattaggctcctggactggttcgagaggcccgacagtttcgtcctgatcctggagaggcccgagccggtgcaagatctcttcgacttcatcacggaaaggggagccctgcaagaggagctggcccgcagcttcttctggcaggtgctggaggccgtgcggcactgccacaactgcggggtgctccaccgcgacatcaaggacgaaaacatccttatcgacctcaatcgcggcgagctcaagctcatcgacttcgggtcgggggcgctgctcaaggacaccgtctacacggacttcgatgggacccgagtgtatagccctccagagtggatccgctaccatcgctaccatggcaggtcggcggcagtctggtccctggggatcctgctgtatgatatggtgtgtggagatattcctttcgagcatgacgaagagatcatcaggggccaggttttcttcaggcagagggtctcttcagaatgtcagcatctcattagatggtgcttggccctgagaccatcagataggccaaccttcgaagaaatccagaaccatccatggatgcaagatgttctcctgccccaggaaactgctgagatccacctccacagcctgtcgccggggcccagcaaatagcagcctttctggcaggtcctcccctctcttgtcagatgcccgagggaggggaagcttctgtctccagcttcccgagtaccagtgacacgtctcgccaagcaggacagtgcttgatacaggaacaacatttacaactcattccagatcccaggcccctggaggctgcctcccaacagtggggaagagtgactctccaggggtcctaggcctcaactcctcccatagatactctcttcttctcataggtgtccagcattgctggactctgaaatatcccgggggtggggggtgggggtgggtcagaaccctgccatggaactgtttccttcatcatgagttctgctgaatgccgcgatgggtcaggtaggggggaaacaggttgggatgggataggactagcaccattttaagtccctgtcacctcttccgactctttctgagtgccttctgtggggactccggctgtgctgggagaaatacttgaacttgcctcttttacctgctgcttctccaaaaatctgcctgggttttgttccctatttttctctcctgtcctccctcaccccctccttcatatgaaaggtgccatggaagaggctacagggccaaacgctgagccacctgcccttttttctgcctcctttagtaaaactccgagtgaactggtcttcctttttggtttttacttaactgtttcaaagccaagacctcacacacacaaaaaatgcacaaacaatgcaatcaacagaaaagctgtaaatgtgtgtacagttggcatggtagtatacaaaaagattgtagtggatctaatttttaagaaattttgcctttaagttattttacctgtttttgtttcttgttttgaaagatgcgcattctaacctggaggtcaatgttatgtatttatttatttatttatttggttcccttcctattccaagcttccatagctgctgccctagttttctttcctcctttcctcctctgacttggggaccttttgggggagggctgcgacgcttgctctgtttgtggggtgacgggactcaggcgggacagtgctgcagctccctggcttctgtggggcccctcacctacttacccaggtgggtcccggctctgtgggtgatggggaggggcattgctgactgtgtatataggataattatgaaaagcagttctggatggtgtgccttccagatcctctctggggctgtgttttgagcagcaggtagcctgctggttttatctgagtgaaatactgtacaggggaataaaagagatcttatttttttttttatacttggcgttttttgaataaaaaccttttgtcttaa

SEQ ID NO: 458507 - DNA, 1999 bp, Homo sapiens
gaggaaagggtgtgggtgtctgctcctgcttgcatcgggtggggaggaaggcctcccaaagggcaccctgacttaggatgttgtgcaagcatccttgcttggatcctgtcggccatgagaatctcacccgggctcctgggcagtggtgaatgcaatttaaggatagtctatgagatacctttcttggttgtgcagacatgcatcccttcatccttcgcaggcggtcctgcctcacagggcctcaagttttgggtctgcggccagctgtgtttgtttcttggagcagttcataaagaatttcagtttatggtttgggctagcagagagggacccgagtgtatagccctccagagtggatccgctaccatcgctaccatggcaggtcggcggcagtctggtccctggggatcctgctgtatgatatggtgtgtggagatattcctttcgagcatgacgaagagatcatcaggggccaggttttcttcaggcagagggtctcttcagaatgtcagcatctcattagatggtgcttggccctgagaccatcagataggccaaccttcgaagaaatccagaaccatccatggatgcaagatgttctcctgccccaggaaactgctgagatccacctccacagcctgtcgccggggcccagcaaatagcagcctttctggcaggtcctcccctctcttgtcagatgcccgagggaggggaagcttctgtctccagcttcccgagtaccagtgacacgtctcgccaagcaggacagtgcttgatacaggaacaacatttacaactcattccagatcccaggcccctggaggctgcctcccaacagtggggaagagtgactctccaggggtcctaggcctcaactcctcccatagatactctcttcttctcataggtgtccagcattgctggactctgaaatatcccgggggtggggggtgggggtgggtcagaaccctgccatggaactgtttccttcatcatgagttctgctgaatgccgcgatgggtcaggtaggggggaaacaggttgggatgggataggactagcaccattttaagtccctgtcacctcttccgactctttctgagtgccttctgtggggactccggctgtgctgggagaaatacttgaacttgcctcttttacctgctgcttctccaaaaatctgcctgggttttgttccctatttttctctcctgtcctccctcaccccctccttcatatgaaaggtgccatggaagaggctacagggccaaacgctgagccacctgcccttttttctgcctcctttagtaaaactccgagtgaactggtcttcctttttggtttttacttaactgtttcaaagccaagacctcacacacacaaaaaatgcacaaacaatgcaatcaacagaaaagctgtaaatgtgtgtacagttggcatggtagtatacaaaaagattgtagtggatctaatttttaagaaattttgcctttaagttattttacctgtttttgtttcttgttttgaaagatgcgcattctaacctggaggtcaatgttatgtatttatttatttatttatttggttcccttcctattccaagcttccatagctgctgccctagttttctttcctcctttcctcctctgacttggggaccttttgggggagggctgcgacgcttgctctgtttgtggggtgacgggactcaggcgggacagtgctgcagctccctggcttctgtggggcccctcacctacttacccaggtgggtcccggctctgtgggtgatggggaggggcattgctgactgtgtatataggataattatgaaaagcagttctggatggtgtgccttccagatcctctctggggctgtgttttgagcagcaggtagcctgctggttttatctgagtgaaatactgtacaggggaataaaagagatcttatttttttttttatacttggcgttttttgaataaaaaccttttgtcttaa

SEQ ID NO: 458508 - DNA, 1817 bp, Homo sapiens
gaggaaagggtgtgggtgtctgctcctgcttgcatcgggtggggaggaaggcctcccaaagggcaccctgacttaggatgttgtgcaagcatccttgcttggatcctgtcggccatgagaatctcacccgggctcctgggcagtgggacccgagtgtatagccctccagagtggatccgctaccatcgctaccatggcaggtcggcggcagtctggtccctggggatcctgctgtatgatatggtgtgtggagatattcctttcgagcatgacgaagagatcatcaggggccaggttttcttcaggcagagggtctcttcagaatgtcagcatctcattagatggtgcttggccctgagaccatcagataggccaaccttcgaagaaatccagaaccatccatggatgcaagatgttctcctgccccaggaaactgctgagatccacctccacagcctgtcgccggggcccagcaaatagcagcctttctggcaggtcctcccctctcttgtcagatgcccgagggaggggaagcttctgtctccagcttcccgagtaccagtgacacgtctcgccaagcaggacagtgcttgatacaggaacaacatttacaactcattccagatcccaggcccctggaggctgcctcccaacagtggggaagagtgactctccaggggtcctaggcctcaactcctcccatagatactctcttcttctcataggtgtccagcattgctggactctgaaatatcccgggggtggggggtgggggtgggtcagaaccctgccatggaactgtttccttcatcatgagttctgctgaatgccgcgatgggtcaggtaggggggaaacaggttgggatgggataggactagcaccattttaagtccctgtcacctcttccgactctttctgagtgccttctgtggggactccggctgtgctgggagaaatacttgaacttgcctcttttacctgctgcttctccaaaaatctgcctgggttttgttccctatttttctctcctgtcctccctcaccccctccttcatatgaaaggtgccatggaagaggctacagggccaaacgctgagccacctgcccttttttctgcctcctttagtaaaactccgagtgaactggtcttcctttttggtttttacttaactgtttcaaagccaagacctcacacacacaaaaaatgcacaaacaatgcaatcaacagaaaagctgtaaatgtgtgtacagttggcatggtagtatacaaaaagattgtagtggatctaatttttaagaaattttgcctttaagttattttacctgtttttgtttcttgttttgaaagatgcgcattctaacctggaggtcaatgttatgtatttatttatttatttatttggttcccttcctattccaagcttccatagctgctgccctagttttctttcctcctttcctcctctgacttggggaccttttgggggagggctgcgacgcttgctctgtttgtggggtgacgggactcaggcgggacagtgctgcagctccctggcttctgtggggcccctcacctacttacccaggtgggtcccggctctgtgggtgatggggaggggcattgctgactgtgtatataggataattatgaaaagcagttctggatggtgtgccttccagatcctctctggggctgtgttttgagcagcaggtagcctgctggttttatctgagtgaaatactgtacaggggaataaaagagatcttatttttttttttatacttggcgttttttgaataaaaaccttttgtcttaa

SEQ ID NO: 458509 - DNA, 1624 bp, Homo sapiens
tgttctagaaaatgcttggcctccctgggaccccagacttgtgggcctctgagaagcaaatggggaagacctttgcagtgtaaaaacaagttgagtcattcataacctcgtctatcctcctttctgcagaatgtcagcatctcattagatggtgcttggccctgagaccatcagataggccaaccttcgaagaaatccagaaccatccatggatgcaagatgttctcctgccccaggaaactgctgagatccacctccacagcctgtcgccggggcccagcaaatagcagcctttctggcaggtcctcccctctcttgtcagatgcccgagggaggggaagcttctgtctccagcttcccgagtaccagtgacacgtctcgccaagcaggacagtgcttgatacaggaacaacatttacaactcattccagatcccaggcccctggaggctgcctcccaacagtggggaagagtgactctccaggggtcctaggcctcaactcctcccatagatactctcttcttctcataggtgtccagcattgctggactctgaaatatcccgggggtggggggtgggggtgggtcagaaccctgccatggaactgtttccttcatcatgagttctgctgaatgccgcgatgggtcaggtaggggggaaacaggttgggatgggataggactagcaccattttaagtccctgtcacctcttccgactctttctgagtgccttctgtggggactccggctgtgctgggagaaatacttgaacttgcctcttttacctgctgcttctccaaaaatctgcctgggttttgttccctatttttctctcctgtcctccctcaccccctccttcatatgaaaggtgccatggaagaggctacagggccaaacgctgagccacctgcccttttttctgcctcctttagtaaaactccgagtgaactggtcttcctttttggtttttacttaactgtttcaaagccaagacctcacacacacaaaaaatgcacaaacaatgcaatcaacagaaaagctgtaaatgtgtgtacagttggcatggtagtatacaaaaagattgtagtggatctaatttttaagaaattttgcctttaagttattttacctgtttttgtttcttgttttgaaagatgcgcattctaacctggaggtcaatgttatgtatttatttatttatttatttggttcccttcctattccaagcttccatagctgctgccctagttttctttcctcctttcctcctctgacttggggaccttttgggggagggctgcgacgcttgctctgtttgtggggtgacgggactcaggcgggacagtgctgcagctccctggcttctgtggggcccctcacctacttacccaggtgggtcccggctctgtgggtgatggggaggggcattgctgactgtgtatataggataattatgaaaagcagttctggatggtgtgccttccagatcctctctggggctgtgttttgagcagcaggtagcctgctggttttatctgagtgaaatactgtacaggggaataaaagagatcttatttttttttttatacttggcgttttttgaataaaaaccttttgtcttaa

SEQ ID NO: 458510 - DNA, 2620 bp, Homo sapiens
gcgtctgctgcagcggccgcggtggctgaggaggcccgagaggagtcggtggcagcggcggcggcgggaccggcagcagcagcagcagcagcagcagcaaccactagcctcctgccccgcggcgctgccgcacgagccccacgagccgctcaccccgccgttctcagcgctgcccgaccccgctggcgcgccctcccgccgccagtcccggcagcgccctcagttgtcctccgactcgccctcggccttccgcgccagccgcagccacagccgcaacgccacccgcagccacagccacagccacagccccaggcatagccttcggcacagccccggctccggctcctgcggcagctcctctgggcaccgtccctgcgccgacatcctggaggttgggatgctcttgtccaaaatcaactcgcttgcccacctgcgcgccgcgccctgcaacgacctgcacgccaccaagctggcgcccggcaaggagaaggagcccctggagtcgcagtaccaggtgggcccgctactgggcagcggcggcttcggctcggtctactcaggcatccgcgtctccgacaacttgccggtggccatcaaacacgtggagaaggaccggatttccgactggggagagctgcctaatggcactcgagtgcccatggaagtggtcctgctgaagaaggtgagctcgggtttctccggcgtcattaggctcctggactggttcgagaggcccgacagtttcgtcctgatcctggagaggcccgagccggtgcaagatctcttcgacttcatcacggaaaggggagccctgcaagaggagctggcccgcagcttcttctggcaggtgctggaggccgtgcggcactgccacaactgcggggtgctccaccgcgacatcaaggacgaaaacatccttatcgacctcaatcgcggcgagctcaagctcatcgacttcgggtcgggggcgctgctcaaggacaccgtctacacggacttcgatgggacccgagtgtatagccctccagagtggatccgctaccatcgctaccatggcaggtcggcggcagtctggtccctggggatcctgctgtatgatatggtgtgtggagatattcctttcgagcatgacgaagagatcatcaggggccaggttttcttcaggcagagggtctcttcagaatgtcagcatctcattagatggtgcttggccctgagaccatcagataggccaaccttcgaagaaatccagaaccatccatggatgcaagatgttctcctgccccaggaaactgctgagatccacctccacagcctgtcgccggggcccagcaaatagcagcctttctggcaggtcctcccctctcttgtcagatgcccgagggaggggaagcttctgtctccagcttcccgagtaccagtgacacgtctcgccaagcaggacagtgcttgatacaggaacaacatttacaactcattccagatcccaggcccctggaggctgcctcccaacagtggggaagagtgactctccaggggtcctaggcctcaactcctcccatagatactctcttcttctcataggtgtccagcattgctggactctgaaatatcccgggggtggggggtgggggtgggtcagaaccctgccatggaactgtttccttcatcatgagttctgctgaatgccgcgatgggtcaggtaggggggaaacaggttgggatgggataggactagcaccattttaagtccctgtcacctcttccgactctttctgagtgccttctgtggggactccggctgtgctgggagaaatacttgaacttgcctcttttacctgctgcttctccaaaaatctgcctgggttttgttccctatttttctctcctgtcctccctcaccccctccttcatatgaaaggtgccatggaagaggctacagggccaaacgctgagccacctgcccttttttctgcctcctttagtaaaactccgagtgaactggtcttcctttttggtttttacttaactgtttcaaagccaagacctcacacacacaaaaaatgcacaaacaatgcaatcaacagaaaagctgtaaatgtgtgtacagttggcatggtagtatactgtttttgtttcttgttttgaaagatgcgcattctaacctggaggtcaatgttatgtatttatttatttatttatttggttcccttcctattccaagcttccatagctgctgccctagttttctttcctcctttcctcctctgacttggggaccttttgggggagggctgcgacgcttgctctgtttgtggggtgacgggactcaggcgggacagtgctgcagctccctggcttctgtggggcccctcacctacttacccaggtgggtcccggctctgtgggtgatggggaggggcattgctgactgtgtatataggataattatgaaaagcagttctggatggtgtgccttccagatcctctctggggctgtgttttgagcagcaggtagcctgctggttttatctgagtgaaatactgtacaggggaataaaagagatcttatttttttttttatacttggcgttttttgaataaaaaccttttgtcttaa

SEQ ID NO: 458511 - DNA, 2267 bp, Homo sapiens
gcgtctgctgcagcggccgcggtggctgaggaggcccgagaggagtcggtggcagcggcggcggcgggaccggcagcagcagcagcagcagcagcagcaaccactagcctcctgccccgcggcgctgccgcacgagccccacgagccgctcaccccgccgttctcagcgctgcccgaccccgctggcgcgccctcccgccgccagtcccggcagcgccctcagttgtcctccgactcgccctcggccttccgcgccagccgcagccacagccgcaacgccacccgcagccacagccacagccacagccccaggcatagccttcggcacagccccggctccggctcctgcggcagctcctctgggcaccgtccctgcgccgacatcctggaggttgggatgctcttgtccaaaatcaactcgcttgcccacctgcgcgccgcgccctgcaacgacctgcacgccaccaagctggcgcccggcaaggagaaggagcccctggagtcgcagtaccaggtgggcccgctactgggcagcggcggcttcggctcggtctactcaggcatccgcgtctccgacaacttgccggtggccatcaaacacgtggagaaggaccggatttccgactggggagagctgcctaatggcactcgagtgcccatggaagtggtcctgctgaagaaggtgagctcgggtttctccggcgtcattaggctcctggactggttcgagaggcccgacagtttcgtcctgatcctggagaggcccgagccggtgcaagatctcttcgacttcatcacggaaaggggagccctgcaagaggagctggcccgcagcttcttctggcaggtgctggaggccgtgcggcactgccacaactgcggggtgctccaccgcgacatcaaggacgaaaacatccttatcgacctcaatcgcggcgagctcaagctcatcgacttcgggtcgggggcgctgctcaaggacaccgtctacacggacttcgatgggacccgagtgtatagccctccagagtggatccgctaccatcgctaccatggcaggtcggcggcagtctggtccctggggatcctgctgtatgatatggtgtgtggagatattcctttcgagcatgacgaagagatcatcaggggccaggttttcttcaggcagagggtctcttcagaatgtcagcatctcattagatggtgcttggccctgagaccatcagataggccaaccttcgaagaaatccagaaccatccatggatgcaagatgttctcctgccccaggaaactgctgagatccacctccacagcctgtcgccggggcccagcaaatagcagcctttctggcaggtcctcccctctcttgtcagatgcccgagggaggggaagcttctgtctccagcttcccgagtaccagtgacacgtctcgccaagcaggacagtgcttgatacaggaacaacatttacaactcattccagatcccaggcccctggaggctgcctcccaacagtggggaagagtgactctccaggggtcctaggcctcaactcctcccatagatactctcttcttctcataggtgtccagcattgctggactctgaaatatcccgggggtggggggtgggggtgggtcagaaccctgccatggaactgtttccttcatcatgagttctgctgaatgccgcgatgggtcaggtaggggggaaacaggttgggatgggataggactagcaccattttaagtccctgtcacctcttccgactctttctgagtgccttctgtggggactccggctgtgctgggagaaatacttgaacttgcctcttttacctgctgcttctccaaaaatctgcctgggttttgttccctatttttctctcctgtcctccctcaccccctccttcatatgaaaggtgccatggaagaggctacagggccaaacgctgagccacctgcccttttttctgcctcctttactcagcatcatagaattcgaaacatggccaatcaatgcaatccacaacctaggtgactggagctaacgccacttaaggatcattacgcagctacctgggcgaatatatcatccatagcgattgatcctactccttccacttcatctgcgataccacttcctactaatttatgcttgctctcttattcgttcctcatttctcgcttaccattctcgcctttcgcgtcgagcattatctactgtctgccttccaccattgattgttactactactgcgctgtttc

SEQ ID NO: 458512 - DNA, 1366 bp, Homo sapiens
  misc_feature (1343)..(1343): n is a, c, g, or t
  misc_feature (1360)..(1360): n is a, c, g, or t
gcgtctgctgcagcggccgcggtggctgaggaggcccgagaggagtcggtggcagcggcggcggcgggaccggcagcagcagcagcagcagcagcagcaaccactagcctcctgccccgcggcgctgccgcacgagccccacgagccgctcaccccgccgttctcagcgctgcccgaccccgctggcgcgccctcccgccgccagtcccggcagcgccctcagttgtcctccgactcgccctcggccttccgcgccagccgcagccacagccgcaacgccacccgcagccacagccacagccacagccccaggcatagccttcggcacagccccggctccggctcctgcggcagctcctctgggcaccgtccctgcgccgacatcctggaggttgggatgctcttgtccaaaatcaactcgcttgcccacctgcgcgccgcgccctgcaacgacctgcacgccaccaagctggcgcccggcaaggagaaggagcccctggagtcgcagtaccaggtgggcccgctactgggcagcggcggcttcggctcggtctactcaggcatccgcgtctccgacaacttgccggtggccatcaaacacgtggagaaggaccggatttccgactggggagagctgcctaatggcactcgagtgcccatggaagtggtcctgctgaagaaggtgagctcgggtttctccggcgtcattaggctcctggactggttcgagaggcccgacagtttcgtcctgatcctggagaggcccgagccggtgcaagatctcttcgacttcatcacggaaaggggagccctgcaagaggagctggcccgcagcttcttctggcaggtgctggaggccgtgcggcactgccacaactgcggggtgctccaccgcgacatcaaggacgaaaacatccttatcgacctcaatcgcggcgagctcaagctcatcgacttcgggtcgggggcgctgctcaaggacaccgtctacacggacttcgatgggacccgagtgtatagccctccagagtggatccgctaccatcgctaccatggcaggtcggcggcagtctggtccctggggatcctgctgtatgatatggtgtgtggagatattcctttcgagcatgacgaagagatcatcaggggccaggttttcttcaggcagagggtctcttcagaatgtcagcatctcttgctctgggcctcgtcgcccacataggaatccttctgacccatgcccaccatcacgccctggtgcctggggcgccccacgatggaggggaagacggcccggggggcatcgtcgcccgcgaagccggccttgcacatgccggagccgntgtcgacgacgagcgcngcgata

SEQ ID NO: 458513 - DNA, 519 bp, Homo sapiens
ggcctcccaaagggcaccctgacttaggatgttgtgcaagcatccttgcttggatcctgtcggccatgagaatctcacccgggctcctgggcagtggtgaatgcaatttaaggatagtctatgagatacctttcttggttgtgcagacatgcatcccttcatccttcgcaggcggtcctgcctcacagggcctcaagttttgggtctgcggccagctgtgtttgtttcttggagcagttcataaagaatttcagtttatggtttgggctagcagagaggtgggtaatgctttgggttggagagatgccgtaaggtgcgcctccactctccttagcccagagggaaaaatggagttcacctagctcctgagagaagggattttttttttttttaaaagaaagagttatatataccacccagcttctttgtgcttgtttttgctaaaagtgtgttttctcttctattcccttggctcacagggacccgagtgtatagccctccagagtggatccgctacca

SEQ ID NO: 458514 - DNA, 378 bp, Homo sapiens
gttgtgggaaaggcccccactattgaagtttgaaaaccacaggtttaagaggggagtcagtttttagctgaaagcagactggaggacccagatattagtcaataccttcctattgaagggtacccagcacagtgttctagaaaatgcttggcctccctgggaccccagacttgtgggcctctgagaagcaaatggggaagacctttgcagtgtaaaaacaagttgagtcattcataacctcgtctatcctcctttctgcagaatgtcagcatctcattagatggtgcttggccctgagaccatcagataggccaaccttcgaagaaatccagaaccatccatggatgcaagatgttctcctgccccaggaaactgctg

SEQ ID NO: 458515 - DNA, 3179 bp, Homo sapiens
gcgtctgctgcagcggccgcggtggctgaggaggcccgagaggagtcggtggcagcggcggcggcgggaccggcagcagcagcagcagcagcagcagcaaccactagcctcctgccccgcggcgctgccgcacgagccccacgagccgctcaccccgccgttctcagcgctgcccgaccccgctggcgcgccctcccgccgccagtcccggcagcgccctcagttgtcctccgactcgccctcggccttccgcgccagccgcagccacagccgcaacgccacccgcagccacagccacagccacagccccaggcatagccttcggcacagccccggctccggctcctgcggcagctcctctgggcaccgtccctgcgccgacatcctggaggttgggatgctcttgtccaaaatcaactcgcttgcccacctgcgcgccgcgccctgcaacgacctgcacgccaccaagctggcgcccggcaaggagaaggagcccctggagtcgcagtaccaggtgggcccgctactgggcagcggcggcttcggctcggtctactcaggcatccgcgtctccgacaacttgccggtggccatcaaacacgtggagaaggaccggatttccgactggggagagctgcctaatggcactcgagtgcccatggaagtggtcctgctgaagaaggtgagctcgggtttctccggcgtcattaggctcctggactggttcgagaggcccgacagtttcgtcctgatcctggagaggcccgagccggtgcaagatctcttcgacttcatcacggaaaggggagccctgcaagaggagctggcccgcagcttcttctggcaggtgctggaggccgtgcggcactgccacaactgcggggtgctccaccgcgacatcaaggacgaaaacatccttatcgacctcaatcgcggcgagctcaagctcatcgacttcgggtcgggggcgctgctcaaggacaccgtctacacggacttcgatgggacccgagtgtatagccctccagagtggatccgctaccatcgctaccatggcaggtcggcggcagtctggtccctggggatcctgctgtatgatatggtgtgtggagatattcctttcgagcatgacgaagagatcatcaggggccaggttttcttcaggcagagggtctcttcagaatgtcagcatctcattagatggtgcttggccctgagaccatcagataggccaaccttcgaagaaatccagaaccatccatggatgcaagatgttctcctgccccaggaaactgctgagatccacctccacagcctgtcgccggggcccagcaaatagcagcctttctggcaggtcctcccctctcttgtcagatgcccgagggaggggaagcttctgtctccagcttcccgagtaccagtgacacgtctcgccaagcaggacagtgcttgatacaggaacaacatttacaactcattccagatcccaggcccctggaggctgcctcccaacagtggggaagagtgactctccaggggtcctaggcctcaactcctcccatagatactctcttcttctcataggtgtccagcattgctggactctgaaatatcccgggggtggggggtgggggtgggtcagaaccctgccatggaactgtttccttcatcatgagttctgctgaatgccgcgatgggtcaggtaggggggaaacaggttgggatgggataggactagcaccattttaagtccctgtcacctcttccgactctttctgagtgccttctgtggggactccggctgtgctgggagaaatacttgaacttgcctcttttacctgctgcttctccaaaaatctgcctgggttttgttccctatttttctctcctgtcctccctcaccccctccttcatatgaaaggtgccatggaagaggctacagggccaaacgctgagccacctgcccttttttctgcctcctttagtaaaactccgagtgaactggtcttcctttttggtttttacttaactgtttcaaagccaagacctcacacacacaaaaaatgcacaaacaatgcaatcaacagaaaagctgtaaatgtgtgtacagttggcatggtagtatacaaaaagattgtagtggatctaatttttaagaaattttgcctttaagttattttacctgtttttgtttcttgttttgaaagatgcgcattctaacctggaggtcaatgttatgtatttatttatttatttatttggttcccttcctattccaagcttccatagctgctgccctagttttctttcctcctttcctcctctgacttggggaccttttgggggagggctgcgacgcttgctctgtttgtggggtgacgggactcaggcgggacagtgctgcagctccctggcttctgtggggcccctcacctacttacccaggtgggtcccggctctgtgggtgatggggaggggcattgctgactgtgtatataggataattatgaaaagcagttctggatggtgtgccttccagatcctctctggggctgtgttttgagcagcaggtagcctgctggttttatctgagtgaaatactgtacaggggaataaaagagatcttatttttttttttatacttggcgttttttgaataaaaaccttttgtcttaaaaaaaaaaaaaaaaaaaaaaaaaaaaaaaaaaaaaaaggggggaaaaaaaaaaaaaaaaaaaaaaaaaaattttgggggggggccggggccccaaaaagatttttaaaaacctgggggggcgggcgggggcggcccccaaagatggaaggatggaaacactcgcgcgtccacacactgcggggtcccacgaagaaagaaaatgcccggcggctcaccacacaggcgcgtcgtggggcgctttccccccaaaataaaaagagcccgcgcgcgcgggagccaaccgagcggcgtctctactagaacccacaccccaggagaggagcgccgtcggagagagccccacacagcaccgggccatcacaacagaagagcgcgcctccccgagaggaccgcccgataaaataaaaaataccccgcccgcccgtgagcgacccccgtccgacacccgcaagctccacgcccccagcgccacgacagcgcacgtcacagcagccccgaccac

SEQ ID NO: 458516 - DNA, 2345 bp, Homo sapiens
gcgtctgctgcagcggccgcggtggctgaggaggcccgagaggagtcggtggcagcggcggcggcgggaccggcagcagcagcagcagcagcagcagcaaccactagcctcctgccccgcggcgctgccgcacgagccccacgagccgctcaccccgccgttctcagcgctgcccgaccccgctggcgcgccctcccgccgccagtcccggcagcgccctcagttgtcctccgactcgccctcggccttccgcgccagccgcagccacagccgcaacgccacccgcagccacagccacagccacagccccaggcatagccttcggcacagccccggctccggctcctgcggcagctcctctgggcaccgtccctgcgccgacatcctggaggttgggatgctcttgtccaaaatcaactcgcttgcccacctgcgcgccgcgccctgcaacgacctgcacgccaccaagctggcgcccggcaaggagaaggagcccctggagtcgcagtaccaggtgggcccgctactgggcagcggcggcttcggctcggtctactcaggcatccgcgtctccgacaacttgccggtggccatcaaacacgtggagaaggaccggatttccgactggggagagctgcctaatggcactcgagtgcccatggaagtggtcctgctgaagaaggtgagctcgggtttctccggcgtcattaggctcctggactggttcgagaggcccgacagtttcgtcctgatcctggagaggcccgagccggtgcaagatctcttcgacttcatcacggaaaggggagccctgcaagaggagctggcccgcagcttcttctggcaggtgctggaggccgtgcggcactgccacaactgcggggtgctccaccgcgacatcaaggacgaaaacatccttatcgacctcaatcgcggcgagctcaagctcatcgacttcgggtcgggggcgctgctcaaggacaccgtctacacggacttcgatgggacccgagtgtatagccctccagagtggatccgctaccatcgctaccatggcaggtcggcggcagtctggtccctggggatcctgctgtatgatatggtgtgtggagatattcctttcgagcatgacgaagagatcatcaggggccaggttttcttcaggcagagggtctcttcagaatgtcagcatctcattagatggtgcttggccctgagaccatcagataggccaaccttcgaagaaatccagaaccatccatggatgcaagatgttctcctgccccaggaaactgctgagatccacctccacagcctgtcgccggggcccagcaaatagcagcctttctggcaggtcctcccctctcttgtcagatgcccgagggaggggaagcttctgtctccagcttcccgagtaccagtgacacgtctcgccaagcaggacagtgcttgatacaggaacaacatttacaactcattccagatcccaggcccctggaggctgcctcccaacagtggggaagagtgactctccaggggtcctaggcctcaactcctcccatagatactctcttcttctcatagtgaaaggtgccatggaagaggctacagggccaaacgctgagccacctgcccttttttctgcctcctttagtaaaactccgagtgaactggtcttcctttttggtttttacttaactgtttcaaagccaagacctcacacacacaaaaaatgcacaaacaatgcaatcaacagaaaagctgtaaatgtgtgtacagttggcatggtagtatacaaaaagattgtagtggatctaatttttaagaaattttgcctttaagttattttacctgtttttgtttcttgttttgaaagatgcgcattctaacctggaggtcaatgttatgtatttatttatttatttatttggttcccttcctattccaagcttccatagctgctgccctagttttctttcctcctttcctcctctgacttggggaccttttgggggagggctgcgacgcttgctctgtttgtggggtgacgggactcaggcgggacagtgctgcagctccctggcttctgtggggcccctcacctacttacccaggtgggtcccggctctgtgggtgatggggaggggcattgctgactgtgtatataggataattatgaaaagcagttctggatggtgtgccttccagatcctctctggggctgtgttttgagcagcaggtagcctgctggttttatctgagtgaaatactgtacaggggaataaaagagatcttatttttttttttatacttggcgttttttgaataaaaaccttttgtcttaa

SEQ ID NO: 458517 - DNA, 2082 bp, Homo sapiens
gcgtctgctgcagcggccgcggtggctgaggaggcccgagaggagtcggtggcagcggcggcggcgggaccggcagcagcagcagcagcagcagcagcaaccactagcctcctgccccgcggcgctgccgcacgagccccacgagccgctcaccccgccgttctcagcgctgcccgaccccgctggcgcgccctcccgccgccagtcccggcagcgccctcagttgtcctccgactcgccctcggccttccgcgccagccgcagccacagccgcaacgccacccgcagccacagccacagccacagccccaggcatagccttcggcacagccccggctccggctcctgcggcagctcctctgggcaccgtccctgcgccgacatcctggaggttgggatgctcttgtccaaaatcaactcgcttgcccacctgcgcgccgcgccctgcaacgacctgcacgccaccaagctggcgcccggcaaggagaaggagcccctggagtcgcagtaccaggtgggcccgctactgggcagcggcggcttcggctcggtctactcaggcatccgcgtctccgacaacttgccggtggccatcaaacacgtggagaaggaccggatttccgactggggagagctgcctaatggcactcgagtgcccatggaagtggtcctgctgaagaaggtgagctcgggtttctccggcgtcattaggctcctggactggttcgagaggcccgacagtttcgtcctgatcctggagaggcccgagccggtgcaagatctcttcgacttcatcacggaaaggggagccctgcaagaggagctggcccgcagcttcttctggcaggtgctggaggccgtgcggcactgccacaactgcggggtgctccaccgcgacatcaaggacgaaaacatccttatcgacctcaatcgcggcgagctcaagctcatcgacttcgggtcgggggcgctgctcaaggacaccgtctacacggacttcgatgggacccgagtgtatagccctccagagtggatccgctaccatcgctaccatggcaggtcggcggcagtctggtccctggggatcctgctgtatgatatggtgtgtggagatattcctttcgagcatgacgaagagatcatcaggggccaggttttcttcaggcagagggtctcttcagaatgtcagcatctcattagatggtgcttggccctgagaccatcagataggccaaccttcgaagaaatccagaaccatccatggatgcaagatgttctcctgccccaggaaactgctgagatccacctccacagcctgtcgccggggcccagcaaatagcagcctttctggcaggtcctcccctctcttgtcagatgcccgagggaggggaagcttctgtctccagcttcccgagtaccagtgacacgtctcgccaagcaggacagtgcttgatacaggaacaacatttacaactcattccagatcccaggcccctggaggctgcctcccaacagtggggaagagtgactctccaggggtcctaggcctcaactcctcccatagatactctcttcttctcataggtgtccagcattgctggactctgaaatatcccgggggtggggggtgggggtgggtcagaaccctgccatggaactgtttccttcatcatgagttctgctgaatgccgcgatgggtcaggtaggggggaaacaggttgggatgggataggactagcaccattttaagtccctgtcacctcttccgactctttctgagtgccttctgtggggactccggctgtgctgggagaaatacttgaacttgcctcttttacctgctgcttctccaaaaatctgcctgggttttgttccctatttttctctcctgtcctccctcaccccctccttcatatgaaaggtgccatggaagaggctacagggccaaacgctgagccacctgcccttttttctgcctcctttagtaaaactccgagtgaactggtcttcctttctgcgcctccgtaccttaacctcttgtccaccgaaccagaccctctcacaccacacgcgctcccccaa

SEQ ID NO: 458518 - DNA, 1496 bp, Homo sapiens
gcgtctgctgcagcggccgcggtggctgaggaggcccgagaggagtcggtggcagcggcggcggcgggaccggcagcagcagcagcagcagcagcagcaaccactagcctcctgccccgcggcgctgccgcacgagccccacgagccgctcaccccgccgttctcagcgctgcccgaccccgctggcgcgccctcccgccgccagtcccggcagcgccctcagttgtcctccgactcgccctcggccttccgcgccagccgcagccacagccgcaacgccacccgcagccacagccacagccacagccccaggcatagccttcggcacagccccggctccggctcctgcggcagctcctctgggcaccgtccctgcgccgacatcctggaggttgggatgctcttgtccaaaatcaactcgcttgcccacctgcgcgccgcgccctgcaacgacctgcacgccaccaagctggcgcccggcaaggagaaggagcccctggagtcgcagtaccaggtgggcccgctactgggcagcggcggcttcggctcggtctactcaggcatccgcgtctccgacaacttgccggtggccatcaaacacgtggagaaggaccggatttccgactggggagagctgcctaatggcactcgagtgcccatggaagtggtcctgctgaagaaggtgagctcgggtttctccggcgtcattaggctcctggactggttcgagaggcccgacagtttcgtcctgatcctggagaggcccgagccggtgcaagatctcttcgacttcatcacggaaaggggagccctgcaagaggagctggcccgcagcttcttctggcaggtgctggaggccgtgcggcactgccacaactgcggggtgctccaccgcgacatcaaggacgaaaacatccttatcgacctcaatcgcggcgagctcaagctcatcgacttcgggtcgggggcgctgctcaaggacaccgtctacacggacttcgatgggacccgagtgtatagccctccagagtggatccgctaccatcgctaccatggcaggtcggcggcagtctggtccctggggatcctgctgtatgatatggtgtgtggagatattcctttcgagcatgacgaagagatcatcaggggccaggttttcttcaggcagagggtctcttcagaatgtcagcatctcattagatggtgcttggccctgagaccatcagataggccaaccttcgaagaaatccagaaccatccatggatgcaagatgttctcctgccccaggaaactgctgagatccacctccacagcctgtcgccggggcccagcaaatagcagcctttctggcaggtcctcccctctctggggctgtgttttgagcagcaggtagcctgctggttttatctgagtgaaatactgtacaggggaataaaagagatcttatttttttttttatacttggcgttttttgaataaaaaccttttgtcttaa

SEQ ID NO: 458519 - DNA, 350 bp, Homo sapiens
  misc_feature (37)..(37): n is a, c, g, or t
gatttcggaacgagggagcagaggctgcttttattancacagatgtcttcgaccccacataagcaagtacacagatgatacagaagaagaccttgataatgaaataagccaactaatagactctcagccattcagcagcatatcagatgacttatttggcccatccgagtctgtgtagcagacaggtctatttaaactttcaaatgaacagggtaaagttgcatctaaagtaccacagatacaaccatgtttaaatcctcgtatgcactctggcctgcttctccagttacttgcttgtgtaagaacaaaaatgagaaaggttgttttccagtaaaaacatgaccagctta

SEQ ID NO: 458520 - DNA, 5113 bp, Homo sapiens
gaggcgccggtcccggccccgctgccgccgccgccacaccggcccttcgggagcgtctgaggaggcgcgggccgctgcgggctcgggcgccgcagcgcgccggcccgagcccctggacgaggcccacggagccgctcgccccgacccagccgcccgatgtcctcaaaatggaggcagcgggggcggcggcgtgaagaaagcggcgctgtgggcgcgggagtaggggcccgggcggaggcggtggcgggatggggctgctgctcatgatcctggcgtcggccgtgctgggttccttcctcacgctcctcgcccagttcttcctgctgtaccgcagacagcccgagccgccggcggacgaggccgcccgcgcgggcgagggcttccgctacatcaagccagtgccgggcctgctcctaagggagtacctttatggcggcggccgggatgaggagccctccggagcggcccctgagggcggcgcgacccccaccgcggcccccgagacccccgccccgccgacgcgggagacttgctacttcctcaacgccaccatcctattcctgttccgggagttgcgggacaccgcgctgacccgccgctgggtcaccaagaagatcaaggtggagttcgaggagctgctgcagaccaagacggccgggcgcctgctggaggggctgagcctgcgggacgtgttcctgggcgagacggtgcccttcatcaagaccatccggctcgtgcggccagtcgtgccctcggccaccggggagcccgatggccctgaaggggaggcgctgcccgccgcctgccccgaggagctggccttcgaggcggaggtggagtacaacgggggcttccacctggccatcgacgtggacctggtcttcggcaagtccgcctacttgtttgtcaagctgtcccgcgtggtgggaaggctgcgcttggtctttacgcgcgtgcccttcacccactggttcttctccttcgtggaagacccgctgatcgacttcgaggtgcgctcgcagtttgaagggcggcccatgccccagctcacctccatcatcgtcaaccagctcaagaagatcatcaagcgcaagcacaccctaccgaattacaagatcaggtttaagccgttttttccataccagaccttgcaaggatttgaagaagatgaagagcatatccatatacaacaatgggcacttactgaaggccgtcttaaagttacgttgttagaatgtagcaggttactcatttttggatcctatgacagagaggcaaatgttcattgcacacttgagttaagcagtagtgtttgggaagaaaaacagaggagttctattaagacggttgaattaatggaaatttacaaagtgttggacttacacttcgtcttgtccagtcaactgatgggtatgctgggcacgtcatcattgaaactgtggctccaaactcgcctgctgcaattgcagatcttcagcggggagatcgacttatcgccattggaggtggtgtgaaaatcacatcaacactgcaagtgttgaagcttatcaagcaggctggtgactggtcctggtgtactatgggcctgttggccagagtaatcaaggtgcagtgctgcaagataactttggccagttggaagaaaactttttgtcaagctcatgccaatcgggttatgaagaggaagctgccgggttgacagtagatactgaaagtagagagctggattctgaatttgaagacttggcaagtgatgtcagagcacaaaatgagttcaaagatgaggcacaatcattaagtcatagtcccaaacgtgttccaacaacactttctattaaaccccttggagctatatcaccagttttaaaccgtaaattagctgtaggaagtcacccactaccaccgaaaattcagtccaaagatggaaataaacctccacccctaaaaacttctgagataacagacccagcacaagtgtcaaaaccaacccaaggatctgctttcaaaccacctgtgccaccacgaccacaagcgaaagttcctttgccttccgccgatgctccaaatcaggcagaaccagatgttctcgttgaaaagccagagaaggtggtgccacctcctcttgtagataaatctgctgaaaagcaagcaaaaaatgtggatgccatagacgatgcagctgcacctaagcaatttttagcaaagcaagaagtggccaaagatgtcacttcagaaacttcctgccctactaaggacagttcggacgaccgtcaaacatgggaatcatcagaaattctttatcgtaataagctaggaaaatggacaagaaccagagcatcctgtttgtttgacatagaagcctgtcacaggtacttaaacattgcattgtggtgcagggatcctttcaagttgggaggtctcatctgtttggggcatgttagtttaaaacttgaagatgtggctttaggatgcctagctacatcaaacacggaatacctttccaaattgagactggaagccccctcacctaaggctatagtcactagaaccgcactacgcaatctgagtatgcaaaagggattcaatgacaaattttgctatggtgacattactattcacttcaaatatttgaaagaaggagaatcagaccaccatgtagttactaacgtagaaaaagaaaaagaaccccatttggttgaagaagtttctgttctccctaaagaggagcaatttgttggacagatgggtttaacagaaaacaaacacagttttcaggatactcagttccagaacccaacatggtgtgactactgtaagaaaaaagtttggactaaagcagcttcccagtgtatgttttgtgcttatgtttgccataaaaaatgtcaagaaaagtgtctagctgagacttctgtttgtggagcaactgataggcgaatagacaggacactgaaaaaccttaggctggaaggacaggaaaccctcttaggcctgcctcctcgtgttgatgctgaagctagcaagtcagtcaataaaacaacaggtttgacaaggcatattatcaatactagttctcgtttattaaatttgcgtcaagtctctaaaactcgcctttctgaaccaggaaccgatctcgtagaaccttcaccaaaacacacacccaacacgtcagacaacgaaggcagtgacacggaggtctgtggtccaaacagtccttctaaacggggaaacagcacaggaataaagttagtgagaaaagagggtggtctggatgacagtgttttcattgcagttaaagaaattggtcgtgatctgtacaggggcttgcctacagaggaaaggatccagaaactagagttcatgttggataagctacagaatgaaattgatcaggagttggaacacaataattcccttgttagagaagaaaaagagacaactgatacaaggaaaaaatcacttctttctgctgccttagctaaatcaggtgaaaggctacaagctctaacacttcttatgattcactacagagcaggcattgaagatatagaaactttagaaagtctgtctttagaccagcactccaaaaaaataagcaagtacacagatgatacagaagaagaccttgataatgaaataagccaactaatagactctcagccattcagcagcatatcagatgacttatttggcccatccgagtctgtgtagcagacaggtctatttaaactttcaaatgaacagggtaaagttgcatctaaagtaccacagatacaaccatgtttaaatcctcgtatgcactctggcctgcttctccagttacttgcttgtgtaagaacaaaaatgagaaaggttgttttccagtaaaaacatgaccagcttactaattggttgttttggattgcatttatagctatgcttttttgggtttatactgggaatttatttttactaaattatttaacttttctaattatgtaattatgtaagctagcttttcatgtttatgtatgtatggtgtccccttgtgttatttttcttcctcttggtttttgaattagtgttaaatagaatactgtctagattcttaaaatattttcatttccatcatggttataacaaatttgctgcatgcccaaactgacaacagcaatcactgagggaacaggttttgaatctttcttttgtgttatgaagtttatcgtctctacttgcttgagatttttgttattttgggggtttgggggtgctttttgttttgtttttgccaaatgtaacatgaaagcagatgctgcagctttagtctgttatgctgatttagtaaaaaaaaattttttacatatattgcttgctttcgatgcttctgtgaaatttttttctaaagcttttgtgcagctgtatggtaaaaatatggtgattaatttgaagagcttacattgaaagacaatgtaataggaaataaatgtagattgcagttggtcaagaattttgtagagaggataacaagacttaattactgaaaaacagtaacatagcattttgaaatataatcttttaaaatattgatgctttccttttaaatggaaatttaaattttatgattaaaagtttaaacatttatgataattttcctcatcagttctcccataggaaataaagcatgtgaaagggtatttaaagttttggaggactctttttaaaatgactgtgttgataactagtttgggctggttttgttttagaaaaaacattttcatgtaggagtattctgtgaaggaaaggaatcatgcaaaatatactttttgctttggcgtcttacagttgtaaaggaatggtgatcattctgaatacttctgtagtgagtattcattaagaaaagaatgacaaaaatagtattcatacataggaattgggaccagttctctgaaaatgaagatatactcacactgggtccattttacgggtcccagtaacatttgactgagggaaaacaagtaagctcgactgttgttggggtaccttaatggtttcggtctgttatatacctataaaatagacaagtatatgtttgtccctttgtaggtaactgctatgatgattgctatatagtgaaact

SEQ ID NO: 458521 - DNA, 4339 bp, Homo sapiens
gaggcgccggtcccggccccgctgccgccgccgccacaccggcccttcgggagcgtctgaggaggcgcgggccgctgcgggctcgggcgccgcagcgcgccggcccgagcccctggacgaggcccacggagccgctcgccccgacccagccgcccgatgtcctcaaaatggaggcagcgggggcggcggcgtgaagaaagcggcgctgtgggcgcgggagtaggggcccgggcggaggcggtggcgggatggggctgctgctcatgatcctggcgtcggccgtgctgggttccttcctcacgctcctcgcccagttcttcctgctgtaccgcagacagcccgagccgccggcggacgaggccgcccgcgcgggcgagggcttccgctacatcaagccagtgccgggcctgctcctaagggagtacctttatggcggcggccgggatgaggagccctccggagcggcccctgagggcggcgcgacccccaccgcggcccccgagacccccgccccgccgacgcgggagacttgctacttcctcaacgccaccatcctattcctgttccgggagttgcgggacaccgcgctgacccgccgctgggtcaccaagaagatcaaggtggagttcgaggagctgctgcagaccaagacggccgggcgcctgctggaggggctgagcctgcgggacgtgttcctgggcgagacggtgcccttcatcaagaccatccggctcgtgcggccagtcgtgccctcggccaccggggagcccgatggccctgaaggggaggcgctgcccgccgcctgccccgaggagctggccttcgaggcggaggtggagtacaacgggggcttccacctggccatcgacgtggacctggtcttcggcaagtccgcctacttgtttgtcaagctgtcccgcgtggtgggaaggctgcgcttggtctttacgcgcgtgcccttcacccactggttcttctccttcgtggaagacccgctgatcgacttcgaggtgcgctcgcagtttgaagggcggcccatgccccagctcacctccatcatcgtcaaccagctcaagaagatcatcaagcgcaagcacaccctaccgaattacaagatcaggtttaagccgttttttccataccagaccttgcaaggatttgaagaagatgaagagcatatccatatacaacaatgggcacttactgaaggccgtcttaaagttacgttgttagaatgtagcaggttactcatttttggatcctatgacagagaggcaaatgttcattgcacacttgagttaagcagtagtgtttgggaagaaaaacagaggagttctattaagacggttgaattaatggaaatttacaaagtgttggacttacacttcgtcttgtccagtcaactgatgggtatgctgggcacgtcatcattgaaactgtggctccaaactcgcctgctgcaattgcagatcttcagcggggagatcgacttatcgccattggaggtggtgtgaaaatcacatcaacactgcaagtgttgaagcttatcaagcaggctggtgactggtcctggtgtactatgggcctgttggccagagtaatcaaggtgcagtgctgcaagataactttggccagttggaagaaaactttttgtcaagctcatgccaatcgggttatgaagaggaagctgccgggttgacagtagatactgaaagtagagagctggattctgaatttgaagacttggcaagtgatgtcagagcacaaaatgagttcaaagatgaggcacaatcattaagtcatagtcccaaacgtgttccaacaacactttctattaaaccccttggagctatatcaccagttttaaaccgtaaattagctgtaggaagtcacccactaccaccgaaaattcagtccaaagatggaaataaacctccacccctaaaaacttctgagataacagacccagcacaagtgtcaaaaccaacccaaggatctgctttcaaaccacctgtgccaccacgaccacaagcgaaagttcctttgccttccgccgatgctccaaatcaggcagaaccagatgttctcgttgaaaagccagagaaggtggtgccacctcctcttgtagataaatctgctgaaaagcaagcaaaaaatgtggatgccatagacgatgcagctgcacctaagcaatttttagcaaagcaagaagtggccaaagatgtcacttcagaaacttcctgccctactaaggacagttcggacgaccgtcaaacatgggaatcatcagaaattctttatcgtaataagctaggaaaatggacaagaaccagagcatcctgtttgtttgacatagaagcctgtcacaggtacttaaacattgcattgtggtgcagggatcctttcaagttgggaggtctcatctgtttggggcatgttagtttaaaacttgaagatgtggctttaggatgcctagctacatcaaacacggaatacctttccaaattgagactggaagccccctcacctaaggctatagtcactagaaccgcactacgcaatctgagtatgcaaaagggattcaatgacaaattttgctatggtgacattactattcacttcaaatatttgaaagaaggagaatcagaccaccatgtagttactaacgtagaaaaagaaaaagaaccccatttggttgaagaagtttctgttctccctaaagaggagcaatttgttggacagatgggtttaacagaaaacaaacacagttttcaggatactcagttccagaacccaacatggtgtgactactgtaagaaaaaagtttggactaaagcagcttcccagtgtatgttttgtgcttatgtttgccataaaaaatgtcaagaaaagtgtctagctgagacttctgtttgtggagcaactgataggcgaatagacaggacactgaaaaaccttaggctggaaggacaggaaaccctcttaggcctgcctcctcgtgttgatgctgaagctagcaagtcagtcaataaaacaacaggtttgacaaggcatattatcaatactagttctcgtttattaaatttgcgtcaagtctctaaaactcgcctttctgaaccaggaaccgatctcgtagaaccttcaccaaaacacacacccaacacgtcagacaacgaaggcagtgacacggaggtctgtggtccaaacagtccttctaaacggggaaacagcacaggaataaagttagtgagaaaagagggtggtctggatgacagtgttttcattgcagttaaagaaattggtcgtgatctgtacaggggcttgcctacagaggaaaggatccagaaactagagttcatgttggataagctacagaatgaaattgatcaggagttggaacacaataattcccttgttagagaagaaaaagagacaactgatacaaggaaaaaatcacttctttctgctgccttagctaaatcaggtgaaaggctacaagctctaacacttcttatgattcactacagagcaggcattgaagatatagaaactttagaaagtctgtctttagaccagcactccaaaaaaataagcaagtacacagatgatacagaagaagaccttgataatgaaataagccaactaatagactctcagccattcagcagcatatcagatgacttatttggcccatccgagtctgtgtagcagacaggtctatttaaactttcaaatgaacagggtaaagttgcatctaaagtaccacagatacaaccatgtttaaatcctcgtatgcactctggcctgcttctccagttacttgcttgtgtaagaacaaaaatgagaaaggttgttttccagtaaaaacatgaccagcttactaattggttgttttggattgcatttatagctatgcttttttgggtttatactgggaatttatttttactaaattatttaacttttctaattatgtaattatgtaagctagcttttcatgtttatgtatgtatggtgtccccttgtgttatttttcttcctcttggtttttgaattagtgttaaatagaatactgtctagattcttaaaatattttcatttccatcatggttataacaaatttgctgcatgcccaaactgacaacagcaatcactgagggaacaggttttgaatctttcttttgtgttatgaagtttatcgtctctacttgcttgagatttttgttattttgggggtttgggggtgctttttgttttgtttttgccaaatgtaacatgaaagcagatgctgcagctttagtctgttatgctgatttagtaaaaaaaaattttttacata

SEQ ID NO: 458522 - DNA, 3086 bp, Homo sapiens
gaacagcattaatggaccccagttggtaaatcggttatggcacacccataaaatgaaattctccaccccatcggcgtgacccgccgctgggtcaccaagaagatcaaggtggagttcgaggagctgctgcagaccaagacggccgggcgcctgctggaggggctgagcctgcgggacgtgttcctgggcgagacggtgcccttcatcaagaccatccggctcgtgcggccagtcgtgccctcggccaccggggagcccgatggccctgaaggggaggcgctgcccgccgcctgccccgaggagctggccttcgaggcggaggtggagtacaacgggggcttccacctggccatcgacgtggacctggtcttcggcaagtccgcctacttgtttgtcaagctgtcccgcgtggtgggaaggctgcgcttggtctttacgcgcgtgcccttcacccactggttcttctccttcgtggaagacccgctgatcgacttcgaggtgcgctcgcagtttgaagggcggcccatgccccagctcacctccatcatcgtcaaccagctcaagaagatcatcaagcgcaagcacaccctaccgaattacaagatcaggttgaattaatggaaatttacaaagtgttggacttacacttcgtcttgtccagtcaactgatgggtatgctgggcacgtcatcattgaaactgtggctccaaactcgcctgctgcaattgcagatcttcagcggggagatcgacttatcgccattggaggtgtggtcctggtgtactatgggcctgttggccagagtaatcaaggtgcagtgctgcaagataactttggccagttggaagaaaactttttgtcaagctcatgccaatcgggttatgaagaggaagctgccgggttgacagtagatactgaaagtagagagctggattctgaatttgaagacttggcaagtgatgtcagagcacaaaatgagttcaaagatgaggcacaatcattaagtcatagtcccaaacgtgttccaacaacactttctattaaaccccttggagctatatcaccagttttaaaccgtaaattagctgtaggaagtcacccactaccaccgaaaattcagtccaaagatggaaataaacctccacccctaaaaacttctgagataacagacccagcacaagtgtcaaaaccaacccaaggatctgctttcaaaccacctgtgccaccacgaccacaagcgaaagttcctttgccttccgccgatgctccaaatcaggcagaaccagatgttctcgttgaaaagccagagaaggtggtgccacctcctcttgtagataaatctgctgaaaagcaagcaaaaaatgtggatgccatagacgatgcagctgcacctaagcaatttttagcaaagcaagaagtggccaaagatgtcacttcagaaacttcctgccctactaaggacagttcggacgaccgtcaaacatgggaatcatcagaaattctttatcgtaataagctaggaaaatggacaagaaccagagcatcctgtttgtttgacatagaagcctgtcacaggtacttaaacattgcattgtggtgcagggatcctttcaagttgggaggtctcatctgtttggggcatgttagtttaaaacttgaagatgtggctttaggatgcctagctacatcaaacacggaatacctttccaaattgagactggaagccccctcacctaaggctatagtcactagaaccgcactacgcaatctgagtatgcaaaagggattcaatgacaaattttgctatggtgacattactattcacttcaaatatttgaaagaaggagaatcagaccaccatgtagttactaacgtagaaaaagaaaaagaaccccatttggttgaagaagtttctgttctccctaaagaggagcaatttgttggacagatgggtttaacagaaaacaaacacagttttcaggatactcagttccagaacccaacatggtgtgactactgtaagaaaaaagtttggactaaagcagcttcccagtgtatgttttgtgcttatgtttgccataaaaaatgtcaagaaaagtgtctagctgagacttctgtttgtggagcaactgataggcgaatagacaggacactgaaaaaccttaggctggaaggacaggaaaccctcttaggcctgcctcctcgtgttgatgctgaagctagcaagtcagtcaataaaacaacaggtttgacaaggcatattatcaatactagttctcgtttattaaatttgcgtcaagtctctaaaactcgcctttctgaaccaggaaccgatctcgtagaaccttcaccaaaacacacacccaacacgtcagacaacgaaggcagtgacacggaggtctgtggtccaaacagtccttctaaacggggaaacagcacaggaataaagttagtgagaaaagagggtggtctggatgacagtgttttcattgcagttaaagaaattggtcgtgatctgtacaggggcttgcctacagaggaaaggatccagaaactagagttcatgttggataagctacagaatgaaattgatcaggagttggaacacaataattcccttgttagagaagaaaaagagacaactgatacaaggaaaaaatcacttctttctgctgccttagctaaatcaggtgaaaggctacaagctctaacacttcttatgattcactacagagcaggcattgaagatatagaaactttagaaagtctgtctttagaccagcactccaaaaaaataagcaagtacacagatgatacagaagaagaccttgataatgaaataagccaactaatagactctcagccattcagcagcatatcagatgacttatttggcccatccgagtctgtgtagcagacaggtctatttaaactttcaaatgaacagggtaaagttgcatctaaagtaccacagatacaaccatgtttaaatcctcgtatgcactctggcctgcttctccagttacttgcttgtgtaagaacaaaaatgagaaaggttgttttccagtaaaaacatgaccagctta

SEQ ID NO: 458523 - DNA, 3986 bp, Homo sapiens
gaggcgccggtcccggccccgctgccgccgccgccacaccggcccttcgggagcgtctgaggaggcgcgggccgctgcgggctcgggcgccgcagcgcgccggcccgagcccctggacgaggcccacggagccgctcgccccgacccagccgcccgatgtcctcaaaatggaggcagcgggggcggcggcgtgaagaaagcggcgctgtgggcgcgggagtaggggcccgggcggaggcggtggcgggatggggctgctgctcatgatcctggcgtcggccgtgctgggttccttcctcacgctcctcgcccagttcttcctgctgtaccgcagacagcccgagccgccggcggacgaggccgcccgcgcgggcgagggcttccgctacatcaagccagtgccgggcctgctcctaagggagtacctttatggcggcggccgggatgaggagccctccggagcggcccctgagggcggcgcgacccccaccgcggcccccgagacccccgccccgccgacgcgggagacttgctacttcctcaacgccaccatcctattcctgttccgggagttgcgggacaccgcgctgacccgccgctgggtcaccaagaagatcaaggtggagttcgaggagctgctgcagaccaagacggccgggcgcctgctggaggggctgagcctgcgggacgtgttcctgggcgagacggtgcccttcatcaagaccatccggctcgtgcggccagtcgtgccctcggccaccggggagcccgatggccctgaaggggaggcgctgcccgccgcctgccccgaggagctggccttcgaggcggaggtggagtacaacgggggcttccacctggccatcgacgtggacctggtcttcggcaagtccgcctacttgtttgtcaagctgtcccgcgtggtgggaaggctgcgcttggtctttacgcgcgtgcccttcacccactggttcttctccttcgtggaagacccgctgatcgacttcgaggtgcgctcgcagtttgaagggcggcccatgccccagctcacctccatcatcgtcaaccagctcaagaagatcatcaagcgcaagcacaccctaccgaattacaagatcaggtttaagccgttttttccataccagaccttgcaaggatttgaagaagatgaagagcatatccatatacaacaatgggcacttactgaaggccgtcttaaagttacgttgttagaatgtagcaggttactcatttttggatcctatgacagagaggcaaatgttcattgcacacttgagttaagcagtagtgtttgggaagaaaaacagaggagttctattaagacggttgaattaatggaaatttacaaagtgttggacttacacttcgtcttgtccagtcaactgatgggtatgctgggcacgtcatcattgaaactgtggctccaaactcgcctgctgcaattgcagatcttcagcggggagatcgacttatcgccattggaggtgttcaaactgagagatgtcatctaacctaagaagagatagaaagcaattaggagttagcatcctggcactctttttgggatcctgtgtcatcatctggtttgaaaaggtgtgaaaatcacatcaacactgcaagtgttgaagcttatcaagcaggctggtgactggtcctggtgtactatgggcctgttggccagagtaatcaaggtgcagtgctgcaagataactttggccagttggaagaaaactttttgtcaagctcatgccaatcgggttatgaagaggaagctgccgggttgacagtagatactgaaagtagagagctggattctgaatttgaagacttggcaagtgatgtcagagcacaaaatgagttcaaagatgaggcacaatcattaagtcatagtcccaaacgtgttccaacaacactttctattaaaccccttggagctatatcaccagttttaaaccgtaaattagctgtaggaagtcacccactaccaccgaaaattcagtccaaagatggaaataaacctccacccctaaaaacttctgagataacagacccagcacaagtgtcaaaaccaacccaaggatctgctttcaaaccacctgtgccaccacgaccacaagcgaaagttcctttgccttccgccgatgctccaaatcaggcagaaccagatgttctcgttgaaaagccagagaaggtggtgccacctcctcttgtagataaatctgctgaaaagcaagcaaaaaatgtggatgccatagacgatgcagctgcacctaagcaatttttagcaaagcaagaagtggccaaagatgtcacttcagaaacttcctgccctactaaggacagttcggacgaccgtcaaacatgggaatcatcagaaattctttatcgtaataagctaggaaaatggacaagaaccagagcatcctgtttgtttgacatagaagcctgtcacaggtacttaaacattgcattgtggtgcagggatcctttcaagttgggaggtctcatctgtttggggcatgttagtttaaaacttgaagatgtggctttaggatgcctagctacatcaaacacggaatacctttccaaattgagactggaagccccctcacctaaggctatagtcactagaaccgcactacgcaatctgagtatgcaaaagggattcaatgacaaattttgctatggtgacattactattcacttcaaatatttgaaagaaggagaatcagaccaccatgtagttactaacgtagaaaaagaaaaagaaccccatttggttgaagaagtttctgttctccctaaagaggagcaatttgttggacagatgggtttaacagaaaacaaacacagttttcaggatactcagttccagaacccaacatggtgtgactactgtaagaaaaaagtttggactaaagcagcttcccagtgtatgttttgtgcttatgtttgccataaaaaatgtcaagaaaagtgtctagctgagacttctgtttgtggagcaactgataggcgaatagacaggacactgaaaaaccttaggctggaaggacaggaaaccctcttaggcctgcctcctcgtgttgatgctgaagctagcaagtcagtcaataaaacaacaggtttgacaaggcatattatcaatactagttctcgtttattaaatttgcgtcaagtctctaaaactcgcctttctgaaccaggaaccgatctcgtagaaccttcaccaaaacacacacccaacacgtcagacaacgaaggcagtgacacggaggtctgtggtccaaacagtccttctaaacggggaaacagcacaggaataaagttagtgagaaaagagggtggtctggatgacagtgttttcattgcagttaaagaaattggtcgtgatctgtacaggggcttgcctacagaggaaaggatccagaaactagagttcatgttggataagctacagaatgaaattgatcaggagttggaacacaataattcccttgttagagaagaaaaagagacaactgatacaaggaaaaaatcacttctttctgctgccttagctaaatcaggtgaaaggctacaagctctaacacttcttatgattcactacagagcaggcattgaagatatagaaactttagaaagtctgtctttagaccagcactccaaaaaaataagcaagtacacagatgatacagaagaagaccttgataatgaaataagccaactaatagactctcagccattcagcagcatatcagatgacttatttggcccatccgagtctgtgtagcagacaggtctatttaaactttcaaatgaacagggtaaagttgcatctaaagtaccacagatacaaccatgtttaaatcctcgtatgcactctggcctgcttctccagttacttgcttgtgtaagaacaaaaatgagaaaggttgttttccagtaaaaacatgaccagctta

SEQ ID NO: 458524 - DNA, 3479 bp, Homo sapiens
caaagtgaactgaaacatgtatctgagtgctgtgattttggtttcttaaacataatttatggaacatattttaacattttttatggttaaacgttgtcattataaacacaggctgatgacatgtaacccatactattgtgaaatcagtattgaaggagagtggcttctttttagacagacagacacacagacacacacacactctcacacacacacacacacacacacacacccataaattatgttgattgtggtctccagcagttaagcatgttgaattcaaggtctgtccaggcaccatactggcacagtatccttctcccattcccacacacaaacaaaatactaaacacatatgtgtttgcaaccttctctgacactccagaagacttgatttttaatttcacatttttagaaaggtcaatattgataaactgtagattatacttttcttggattgatatagaataacaaacttgcttttactagtctggtatataattgccaattttcatgaaatcacaatgctttagaacacatttctctttattctgtaatcagcacattgagtatttacgcctgtgaattcttcatgtattgtagggagaatggagctgatgatatggtgggtggggtactgaatgtctgggcttgatttgcataactttgatagaaaagctagaaaatttttcacttctcagcattaatagttcttgttggtttaagccgttttttccataccagaccttgcaaggatttgaagaagatgaagagcatatccatatacaacaatgggcacttactgaaggccgtcttaaagttacgttgttagaatgtagcaggttactcatttttggatcctatgacagagaggcaaatgttcattgcacacttgagttaagcagtagtgtttgggaagaaaaacagaggagttctattaagacggttgaattaatggaaatttacaaagtgttggacttacacttcgtcttgtccagtcaactgatgggtatgctgggcacgtcatcattgaaactgtggctccaaactcgcctgctgcaattgcagatcttcagcggggagatcgacttatcgccattggaggtggtgtgaaaatcacatcaacactgcaagtgttgaagcttatcaagcaggctggtgactggtcctggtgtactatgggcctgttggccagagtaatcaaggtgcagtgctgcaagataactttggccagttggaagaaaactttttgtcaagctcatgccaatcgggttatgaagaggaagctgccgggttgacagtagatactgaaagtagagagctggattctgaatttgaagacttggcaagtgatgtcagagcacaaaatgagttcaaagatgaggcacaatcattaagtcatagtcccaaacgtgttccaacaacactttctattaaaccccttggagctatatcaccagttttaaaccgtaaattagctgtaggaagtcacccactaccaccgaaaattcagtccaaagatggaaataaacctccacccctaaaaacttctgagataacagacccagcacaagtgtcaaaaccaacccaaggatctgctttcaaaccacctgtgccaccacgaccacaagcgaaagttcctttgccttccgccgatgctccaaatcaggcagaaccagatgttctcgttgaaaagccagagaaggtggtgccacctcctcttgtagataaatctgctgaaaagcaagcaaaaaatgtggatgccatagacgatgcagctgcacctaagcaatttttagcaaagcaagaagtggccaaagatgtcacttcagaaacttcctgccctactaaggacagttcggacgaccgtcaaacatgggaatcatcagaaattctttatcgtaataagctaggaaaatggacaagaaccagagcatcctgtttgtttgacatagaagcctgtcacaggtacttaaacattgcattgtggtgcagggatcctttcaagttgggaggtctcatctgtttggggcatgttagtttaaaacttgaagatgtggctttaggatgcctagctacatcaaacacggaatacctttccaaattgagactggaagccccctcacctaaggctatagtcactagaaccgcactacgcaatctgagtatgcaaaagggattcaatgacaaattttgctatggtgacattactattcacttcaaatatttgaaagaaggagaatcagaccaccatgtagttactaacgtagaaaaagaaaaagaaccccatttggttgaagaagtttctgttctccctaaagaggagcaatttgttggacagatgggtttaacagaaaacaaacacagttttcaggatactcagttccagaacccaacatggtgtgactactgtaagaaaaaagtttggactaaagcagcttcccagtgtatgttttgtgcttatgtttgccataaaaaatgtcaagaaaagtgtctagctgagacttctgtttgtggagcaactgataggcgaatagacaggacactgaaaaaccttaggctggaaggacaggaaaccctcttaggcctgcctcctcgtgttgatgctgaagctagcaagtcagtcaataaaacaacaggtttgacaaggcatattatcaatactagttctcgtttattaaatttgcgtcaagtctctaaaactcgcctttctgaaccaggaaccgatctcgtagaaccttcaccaaaacacacacccaacacgtcagacaacgaaggcagtgacacggaggtctgtggtccaaacagtccttctaaacggggaaacagcacaggaataaagttagtgagaaaagagggtggtctggatgacagtgttttcattgcagttaaagaaattggtcgtgatctgtacaggggcttgcctacagaggaaaggatccagaaactagagttcatgttggataagctacagaatgaaattgatcaggagttggaacacaataattcccttgttagagaagaaaaagagacaactgatacaaggaaaaaatcacttctttctgctgccttagctaaatcaggtgaaaggctacaagctctaacacttcttatgattcactacagagcaggcattgaagatatagaaactttagaaagtctgtctttagaccagcactccaaaaaaataagcaagtacacagatgatacagaagaagaccttgataatgaaataagccaactaatagactctcagccattcagcagcatatcagatgacttatttggcccatccgagtctgtgtagcagacaggtctatttaaactttcaaatgaacagggtaaagttgcatctaaagtaccacagatacaaccatgtttaaatcctcgtatgcactctggcctgcttctccagttacttgcttgtgtaagaacaaaaatgagaaaggttgttttccagtaaaaacatgaccagctta

SEQ ID NO: 458525 - DNA, 472 bp, Homo sapiens
gcatgttgaattcaaggtctgtccaggcaccatactggcacagtatccttctcccattcccacacacaaacaaaatactaaacacatatgtgtttgcaaccttctctgacactccagaagacttgatttttaatttcacatttttagaaaggtcaatattgataaactgtagattatacttttcttggattgatatagaataacaaacttgcttttactagtctggtatataattgccaattttcatgaaatcacaatgctttagaacacatttctctttattctgtaatcagcacattgagtatttacgcctgtgaattcttcatgtattgtagggagaatggagctgatgatatggtgggtggggtactgaatgtctgggcttgatttgcataactttgatagaaaagctagaaaatttttcacttctcagcattaatagttcttgttggtatgtacttaaaaacaaaaa

SEQ ID NO: 458526 - DNA, 3880 bp, Homo sapiens
gaggcgccggtcccggccccgctgccgccgccgccacaccggcccttcgggagcgtctgaggaggcgcgggccgctgcgggctcgggcgccgcagcgcgccggcccgagcccctggacgaggcccacggagccgctcgccccgacccagccgcccgatgtcctcaaaatggaggcagcgggggcggcggcgtgaagaaagcggcgctgtgggcgcgggagtaggggcccgggcggaggcggtggcgggatggggctgctgctcatgatcctggcgtcggccgtgctgggttccttcctcacgctcctcgcccagttcttcctgctgtaccgcagacagcccgagccgccggcggacgaggccgcccgcgcgggcgagggcttccgctacatcaagccagtgccgggcctgctcctaagggagtacctttatggcggcggccgggatgaggagccctccggagcggcccctgagggcggcgcgacccccaccgcggcccccgagacccccgccccgccgacgcgggagacttgctacttcctcaacgccaccatcctattcctgttccgggagttgcgggacaccgcgctgacccgccgctgggtcaccaagaagatcaaggtggagttcgaggagctgctgcagaccaagacggccgggcgcctgctggaggggctgagcctgcgggacgtgttcctgggcgagacggtgcccttcatcaagaccatccggctcgtgcggccagtcgtgccctcggccaccggggagcccgatggccctgaaggggaggcgctgcccgccgcctgccccgaggagctggccttcgaggcggaggtggagtacaacgggggcttccacctggccatcgacgtggacctggtcttcggcaagtccgcctacttgtttgtcaagctgtcccgcgtggtgggaaggctgcgcttggtctttacgcgcgtgcccttcacccactggttcttctccttcgtggaagacccgctgatcgacttcgaggtgcgctcgcagtttgaagggcggcccatgccccagctcacctccatcatcgtcaaccagctcaagaagatcatcaagcgcaagcacaccctaccgaattacaagatcaggtttaagccgttttttccataccagaccttgcaaggatttgaagaagatgaagagcatatccatatacaacaatgggcacttactgaaggccgtcttaaagttacgttgttagaatgtagcaggttactcatttttggatcctatgacagagaggcaaatgttcattgcacacttgagttaagcagtagtgtttgggaagaaaaacagaggagttctattaagacggttgaattaatggaaatttacaaagtgttggacttacacttcgtcttgtccagtcaactgatgggtatgctgggcacgtcatcattgaaactgtggctccaaactcgcctgctgcaattgcagatcttcagcggggagatcgacttatcgccattggaggtggtgtgaaaatcacatcaacactgcaagtgttgaagcttatcaagcaggctggtgactggtcctggtgtactatgggcctgttggccagagtaatcaaggtgcagtgctgcaagataactttggccagttggaagaaaactttttgtcaagctcatgccaatcgggttatgaagaggaagctgccgggttgacagtagatactgaaagtagagagctggattctgaatttgaagacttggcaagtgatgtcagagcacaaaatgagttcaaagatgaggcacaatcattaagtcatagtcccaaacgtgttccaacaacactttctattaaaccccttggagctatatcaccagttttaaaccgtaaattagctgtaggaagtcacccactaccaccgaaaattcagtccaaagatggaaataaacctccacccctaaaaacttctgagataacagacccagcacaagtgtcaaaaccaacccaaggatctgctttcaaaccacctgtgccaccacgaccacaagcgaaagttcctttgccttccgccgatgctccaaatcaggcagaaccagatgttctcgttgaaaagccagagaaggtggtgccacctcctcttgtagataaatctgctgaaaagcaagcaaaaaatgtggatgccatagacgatgcagctgcacctaagcaatttttagcaaagcaagaagtggccaaagatgtcacttcagaaacttcctgccctactaaggacagttcggacgaccgtcaaacatgggaatcatcagaaattctttatcgtaataagctaggaaaatggacaagaaccagagcatcctgtttgtttgacatagaagcctgtcacaggtacttaaacattgcattgtggtgcagggatcctttcaagttgggaggtctcatctgtttggggcatgttagtttaaaacttgaagatgtggctttaggatgcctagctacatcaaacacggaatacctttccaaattgagactggaagccccctcacctaaggctatagtcactagaaccgcactacgcaatctgagtatgcaaaagggattcaatgacaaattttgctatggtgacattactattcacttcaaatatttgaaagaaggagaatcagaccaccatgtagttactaacgtagaaaaagaaaaagaaccccatttggttgaagaagtttctgttctccctaaagaggagcaatttgttggacagatgggtttaacagaaaacaaacacagttttcaggatactcagttccagaacccaacatggtgtgactactgtaagaaaaaagtttggactaaagcagcttcccagtgtatgttttgtgcttatgtttgccataaaaaatgtcaagaaaagtgtctagctgagacttctgtttgtggagcaactgataggcgaatagacaggacactgaaaaaccttaggctggaaggacaggaaaccctcttaggcctgcctcctcgtgttgatgctgaagctagcaagtcagtcaataaaacaacaggtttgacaaggcatattatcaatactagttctcgtttattaaatttgcgtcaagtctctaaaactcgcctttctgaaccaggaaccgatctcgtagaaccttcaccaaaacacacacccaacacgtcagacaacgaaggcagtgacacggaggtctgtggtccaaacagtccttctaaacggggaaacagcacaggaataaagttagtgagaaaagagggtggtctggatgacagtgttttcattgcagttaaagaaattggtcgtgatctgtacaggggcttgcctacagaggaaaggatccagaaactagagttcatgttggataagctacagaatgaaattgatcaggagttggaacacaataattcccttgttagagaagaaaaagagacaactgatacaaggaaaaaatcacttctttctgctgccttagctaaatcaggtgaaaggctacaagctctaacacttcttatgattcactacagagcaggcattgaagatatagaaactttagaaagtctgtctttagaccagcactccaaaaaaataagcaagtacacagatgatacagaagaagaccttgataatgaaataagccaactaatagactctcagccattcagcagcatatcagatgacttatttggcccatccgagtctgtgtagcagacaggtctatttaaactttcaaatgaacagggtaaagttgcatctaaagtaccacagatacaaccatgtttaaatcctcgtatgcactctggcctgcttctccagttacttgcttgtgtaagaacaaaaatgagaaaggttgttttccagtaaaaacatgaccagctta

SEQ ID NO: 458527 - DNA, 4797 bp, Homo sapiens
gaggcgccggtcccggccccgctgccgccgccgccacaccggcccttcgggagcgtctgaggaggcgcgggccgctgcgggctcgggcgccgcagcgcgccggcccgagcccctggacgaggcccacggagccgctcgccccgacccagccgcccgatgtcctcaaaatggaggcagcgggggcggcggcgtgaagaaagcggcgctgtgggcgcgggagtaggggcccgggcggaggcggtggcgggatggggctgctgctcatgatcctggcgtcggccgtgctgggttccttcctcacgctcctcgcccagttcttcctgctgtaccgcagacagcccgagccgccggcggacgaggccgcccgcgcgggcgagggcttccgctacatcaagccagtgccgggcctgctcctaagggagtacctttatggcggcggccgggatgaggagccctccggagcggcccctgagggcggcgcgacccccaccgcggcccccgagacccccgccccgccgacgcgggagacttgctacttcctcaacgccaccatcctattcctgttccgggagttgcgggacaccgcgctgacccgccgctgggtcaccaagaagatcaaggtggagttcgaggagctgctgcagaccaagacggccgggcgcctgctggaggggctgagcctgcgggacgtgttcctgggcgagacggtgcccttcatcaagaccatccggctcgtgcggccagtcgtgccctcggccaccggggagcccgatggccctgaaggggaggcgctgcccgccgcctgccccgaggagctggccttcgaggcggaggtggagtacaacgggggcttccacctggccatcgacgtggacctggtcttcggcaagtccgcctacttgtttgtcaagctgtcccgcgtggtgggaaggctgcgcttggtctttacgcgcgtgcccttcacccactggttcttctccttcgtggaagacccgctgatcgacttcgaggtgcgctcgcagtttgaagggcggcccatgccccagctcacctccatcatcgtcaaccagctcaagaagatcatcaagcgcaagcacaccctaccgaattacaagatcaggtttaagccgttttttccataccagaccttgcaaggatttgaagaagatgaagagcatatccatatacaacaatgggcacttactgaaggccgtcttaaagttacgttgttagaatgtagcaggttactcatttttggatcctatgacagagaggcaaatgttcattgcacacttgagttaagcagtagtgtttgggaagaaaaacagaggagttctattaagacggttgaattaatggaaatttacaaagtgttggacttacacttcgtcttgtccagtcaactgatgggtatgctgggcacgtcatcattgaaactgtggctccaaactcgcctgctgcaattgcagatcttcagcggggagatcgacttatcgccattggaggtggtgtgaaaatcacatcaacactgcaagtgttgaagcttatcaagcaggctggtgactggtcctggtgtactatgggcctgttggccagagtaatcaaggtgcagtgctgcaagataactttggccagttggaagaaaactttttgtcaagctcatgccaatcgggttatgaagaggaagctgccgggttgacagtagatactgaaagtagagagctggattctgaatttgaagacttggcaagtgatgtcagagcacaaaatgagttcaaagatgaggcacaatcattaagtcatagtcccaaacgtgttccaacaacactttctattaaaccccttggagctatatcaccagttttaaaccgtaaattagctgtaggaagtcacccactaccaccgaaaattcagtccaaagatggaaataaacctccacccctaaaaacttctgagataacagacccagcacaagtgtcaaaaccaacccaaggatctgctttcaaaccacctgtgccaccacgaccacaagcgaaagttcctttgccttccgccgatgctccaaatcaggcagaaccagatgttctcgttgaaaagccagagaaggtggtgccacctcctcttgtagataaatctgctgaaaagcaagcaaaaaatgtggatgccatagacgatgcagctgcacctaagcaatttttagcaaagcaagaagtggccaaagatgtcacttcagaaacttcctgccctactaaggacagttcggacgaccgtcaaacatgggaatcatcagaaattctttatcgtaataagctaggaaaatggacaagaaccagagcatcctgtttgtttgacatagaagcctgtcacaggtacttaaacattgcattgtggtgcagggatcctttcaagttgggaggtctcatctgtttggggcatgttagtttaaaacttgaagatgtggctttaggatgcctagctacatcaaacacggaatacctttccaaattgagactggaagccccctcacctaaggctatagtcactagaaccgcactacgcaatctgagtatgcaaaagggattcaatgacaaattttgctatggtgacattactattcacttcaaatatttgaaagaaggagaatcagaccaccatgtagttactaacgtagaaaaagaaaaagaaccccatttggttgaagaagtttctgttctccctaaagaggagcaatttgttggacagatgggtttaacagaaaacaaacacagttttcaggatactcagttccagaacccaacatggtgtgactactgtaagaaaaaagtttggactaaagcagcttcccagtgtatgttttgtgcttatgtttgccataaaaaatgtcaagaaaagtgtctagctgagacttctgtttgtggagcaactgataggcgaatagacaggacactgaaaaaccttaggctggaaggacaggaaaccctcttaggcctgcctcctcgtgttgatgctgaagctagcaagtcagtcaataaaacaacaggtttgacaaggcatattatcaatactagttctcgtttattaaatttgcgtcaagtctctaaaactcgcctttctgaaccaggaaccgatctcgtagaaccttcaccaaaacacacacccaacacgtcagacaacgaaggcagtgacacggaggtctgtggtccaaacagtccttctaaacggggaaacagcacaggaataaagttagtgagaaaagagggtggtctggatgacagtgttttcattgcagttaaagaaattggtcgtgatctgtacaggggcttgcctacagaggaaaggatccagaaactagagttcatgttggataagctacagaatgaaattgatcaggagttggaacacaataattcccttgttagagaagaaaaagagacaactgatacaaggaaaaaatcacttctttctgctgccttagctaaatcaggtgaaaggctacaagctctaacacttcttatgattcactacagagcaggcattgaagatatagaaactttagaaagtctgtctttagaccagcactccaaaaaaataagcaagtacacagatgatacagaagaagaccttgataatgaaataagccaactaatagactctcagccattcagcagcatatcagatgacttatttggcccatccgagtctgtgtagcagacaggtctatttaaactttcaaatgaacagggtaaagttgcatctaaagtaccacagatacaaccatgtttaaatcctcgtatgcactctggcctgcttctccagttacttgcttgtgtaagaacaaaaatgagaaaggttgttttccagtaaaaacatgaccagcttactaattggttgttttggattgcatttatagctatgcttttttgggtttatactgggaatttatttttactaaattatttaacttttctaattatgtaattatgtaagctagcttttcatgtttatgtatgtatggtgtccccttgtgttatttttcttcctcttggtttttgaattagtgttaaatagaatactgtctagattcttaaaatattttcatttccatcatggttataacaaatttgctgcatgcccaaactgacaacagcaatcactgagggaacaggttttgaatctttcttttgtgttatgaagtttatcgtctctacttgcttgagatttttgttattttgggggtttgggggtgctttttgttttgtttttgccaaatgtaacatgaaagcagatgctgcagctttagtctgttatgctgatttagtaaaaaaaaattttttacatatattgcttgctttcgatgcttctgtgaaatttttttctaaagcttttgtgcagctgtatggtaaaaatatggtgattaatttgaagagcttacattgaaagacaatgtaataggaaataaatgtagattgcagttggtcaagaattttgtagagaggataacaagacttaattactgaaaaacagtaacatagcattttgaaatataatcttttaaaatattgatgctttccttttaaatggaaatttaaattttatgattaaaagtttaaacatttatgataattttcctcatcagttctcccataggaaataaagcatgtgaaaggcaaaaaaaaaaaaaaaaaattttggggtcgggctgaatttaaactgtttggcgggccggaaggagtcaggccgaaaacggtgaggtgttccaaaagcggagggacaggtgggcggttagagagaacgggc

SEQ ID NO: 458528 - DNA, 3598 bp, Homo sapiens
gaggcgccggtcccggccccgctgccgccgccgccacaccggcccttcgggagcgtctgaggaggcgcgggccgctgcgggctcgggcgccgcagcgcgccggcccgagcccctggacgaggcccacggagccgctcgccccgacccagccgcccgatgtcctcaaaatggaggcagcgggggcggcggcgtgaagaaagcggcgctgtgggcgcgggagtaggggcccgggcggaggcggtggcgggatggggctgctgctcatgatcctggcgtcggccgtgctgggttccttcctcacgctcctcgcccagttcttcctgctgtaccgcagacagcccgagccgccggcggacgaggccgcccgcgcgggcgagggcttccgctacatcaagccagtgccgggcctgctcctaagggagtacctttatggcggcggccgggatgaggagccctccggagcggcccctgagggcggcgcgacccccaccgcggcccccgagacccccgccccgccgacgcgggagacttgctacttcctcaacgccaccatcctattcctgttccgggagttgcgggacaccgcgctgacccgccgctgggtcaccaagaagatcaaggtggagttcgaggagctgctgcagaccaagacggccgggcgcctgctggaggggctgagcctgcgggacgtgttcctgggcgagacggtgcccttcatcaagaccatccggctcgtgcggccagtcgtgccctcggccaccggggagcccgatggccctgaaggggaggcgctgcccgccgcctgccccgaggagctggccttcgaggcggaggtggagtacaacgggggcttccacctggccatcgacgtggacctggtcttcggcaagtccgcctacttgtttgtcaagctgtcccgcgtggtgggaaggctgcgcttggtctttacgcgcgtgcccttcacccactggttcttctccttcgtggaagacccgctgatcgacttcgaggtgcgctcgcagtttgaagggcggcccatgccccagctcacctccatcatcgtcaaccagctcaagaagatcatcaagcgcaagcacaccctaccgaattacaagatcaggttgaattaatggaaatttacaaagtgttggacttacacttcgtcttgtccagtcaactgatgggtatgctgggcacgtcatcattgaaactgtggctccaaactcgcctgctgcaattgcagatcttcagcggggagatcgacttatcgccattggaggtgtggtcctggtgtactatgggcctgttggccagagtaatcaaggtgcagtgctgcaagataactttggccagttggaagaaaactttttgtcaagctcatgccaatcgggttatgaagaggaagctgccgggttgacagtagatactgaaagtagagagctggattctgaatttgaagacttggcaagtgatgtcagagcacaaaatgagttcaaagatgaggcacaatcattaagtcatagtcccaaacgtgttccaacaacactttctattaaaccccttggagctatatcaccagttttaaaccgtaaattagctgtaggaagtcacccactaccaccgaaaattcagtccaaagatggaaataaacctccacccctaaaaacttctgagataacagacccagcacaagtgtcaaaaccaacccaaggatctgctttcaaaccacctgtgccaccacgaccacaagcgaaagttcctttgccttccgccgatgctccaaatcaggcagaaccagatgttctcgttgaaaagccagagaaggtggtgccacctcctcttgtagataaatctgctgaaaagcaagcaaaaaatgtggatgccatagacgatgcagctgcacctaagcaatttttagcaaagcaagaagtggccaaagatgtcacttcagaaacttcctgccctactaaggacagttcggacgaccgtcaaacatgggaatcatcagaaattctttatcgtaataagctaggaaaatggacaagaaccagagcatcctgtttgtttgacatagaagcctgtcacaggtacttaaacattgcattgtggtgcagggatcctttcaagttgggaggtctcatctgtttggggcatgttagtttaaaacttgaagatgtggctttaggatgcctagctacatcaaacacggaatacctttccaaattgagactggaagccccctcacctaaggctatagtcactagaaccgcactacgcaatctgagtatgcaaaagggattcaatgacaaattttgctatggtgacattactattcacttcaaatatttgaaagaaggagaatcagaccaccatgtagttactaacgtagaaaaagaaaaagaaccccatttggttgaagaagtttctgttctccctaaagaggagcaatttgttggacagatgggtttaacagaaaacaaacacagttttcaggatactcagttccagaacccaacatggtgtgactactgtaagaaaaaagtttggactaaagcagcttcccagtgtatgttttgtgcttatgtttgccataaaaaatgtcaagaaaagtgtctagctgagacttctgtttgtggagcaactgataggcgaatagacaggacactgaaaaaccttaggctggaaggacaggaaaccctcttaggcctgcctcctcgtgttgatgctgaagctagcaagtcagtcaataaaacaacaggtttgacaaggcatattatcaatactagttctcgtttattaaatttgcgtcaagtctctaaaactcgcctttctgaaccaggaaccgatctcgtagaaccttcaccaaaacacacacccaacacgtcagacaacgaaggcagtgacacggaggtctgtggtccaaacagtccttctaaacggggaaacagcacaggaataaagttagtgagaaaagagggtggtctggatgacagtgttttcattgcagttaaagaaattggtcgtgatctgtacaggggcttgcctacagaggaaaggatccagaaactagagttcatgttggataagctacagaatgaaattgatcaggagttggaacacaataattcccttgttagagaagaaaaagagacaactgatacaaggaaaaaatcacttctttctgctgccttagctaaatcaggtgaaaggctacaagctctaacacttcttatgattcactacagagcaggcattgaagatatagaaactttagaaagtctgtctttagaccagcactccaaaaaaataagcaagtacacagatgatacagaagaagaccttgataatgaaataagccaactaatagactctcagccattcagcagcatatcagatgacttatttggcccatccgagtctgtgtagcagacaggtctatttaaactttcaaatgaacagggtaaagttgcatctaaagtaccacagatacaaccatgtttaaatcctcgtatgcactctggcctgcttctccagttacttgcttgtgtaagaacaaaaatgagaaaggttgttttccagtaaaaacatgaccagctta

SEQ ID NO: 458529 - DNA, 813 bp, Homo sapiens
  misc_feature (743)..(743): n is a, c, g, or t
  misc_feature (762)..(762): n is a, c, g, or t
  misc_feature (790)..(790): n is a, c, g, or t
gtcgcgcccctttgtgcgtcacgggtggcgggcgcgggaaggggatttggattgttgcgcctctgctctgaagaaagtgctgtctggctccaactccagttctttcccctgagcagcgcctggaacctaacccttcccactctgtcaccttctcgatcccgccggcgctttagagccgcagtccagtcttggatccttcagagcctcagccactagctgcgatgcatgtgatcaagcgagatggccgccaagaacgagtcatgtttgacaaaattacatctcgaatccagaagctttgttatggactcaatatggattttgttgatcctgctcagatcaccatgaaagtaatccaaggcttgtacagtggggtcaccacagtggaactagatactttggctgctgaaacagctgcaaccttgactactaagcaccctgactatgctatcctggcagccaggatcgctgtctctaacttgcacaaagaaacaaagaaagtgttcagtgatgtgatggaagacctctataactacataaatccacataatggcaaacactctcccatggtggccaagtcaacattggatattgttctggccaataaagatcgcctgaattctgctattatctatgaccgagatttctcttacaattacttcggctttaagacgctagagcggtcttatttgttgaagatcaatggaaaagtggcttgaaaggaccacaacatatggttgatgaanaagtatctggttggggatnccccaaaggaaagacctttggatgcccnccaaattgggaaacctttttaaa

SEQ ID NO: 458530 - DNA, 806 bp, Homo sapiens
gtcgcgcccctttgtgcgtcacgggtggcgggcgcgggaaggggatttggattgttgcgcctctgctctgaagaaagtgctgtctggctccaactccagttctttcccctgagcagcgcctggaacctaacccttcccactctgtcaccttctcgatcccgccggcgctttagagccgcagtccagtcttggatccttcagagcctcagccactagctgcgatgcatgtgatcaagcgagatggccgccaagaacgagtcatgtttgacaaaattacatctcgaatccagaagctttgttatggactcaatatggattttgttgatcctgctcagatcaccatgaaagtaatccaaggcttgtacagtggggtcaccacagtggaactagatactttggctgctgaaacagctgcaaccttgactactaagcaccctgactatgctatcctggcagccaggatcgctgtctctaacttgcacaaagaaacaaagaaagtgttcagtgaaaaaaaaaaaaaactttttgggcggcttgggccctggaaaaagtttttaaaacctttggtggggccgcggggccccatgagggtactgtgacactgggctaaaacagggctccacagggaagaaccggggtcgaagacacaaagggccggggtatcttcgccccgtattataaaaacgcgcccgggaggaaacaccgagggtttctgaaacaatttcccagaaggggattccggagagcccacacacgaggattctatacacaggggggtcccaggagagactcggatataaattaac

SEQ ID NO: 458531 - DNA, 342 bp, Homo sapiens
  misc_feature (340)..(340): n is a, c, g, or t
aaagatcggccgatcttcctttattgagctctcgggcgaggttcactggtccgcagggggagggccagggaagtctcgctgtgccaaaggtgcagcgcgcttttatggatgctgggtgaggagtggtcagggtaggggcagggtcggttgagtttcacgcttctgagtgtgacacgccctagtgggcatgtgcgttagtcggggtggcaggaacaggaaaggtgaacccggaaatgctgagtcagggtgtccgaggtggcgatcgccatcttggagtcttcaccggagtccaatcactgtagcggtggctactgacacaacgagtctcgtagcatgtgtntc

SEQ ID NO: 458532 - DNA, 3026 bp, Homo sapiens
gtcgcgcccctttgtgcgtcacgggtggcgggcgcgggaaggggatttggattgttgcgcctctgctctgaagaaagtgctgtctggctccaactccagttctttcccctgagcagcgcctggaacctaacccttcccactctgtcaccttctcgatcccgccggcgctttagagccgcagtccagtcttggatccttcagagcctcagccactagctgcgatgcatgtgatcaagcgagatggccgccaagaacgagtcatgtttgacaaaattacatctcgaatccagaagctttgttatggactcaatatggattttgttgatcctgctcagatcaccatgaaagtaatccaaggcttgtacagtggggtcaccacagtggaactagatactttggctgctgaaacagctgcaaccttgactactaagcaccctgactatgctatcctggcagccaggatcgctgtctctaacttgcacaaagaaacaaagaaagtgttcagtgatgtgatggaagacctctataactacataaatccacataatggcaaacactctcccatggtggccaagtcaacattggatattgttctggccaataaagatcgcctgaattctgctattatctatgaccgagatttctcttacaattacttcggctttaagacgctagagcggtcttatttgttgaagatcaatggaaaagtggctgaaagaccacaacatatgttgatgagagtatctgttgggatccacaaagaagacattgatgcagcaattgaaacatataatcttctttctgagaggtggtttactcatgcttcgcccactctcttcaatgctggtaccaaccgcccacaactttctagctgttttcttctgagtatgaaagatgacagcattgaaggcatttatgacactctaaagcaatgtgcattgatttctaagtctgctggaggaattggtgttgctgtgagttgtattcgggctactggcagctacattgctgggactaatggcaattccaatggccttgtaccgatgctgagagtatataacaacacagctagatatgtggatcaaggtgggaacaagcgtcctggggcatttgctatttacctggagccttggcatttagacatctttgaattccttgatttaaagaagaacacaggaaaggaagagcagcgtgccagagatcttttctttgctctttggattccggatctcttcatgaaacgagtggagactaatcaggactggtctttgatgtgtccaaatgagtgtcctggtctggatgaggtttggggagaggaatttgagaaactatatgcaagttatgagaaacaaggtcgtgtccgcaaagttgtaaaagctcagcagctttggtatgccatcattgagtctcagacggaaacaggcaccccgtatatgctctacaaagattcctgtaatcgaaagagcaaccagcagaacctgggaaccatcaaatgcagcaacctgtgcacagaaatagtggagtacaccagcaaagatgaggttgctgtttgtaatttggcttccctggccctgaatatgtatgtcacatcagaacacacatacgactttaagaagttggctgaagtcactaaagtcgttgtccgaaacttgaataaaattattgatataaactactatcctgtaccagaggatgagatacccttttgagagtgcagaagcccagttactgaataagcagatctttgaaactatttattatggtgctctggaagccagctgtgaccttgccaaggagcagggcccatacgaaacctatgagggctctccagttagcaaaggaattcttcagtatgatatgtggaatgttactcctacagacctatgggactggaaggttctcaaggagaagattgcaaagtatggtataagaaacagtttacttattgccccgatgcctacagcttccactgctcagatcctggggaataatgagtccattgaaccttacaccagcaacatctatactcgcagagtcttgtcaggagaatttcagattgtaaatcctcacttattgaaagatcttaccgagcggggcctatggcatgaagagatgaaaaaccagattattgcatgcaatggctctattcagagcataccagaaattcctgatgacctgaagcaactttataaaactgtgtgggaaatctctcagaaaactgttctcaagatggcagctgagagaggtgctttcattgatcaaagccaatctttgaacatccacattgctgagcctaactatggcaaactcactagtatgcacttctacggctggaagcagggtttgaagactgggatgtattatttaaggacgagaccagcagctaatccaatccagttcactctaaataaggagaagctaaaagataaagaaaaggtatcaaaagaggaagaagagaaggagaggaacacagcagccatggtgtgctctttggagaatagagatgaatgtctgatgtgtggatcctgaggaaagacttggaagagaccagcatgtcttcagtagccaaactacttcttgagcatagataggtatagtgggtttgcttgaggtggtaaggctttgctggaccctgttgcaggcaaaaggagtaattgatttaaagtactgttaatgatgttaatgatttttttttaaactcatatattgggattttcaccaaaataatgcttttgaaaaaaagaaaaaaaaaacggatatattgagaatcaaagtagaagttttaggaatgcaaaataagtcatcttgcatacagggagtggttaagtaaggtttcatcacccatttagcactgcttttctgaagacttcagttttgttaaggagatttagttttactgctttgactggtgggtctctagaagcaaaactgagtgataactcatgagaagtactgataggacctttatctggatatggtcctataggttattctgaaataaagataaacatttctaagtgaaaaaa

SEQ ID NO: 458533 - DNA, 2575 bp, Homo sapiens
aaagatcggccgatcttcctttattgagctctcgggcgaggttcactggtccgcagggggagggccagggaagtctcgctgtgccaaaggtgcagcgcgcttttatggatgctgggtgaggagtggtcagggtaggggcagggtcggttgagtttcacgcttctgagtgtgacacgccctagtgggcatgtgcgttagtcggggtggcaggaacaggaaaggtgaacccggaaatgctgagtcagggtgtccgaggtggcgatcgccatcttggagtcttcaccggagtccaatcactgtgaaccaaaaacgaagtcaaataacaagtttcacactttgggaggccaagctgttttcttctgagtatgaaagatgacagcattgaaggcatttatgacactctaaagcaatgtgcattgatttctaagtctgctggaggaattggtgttgctgtgagttgtattcgggctactggcagctacattgctgggactaatggcaattccaatggccttgtaccgatgctgagagtatataacaacacagctagatatgtggatcaaggtgggaacaagcgtcctggggcatttgctatttacctggagccttggcatttagacatctttgaattccttgatttaaagaagaacacaggaaaggaagagcagcgtgccagagatcttttctttgctctttggattccggatctcttcatgaaacgagtggagactaatcaggactggtctttgatgtgtccaaatgagtgtcctggtctggatgaggtttggggagaggaatttgagaaactatatgcaagttatgagaaacaaggtcgtgtccgcaaagttgtaaaagctcagcagctttggtatgccatcattgagtctcagacggaaacaggcaccccgtatatgctctacaaagattcctgtaatcgaaagagcaaccagcagaacctgggaaccatcaaatgcagcaacctgtgcacagaaatagtggagtacaccagcaaagatgaggttgctgtttgtaatttggcttccctggccctgaatatgtatgtcacatcagaacacacatacgactttaagaagttggctgaagtcactaaagtcgttgtccgaaacttgaataaaattattgatataaactactatcctgtaccagaggcatgcctatcaaataaacgccatcgccccattggaattggggtacaaggtctggcagatgcttttatcctgatgagatacccttttgagagtgcagaagcccagttactgaataagcagatctttgaaactatttattatggtgctctggaagccagctgtgaccttgccaaggagcagggcccatacgaaacctatgagggctctccagttagcaaaggaattcttcagtatgatatgtggaatgttactcctacagacctatgggactggaaggttctcaaggagaagattgcaaagtatggtataagaaacagtttacttattgccccgatgcctacagcttccactgctcagatcctggggaataatgagtccattgaaccttacaccagcaacatctatactcgcagagtcttgtcaggagaatttcagattgtaaatcctcacttattgaaagatcttaccgagcggggcctatggcatgaagagatgaaaaaccagattattgcatgcaatggctctattcagagcataccagaaattcctgatgacctgaagcaactttataaaactgtgtgggaaatctctcagaaaactgttctcaagatggcagctgagagaggtgctttcattgatcaaagccaatctttgaacatccacattgctgagcctaactatggcaaactcactagtatgcacttctacggctggaagcagggtttgaagactgggatgtattatttaaggacgagaccagcagctaatccaatccagttcactctaaataaggagaagctaaaagataaagaaaaggtatcaaaagaggaagaagagaaggagaggaacacagcagccatggtgtgctctttggagaatagagatgaatgtctgatgtgtggatcctgaggaaagacttggaagagaccagcatgtcttcagtagccaaactacttcttgagcatagataggtatagtgggtttgcttgaggtggtaaggctttgctggaccctgttgcaggcaaaaggagtaattgatttaaagtactgttaatgatgttaatgatttttttttaaactcatatattgggattttcaccaaaataatgcttttgaaaaaaagaaaaaaaaaacggatatattgagaatcaaagtagaagttttaggaatgcaaaataagtcatcttgcatacagggagtggttaagtaaggtttcatcacccatttagcactgcttttctgaagacttcagttttgttaaggagatttagttttactgctttgactggtgggtctctagaagcaaaactgagtgataactcatgagaagtactgataggacctttatctggatatggtcctataggttattctgaaataaagataaacatttctaagtgaaaaaa

SEQ ID NO: 458534 - DNA, 1870 bp, Homo sapiens
tcttatgagtgattttgtcctttcctttttaggactggtctttgatgtgtccaaatgagtgtcctggtctggatgaggtttggggagaggaatttgagaaactatatgcaagttatgagaaacaaggtcgtgtccgcaaagttgtaaaagctcagcagctttggtatgccatcattgagtctcagacggaaacaggcaccccgtatatgctctacaaagattcctgtaatcgaaagagcaaccagcagaacctgggaaccatcaaatgcagcaacctgtgcacagaaatagtggagtacaccagcaaagatgaggttgctgtttgtaatttggcttccctggccctgaatatgtatgtcacatcagaacacacatacgactttaagaagttggctgaagtcactaaagtcgttgtccgaaacttgaataaaattattgatataaactactatcctgtaccagaggcatgcctatcaaataaacgccatcgccccattggaattggggtacaaggtctggcagatgcttttatcctgatgagatacccttttgagagtgcagaagcccagttactgaataagcagatctttgaaactatttattatggtgctctggaagccagctgtgaccttgccaaggagcagggcccatacgaaacctatgagggctctccagttagcaaaggaattcttcagtatgatatgtggaatgttactcctacagacctatgggactggaaggttctcaaggagaagattgcaaagtatggtataagaaacagtttacttattgccccgatgcctacagcttccactgctcagatcctggggaataatgagtccattgaaccttacaccagcaacatctatactcgcagagtcttgtcaggagaatttcagattgtaaatcctcacttattgaaagatcttaccgagcggggcctatggcatgaagagatgaaaaaccagattattgcatgcaatggctctattcagagcataccagaaattcctgatgacctgaagcaactttataaaactgtgtgggaaatctctcagaaaactgttctcaagatggcagctgagagaggtgctttcattgatcaaagccaatctttgaacatccacattgctgagcctaactatggcaaactcactagtatgcacttctacggctggaagcagggtttgaagactgggatgtattatttaaggacgagaccagcagctaatccaatccagttcactctaaataaggagaagctaaaagataaagaaaaggtatcaaaagaggaagaagagaaggagaggaacacagcagccatggtgtgctctttggagaatagagatgaatgtctgatgtgtggatcctgaggaaagacttggaagagaccagcatgtcttcagtagccaaactacttcttgagcatagataggtatagtgggtttgcttgaggtggtaaggctttgctggaccctgttgcaggcaaaaggagtaattgatttaaagtactgttaatgatgttaatgatttttttttaaactcatatattgggattttcaccaaaataatgcttttgaaaaaaagaaaaaaaaaacggatatattgagaatcaaagtagaagttttaggaatgcaaaataagtcatcttgcatacagggagtggttaagtaaggtttcatcacccatttagcactgcttttctgaagacttcagttttgttaaggagatttagttttactgctttgactggtgggtctctagaagcaaaactgagtgataactcatgagaagtactgataggacctttatctggatatggtcctataggttattctgaaataaagataaacatttctaagtgaaaaaa

SEQ ID NO: 458535 - DNA, 1045 bp, Homo sapiens
  misc_feature (20)..(20): n is a, c, g, or t
  misc_feature (26)..(26): n is a, c, g, or t
  misc_feature (33)..(33): n is a, c, g, or t
atagctgttccagaggatcnccggangcacacngcaacatctatactcgcagagtcttgtcaggagaatttcagattgtaaatcctcacttattgaaagatcttaccgagcggggcctatggcatgaagagatgaaaaaccagattattgcatgcaatggctctattcagagcataccagaaattcctgatgacctgaagcaactttataaaactgtgtgggaaatctctcagaaaactgttctcaagatggcagctgagagaggtgctttcattgatcaaagccaatctttgaacatccacattgctgagcctaactatggcaaactcactagtatgcacttctacggctggaagcagggtttgaagactgggatgtattatttaaggacgagaccagcagctaatccaatccagttcactctaaataaggagaagctaaaagataaagaaaaggtatcaaaagaggaagaagagaaggagaggaacacagcagccatggtgtgctctttggagaatagagatgaatgtctgatgtgtggatcctgaggaaagacttggaagagaccagcatgtcttcagtagccaaactacttcttgagcatagataggtatagtgggtttgcttgaggtggtaaggctttgctggaccctgttgcaggcaaaaggagtaattgatttaaagtactgttaatgatgttaatgatttttttttaaactcatatattgggattttcaccaaaataatgcttttgaaaaaaagaaaaaaaaaacggatatattgagaatcaaagtagaagttttaggaatgcaaaataagtcatcttgcatacagggagtggttaagtaaggtttcatcacccatttagcactgcttttctgaagacttcagttttgttaaggagatttagttttactgctttgactggtgggtctctagaagcaaaactgagtgataactcatgagaagtactgataggacctttatctggatatggtcctataggttattctgaaataaagataaacatttctaagtgaaaaaa

SEQ ID NO: 458536 - DNA, 907 bp, Homo sapiens
atgctgcagacactctttaattatcaccgtacagcataccagaaattcctgatgacctgaagcaactttataaaactgtgtgggaaatctctcagaaaactgttctcaagatggcagctgagagaggtgctttcattgatcaaagccaatctttgaacatccacattgctgagcctaactatggcaaactcactagtatgcacttctacggctggaagcagggtttgaagactgggatgtattatttaaggacgagaccagcagctaatccaatccagttcactctaaataaggagaagctaaaagataaagaaaaggtatcaaaagaggaagaagagaaggagaggaacacagcagccatggtgtgctctttggagaatagagatgaatgtctgatgtgtggatcctgaggaaagacttggaagagaccagcatgtcttcagtagccaaactacttcttgagcatagataggtatagtgggtttgcttgaggtggtaaggctttgctggaccctgttgcaggcaaaaggagtaattgatttaaagtactgttaatgatgttaatgatttttttttaaactcatatattgggattttcaccaaaataatgcttttgaaaaaaagaaaaaaaaaacggatatattgagaatcaaagtagaagttttaggaatgcaaaataagtcatcttgcatacagggagtggttaagtaaggtttcatcacccatttagcactgcttttctgaagacttcagttttgttaaggagatttagttttactgctttgactggtgggtctctagaagcaaaactgagtgataactcatgagaagtactgataggacctttatctggatatggtcctataggttattctgaaataaagataaacatttctaagtgaaaaaa

SEQ ID NO: 458537 - DNA, 1829 bp, Homo sapiens
gtcgcgcccctttgtgcgtcacgggtggcgggcgcgggaaggggatttggattgttgcgcctctgctctgaagaaagtgctgtctggctccaactccagttctttcccctgagcagcgcctggaacctaacccttcccactctgtcaccttctcgatcccgccggcgctttagagccgcagtccagtcttggatccttcagagcctcagccactagctgcgatgcatgtgatcaagcgagatggccgccaagaacgagtcatgtttgacaaaattacatctcgaatccagaagctttgttatggactcaatatggattttgttgatcctgctcagatcaccatgaaagtaatccaaggcttgtacagtggggtcaccacagtggaactagatactttggctgctgaaacagctgcaaccttgactactaagcaccctgactatgctatcctggcagccaggatcgctgtctctaacttgcacaaagaaacaaagaaagtgttcagtgatgtgatggaagacctctataactacataaatccacataatggcaaacactctcccatggtggccaagtcaacattggatattgttctggccaataaagatcgcctgaattctgctattatctatgaccgagatttctcttacaattacttcggctttaagacgctagagcggtcttatttgttgaagatcaatggaaaagtggctgaaagaccacaacatatgttgatgagagtatctgttgggatccacaaagaagacattgatgcagcaattgaaacatataatcttctttctgagaggtggtttactcatgcttcgcccactctcttcaatgctggtaccaaccgcccacaactttctagctgttttcttctgagtatgaaagatgacagcattgaaggcatttatgacactctaaagcaatgtgcattgatttctaagtctgctggaggaattggtgttgctgtgagttgtattcgggctactggcagctacattgctgggactaatggcaattccaatggccttgtaccgatgctgagagtatataacaacacagctagatatgtggatcaaggtgggaacaagcgtcctggggcatttgctatttacctggagccttggcatttagacatctttgaattccttgatttaaagaagaacacaggaaaggaagagcagcgtgccagagatcttttctttgctctttggattccggatctcttcatgaaacgagtggagactaatcaggactggtctttgatgtgtccaaatgagtgtcctggtctggatgaggtttggggagaggaatttgagaaactatatgcaagttatgagaaacaaggtcgtgtccgcaaagttgtaaaagctcagcagctttggtatgccatcattgagtctcagacggaaacaggcaccccgtatatgctctacaaagattcctgtaatcgaaagagcaaccagcagaacctgggaaccatcaaatgcagcaacctgtgcacagaaatagtggagtacaccagcaaagatgaggtaggtagaaaaaattcttcctagagtactaagaagagaaccttaggcagttattatttgtgaattcctcacttgatttcacttgagataagtgaagggagtttgcatagttgtaagcagaagaacactgttaaaggcagagagcaaaggaaggaaagggtatgatctgtgcctataaatgttttttagtctaagccgtgtgggaaagacacagttttttcttatacacacatcactgtaataacatttactcaagaaaaatagaaatatacagttatgttagtttag

SEQ ID NO: 458538 - DNA, 328 bp, Homo sapiens
gtcgcgcccctttgtgcgtcacgggtggcgggcgcgggaaggggatttggattgttgcgcctctgctctgaagaaagtgctgtctggctccaactccagttctttcccctgagcagcgcctggaacctaacccttcccactctgtcaccttctcgatcccgccggcgctttagagccgcagtccagtcttggatccttcagagcctcagccactagctgcgatgcatgtgatcaagcgaggtaaggggggacaaggtgggcgagaaggaaggttaagggatgcgggctgccgccgccggagctgatgcccagcccgcccgccgccttc

SEQ ID NO: 458539 - DNA, 524 bp, Homo sapiens
actaaagtcctgggattacaggtgtgagccaccgcgcccggcccaggaatctattttaaactacaagaacttataatcactttaactctagaagaatgtttccttaaatgaggcattacatatttcttcaacatatatgtgtttattgagcactttatatgctaggcattgaggtgggttgagatgacaaaaaggggtgagaaccactgttttcaactattacctaaagattgaattagctgttaagtggtcttgatatattttcattttttgttgtattttttagatgtgatggaagacctctataactacataaatccacataatggcaaacactctcccatggtggccaagtcaacattggatattgttctggccaataaagatgtatgtataacacttatctggtggaaattttttgagagtcttttttaataatgcacacattttagaaaatttaaacacttgcaaagatacagggtaaatactaattctgtttcctaccctgattcctgattttcctc

SEQ ID NO: 458540 - DNA, 390 bp, Homo sapiens
tagctgggattacaggcatgctgcgccaccatgcctggctaattatattgtttcttgaataacagatgtcaagatcttaaaggaatatagctttcgtgtggtggcattgatgtctcgtctttataaaagatagaatttaccaagcaatctagcattaaataactcttaagtgattttagtttaagcttcaaagctgtagtcttttctaagcagtcactgttatttatttcttcatacattttctgcttttccattcagattgtaaatcctcacttattgaaagatcttaccgagcggggcctatggcatgaagagatgaaaaaccagattattgcatgcaatggctctattcaggtatagaatgaaaatgaagtgtgctctgcaggggct

SEQ ID NO: 458541 - DNA, 3097 bp, Homo sapiens
gtcgcgcccctttgtgcgtcacgggtggcgggcgcgggaaggggatttggattgttgcgcctctgctctgaagaaagtgctgtctggctccaactccagttctttcccctgagcagcgcctggaacctaacccttcccactctgtcaccttctcgatcccgccggcgctttagagccgcagtccagtcttggatccttcagagcctcagccactagctgcgatgcatgtgatcaagcgagatggccgccaagaacgagtcatgtttgacaaaattacatctcgaatccagaagctttgttatggactcaatatggattttgttgatcctgctcagatcaccatgaaagtaatccaaggcttgtacagtggggtcaccacagtggaactagatactttggctgctgaaacagctgcaaccttgactactaagcaccctgactatgctatcctggcagccaggatcgctgtctctaacttgcacaaagaaacaaagaaagtgttcagtgatgtgatggaagacctctataactacataaatccacataatggcaaacactctcccatggtggccaagtcaacattggatattgttctggccaataaagatcgcctgaattctgctattatctatgaccgagatttctcttacaattacttcggctttaagacgctagagcggtcttatttgttgaagatcaatggaaaagtggctgaaagaccacaacatatgttgatgagagtatctgttgggatccacaaagaagacattgatgcagcaattgaaacatataatcttctttctgagaggtggtttactcatgcttcgcccactctcttcaatgctggtaccaaccgcccacaactttctagctgttttcttctgagtatgaaagatgacagcattgaaggcatttatgacactctaaagcaatgtgcattgatttctaagtctgctggaggaattggtgttgctgtgagttgtattcgggctactggcagctacattgctgggactaatggcaattccaatggccttgtaccgatgctgagagtatataacaacacagctagatatgtggatcaaggtgggaacaagcgtcctggggcatttgctatttacctggagccttggcatttagacatctttgaattccttgatttaaagaagaacacaggaaaggaagagcagcgtgccagagatcttttctttgctctttggattccggatctcttcatgaaacgagtggagactaatcaggactggtctttgatgtgtccaaatgagtgtcctggtctggatgaggtttggggagaggaatttgagaaactatatgcaagttatgagaaacaaggtcgtgtccgcaaagttgtaaaagctcagcagctttggtatgccatcattgagtctcagacggaaacaggcaccccgtatatgctctacaaagattcctgtaatcgaaagagcaaccagcagaacctgggaaccatcaaatgcagcaacctgtgcacagaaatagtggagtacaccagcaaagatgaggttgctgtttgtaatttggcttccctggccctgaatatgtatgtcacatcagaacacacatacgactttaagaagttggctgaagtcactaaagtcgttgtccgaaacttgaataaaattattgatataaactactatcctgtaccagaggcatgcctatcaaataaacgccatcgccccattggaattggggtacaaggtctggcagatgcttttatcctgatgagatacccttttgagagtgcagaagcccagttactgaataagcagatctttgaaactatttattatggtgctctggaagccagctgtgaccttgccaaggagcagggcccatacgaaacctatgagggctctccagttagcaaaggaattcttcagtatgatatgtggaatgttactcctacagacctatgggactggaaggttctcaaggagaagattgcaaagtatggtataagaaacagtttacttattgccccgatgcctacagcttccactgctcagatcctggggaataatgagtccattgaaccttacaccagcaacatctatactcgcagagtcttgtcaggagaatttcagattgtaaatcctcacttattgaaagatcttaccgagcggggcctatggcatgaagagatgaaaaaccagattattgcatgcaatggctctattcagagcataccagaaattcctgatgacctgaagcaactttataaaactgtgtgggaaatctctcagaaaactgttctcaagatggcagctgagagaggtgctttcattgatcaaagccaatctttgaacatccacattgctgagcctaactatggcaaactcactagtatgcacttctacggctggaagcagggtttgaagactgggatgtattatttaaggacgagaccagcagctaatccaatccagttcactctaaataaggagaagctaaaagataaagaaaaggtatcaaaagaggaagaagagaaggagaggaacacagcagccatggtgtgctctttggagaatagagatgaatgtctgatgtgtggatcctgaggaaagacttggaagagaccagcatgtcttcagtagccaaactacttcttgagcatagataggtatagtgggtttgcttgaggtggtaaggctttgctggaccctgttgcaggcaaaaggagtaattgatttaaagtactgttaatgatgttaatgatttttttttaaactcatatattgggattttcaccaaaataatgcttttgaaaaaaagaaaaaaaaaacggatatattgagaatcaaagtagaagttttaggaatgcaaaataagtcatcttgcatacagggagtggttaagtaaggtttcatcacccatttagcactgcttttctgaagacttcagttttgttaaggagatttagttttactgctttgactggtgggtctctagaagcaaaactgagtgataactcatgagaagtactgataggacctttatctggatatggtcctataggttattctgaaataaagataaacatttctaagtgaaaaaa

SEQ ID NO: 458542 - DNA, 829 bp, Homo sapiens
  misc_feature (609)..(609): n is a, c, g, or t
  misc_feature (642)..(642): n is a, c, g, or t
  misc_feature (657)..(657): n is a, c, g, or t
  misc_feature (686)..(686): n is a, c, g, or t
  misc_feature (749)..(749): n is a, c, g, or t
  misc_feature (777)..(777): n is a, c, g, or t
  misc_feature (787)..(787): n is a, c, g, or t
  misc_feature (810)..(810): n is a, c, g, or t
  misc_feature (817)..(817): n is a, c, g, or t
gtcgcgcccctttgtgcgtcacgggtggcgggcgcgggaaggggatttggattgttgcgcctctgctctgaagaaagtgctgtctggctccaactccagttctttcccctgagcagcgcctggaacctaacccttcccactctgtcaccttctcgatcccgccggcgctttagagccgcagtccagtcttggatccttcagagcctcagccactagctgcgatgcatgtgatcaagcgagatggccgccaagaacgagtcatgtttgacaaaattacatctcgaatccagaagctttgttatggactcaatatggattttgttgatcctgctcagatcaccatgaaagtaatccaaggcttgtacagtggggtcaccacagtggaactagatactttggctgctgaaacagctgcaaccttgactactaagcaccctgactatgctatcctggcagccaggatcgctgtctctaacttgcacaaagaaacaaagaaagtgttcagtgatgtgatggaagacctctataactacataaatccacataatggcaaacactctcccatggtggccaagtcaacattggatattgttctggccaataaagatngccctgaattctggctattaacctatgaccggngaatttccccttaanaattaacttcgggcttttaaaaacgctangaacgggtccttaatttggtttgaaaggttcaaatgggggaaaaagtggggttggaaaagganccacaaacaattatggtttggaatgaanaaagtatccnggtttggggaattccaacaaaanggaaagnacaattttgggt

SEQ ID NO: 458543 - DNA, 3075 bp, Homo sapiens
cggcgaggtagaggcaggggtggtaaatcaggcacggaggctgctctgaagaaagtgctgtctggctccaactccagttctttcccctgagcagcgcctggaacctaacccttcccactctgtcaccttctcgatcccgccggcgctttagagccgcagtccagtcttggatccttcagagcctcagccactagctgcgatgcatgtgatcaagcgagatggccgccaagaacgagtcatgtttgacaaaattacatctcgaatccagaagctttgttatggactcaatatggattttgttgatcctgctcagatcaccatgaaagtaatccaaggcttgtacagtggggtcaccacagtggaactagatactttggctgctgaaacagctgcaaccttgactactaagcaccctgactatgctatcctggcagccaggatcgctgtctctaacttgcacaaagaaacaaagaaagtgttcagtgatgtgatggaagacctctataactacataaatccacataatggcaaacactctcccatggtggccaagtcaacattggatattgttctggccaataaagatcgcctgaattctgctattatctatgaccgagatttctcttacaattacttcggctttaagacgctagagcggtcttatttgttgaagatcaatggaaaagtggctgaaagaccacaacatatgttgatgagagtatctgttgggatccacaaagaagacattgatgcagcaattgaaacatataatcttctttctgagaggtggtttactcatgcttcgcccactctcttcaatgctggtaccaaccgcccacaactttctagctgttttcttctgagtatgaaagatgacagcattgaaggcatttatgacactctaaagcaatgtgcattgatttctaagtctgctggaggaattggtgttgctgtgagttgtattcgggctactggcagctacattgctgggactaatggcaattccaatggccttgtaccgatgctgagagtatataacaacacagctagatatgtggatcaaggtgggaacaagcgtcctggggcatttgctatttacctggagccttggcatttagacatctttgaattccttgatttaaagaagaacacaggaaaggaagagcagcgtgccagagatcttttctttgctctttggattccggatctcttcatgaaacgagtggagactaatcaggactggtctttgatgtgtccaaatgagtgtcctggtctggatgaggtttggggagaggaatttgagaaactatatgcaagttatgagaaacaaggtcgtgtccgcaaagttgtaaaagctcagcagctttggtatgccatcattgagtctcagacggaaacaggcaccccgtatatgctctacaaagattcctgtaatcgaaagagcaaccagcagaacctgggaaccatcaaatgcagcaacctgtgcacagaaatagtggagtacaccagcaaagatgaggttgctgtttgtaatttggcttccctggccctgaatatgtatgtcacatcagaacacacatacgactttaagaagttggctgaagtcactaaagtcgttgtccgaaacttgaataaaattattgatataaactactatcctgtaccagaggcatgcctatcaaataaacgccatcgccccattggaattggggtacaaggtctggcagatgcttttatcctgatgagatacccttttgagagtgcagaagcccagttactgaataagcagatctttgaaactatttattatggtgctctggaagccagctgtgaccttgccaaggagcagggcccatacgaaacctatgagggctctccagttagcaaaggaattcttcagtatgatatgtggaatgttactcctacagacctatgggactggaaggttctcaaggagaagattgcaaagtatggtataagaaacagtttacttattgccccgatgcctacagcttccactgctcagatcctggggaataatgagtccattgaaccttacaccagcaacatctatactcgcagagtcttgtcaggagaatttcagattgtaaatcctcacttattgaaagatcttaccgagcggggcctatggcatgaagagatgaaaaaccagattattgcatgcaatggctctattcagagcataccagaaattcctgatgacctgaagcaactttataaaactgtgtgggaaatctctcagaaaactgttctcaagatggcagctgagagaggtgctttcattgatcaaagccaatctttgaacatccacattgctgagcctaactatggcaaactcactagtatgcacttctacggctggaagcagggtttgaagactgggatgtattatttaaggacgagaccagcagctaatccaatccagttcactctaaataaggagaagctaaaagataaagaaaaggtatcaaaagaggaagaagagaaggagaggaacacagcagccatggtgtgctctttggagaatagagatgaatgtctgatgtgtggatcctgaggaaagacttggaagagaccagcatgtcttcagtagccaaactacttcttgagcatagataggtatagtgggtttgcttgaggtggtaaggctttgctggaccctgttgcaggcaaaaggagtaattgatttaaagtactgttaatgatgttaatgatttttttttaaactcatatattgggattttcaccaaaataatgcttttgaaaaaaagaaaaaaaaaacggatatattgagaatcaaagtagaagttttaggaatgcaaaataagtcatcttgcatacagggagtggttaagtaaggtttcatcacccatttagcactgcttttctgaagacttcagttttgttaaggagatttagttttactgctttgactggtgggtctctagaagcaaaactgagtgataactcatgagaagtactgataggacctttatctggatatggtcctataggttattctgaaataaagataaacatttctaagtgaaaaaa

SEQ ID NO: 458544 - DNA, 2919 bp, Homo sapiens
gtcgcgcccctttgtgcgtcacgggtggcgggcgcgggaaggggatttggattgttgcgcctctgctctgaagaaagtgctgtctggctccaactccagttctttcccctgagcagcgcctggaacctaacccttcccactctgtcaccttctcgatcccgccggcgctttagagccgcagtccagtcttggatccttcagagcctcagccactagctgcgatgcatgtgatcaagcgagatggccgccaagaacgagtcatgtttgacaaaattacatctcgaatccagaagctttgttatggactcaatatggattttgttgatcctatgtgatggaagacctctataactacataaatccacataatggcaaacactctcccatggtggccaagtcaacattggatattgttctggccaataaagatcgcctgaattctgctattatctatgaccgagatttctcttacaattacttcggctttaagacgctagagcggtcttatttgttgaagatcaatggaaaagtggctgaaagaccacaacatatgttgatgagagtatctgttgggatccacaaagaagacattgatgcagcaattgaaacatataatcttctttctgagaggtggtttactcatgcttcgcccactctcttcaatgctggtaccaaccgcccacaactttctagctgttttcttctgagtatgaaagatgacagcattgaaggcatttatgacactctaaagcaatgtgcattgatttctaagtctgctggaggaattggtgttgctgtgagttgtattcgggctactggcagctacattgctgggactaatggcaattccaatggccttgtaccgatgctgagagtatataacaacacagctagatatgtggatcaaggtgggaacaagcgtcctggggcatttgctatttacctggagccttggcatttagacatctttgaattccttgatttaaagaagaacacaggaaaggaagagcagcgtgccagagatcttttctttgctctttggattccggatctcttcatgaaacgagtggagactaatcaggactggtctttgatgtgtccaaatgagtgtcctggtctggatgaggtttggggagaggaatttgagaaactatatgcaagttatgagaaacaaggtcgtgtccgcaaagttgtaaaagctcagcagctttggtatgccatcattgagtctcagacggaaacaggcaccccgtatatgctctacaaagattcctgtaatcgaaagagcaaccagcagaacctgggaaccatcaaatgcagcaacctgtgcacagaaatagtggagtacaccagcaaagatgaggttgctgtttgtaatttggcttccctggccctgaatatgtatgtcacatcagaacacacatacgactttaagaagttggctgaagtcactaaagtcgttgtccgaaacttgaataaaattattgatataaactactatcctgtaccagaggcatgcctatcaaataaacgccatcgccccattggaattggggtacaaggtctggcagatgcttttatcctgatgagatacccttttgagagtgcagaagcccagttactgaataagcagatctttgaaactatttattatggtgctctggaagccagctgtgaccttgccaaggagcagggcccatacgaaacctatgagggctctccagttagcaaaggaattcttcagtatgatatgtggaatgttactcctacagacctatgggactggaaggttctcaaggagaagattgcaaagtatggtataagaaacagtttacttattgccccgatgcctacagcttccactgctcagatcctggggaataatgagtccattgaaccttacaccagcaacatctatactcgcagagtcttgtcaggagaatttcagattgtaaatcctcacttattgaaagatcttaccgagcggggcctatggcatgaagagatgaaaaaccagattattgcatgcaatggctctattcagagcataccagaaattcctgatgacctgaagcaactttataaaactgtgtgggaaatctctcagaaaactgttctcaagatggcagctgagagaggtgctttcattgatcaaagccaatctttgaacatccacattgctgagcctaactatggcaaactcactagtatgcacttctacggctggaagcagggtttgaagactgggatgtattatttaaggacgagaccagcagctaatccaatccagttcactctaaataaggagaagctaaaagataaagaaaaggtatcaaaagaggaagaagagaaggagaggaacacagcagccatggtgtgctctttggagaatagagatgaatgtctgatgtgtggatcctgaggaaagacttggaagagaccagcatgtcttcagtagccaaactacttcttgagcatagataggtatagtgggtttgcttgaggtggtaaggctttgctggaccctgttgcaggcaaaaggagtaattgatttaaagtactgttaatgatgttaatgatttttttttaaactcatatattgggattttcaccaaaataatgcttttgaaaaaaagaaaaaaaaaacggatatattgagaatcaaagtagaagttttaggaatgcaaaataagtcatcttgcatacagggagtggttaagtaaggtttcatcacccatttagcactgcttttctgaagacttcagttttgttaaggagatttagttttactgctttgactggtgggtctctagaagcaaaactgagtgataactcatgagaagtactgataggacctttatctggatatggtcctataggttattctgaaataaagataaacatttctaagtgaaaaaa

SEQ ID NO: 458545 - DNA, 1096 bp, Homo sapiens
cctctataggatcccctgccgagatgcctacagcttccactgctcagatcctggggaataatgagtccattgaaccttacaccagcaacatctatactcgcagagtcttgtcaggagaatttcagattgtaaatcctcacttattgaaagatcttaccgagcggggcctatggcatgaagagatgaaaaaccagattattgcatgcaatggctctattcagagcataccagaaattcctgatgacctgaagcaactttataaaactgtgtgggaaatctctcagaaaactgttctcaagatggcagctgagagaggtgctttcattgatcaaagccaatctttgaacatccacattgctgagcctaactatggcaaactcactagtatgcacttctacggctggaagcagggtttgaagactgggatgtattatttaaggacgagaccagcagctaatccaatccagttcactctaaataaggagaagctaaaagataaagaaaaggtatcaaaagaggaagaagagaaggagaggaacacagcagccatggtgtgctctttggagaatagagatgaatgtctgatgtgtggatcctgaggaaagacttggaagagaccagcatgtcttcagtagccaaactacttcttgagcatagataggtatagtgggtttgcttgaggtggtaaggctttgctggaccctgttgcaggcaaaaggagtaattgatttaaagtactgttaatgatgttaatgatttttttttaaactcatatattgggattttcaccaaaataatgcttttgaaaaaaagaaaaaaaaaacggatatattgagaatcaaagtagaagttttaggaatgcaaaataagtcatcttgcatacagggagtggttaagtaaggtttcatcacccatttagcactgcttttctgaagacttcagttttgttaaggagatttagttttactgctttgactggtgggtctctagaagcaaaactgagtgataactcatgagaagtactgataggacctttatctggatatggtcctataggttattctgaaataaagataaacatttctaagtgaaaaaa

SEQ ID NO: 458546 - DNA, 1048 bp, Homo sapiens
agaagacatgtgtgtagagcgagaacaaagcacactgcaacatctatactcgcagagtcttgtcaggagaatttcagattgtaaatcctcacttattgaaagatcttaccgagcggggcctatggcatgaagagatgaaaaaccagattattgcatgcaatggctctattcagagcataccagaaattcctgatgacctgaagcaactttataaaactgtgtgggaaatctctcagaaaactgttctcaagatggcagctgagagaggtgctttcattgatcaaagccaatctttgaacatccacattgctgagcctaactatggcaaactcactagtatgcacttctacggctggaagcagggtttgaagactgggatgtattatttaaggacgagaccagcagctaatccaatccagttcactctaaataaggagaagctaaaagataaagaaaaggtatcaaaagaggaagaagagaaggagaggaacacagcagccatggtgtgctctttggagaatagagatgaatgtctgatgtgtggatcctgaggaaagacttggaagagaccagcatgtcttcagtagccaaactacttcttgagcatagataggtatagtgggtttgcttgaggtggtaaggctttgctggaccctgttgcaggcaaaaggagtaattgatttaaagtactgttaatgatgttaatgatttttttttaaactcatatattgggattttcaccaaaataatgcttttgaaaaaaagaaaaaaaaaacggatatattgagaatcaaagtagaagttttaggaatgcaaaataagtcatcttgcatacagggagtggttaagtaaggtttcatcacccatttagcactgcttttctgaagacttcagttttgttaaggagatttagttttactgctttgactggtgggtctctagaagcaaaactgagtgataactcatgagaagtactgataggacctttatctggatatggtcctataggttattctgaaataaagataaacatttctaagtgaaaaaa

SEQ ID NO: 458547 - DNA, 850 bp, Homo sapiens
gacattgtagtcttaataattgctaacatgaatttaataattgctgacatgatttgattctttagatggccgccaagaacgagtcatgtttgacaaaattacatctcgaatccagaagctttgttatggactcaatatggattttgttgatcctgctcagatcaccatgaaagtaatccaaggcttgtacagtggggtcaccacagtggaactagatactttggctgctgaaacagctgcaaccttgactactaagcaccctgactatgctatcctggcagccaggatcgctgtctctaacttgcacaaagaaacaaagaaagtgttcagtgtgtctgatgtgtggatcctgaggaaagacttggaagagaccagcatgtcttcagtagccaaactacttcttgagcatagataggtatagtgggtttgcttgaggtggtaaggctttgctggaccctgttgcaggcaaaaggagtaattgatttaaagtactgttaatgatgttaatgatttttttttaaactcatatattgggattttcaccaaaataatgcttttgaaaaaaagaaaaaaaaaacggatatattgagaatcaaagtagaagttttaggaatgcaaaataagtcatcttgcatacagggagtggttaagtaaggtttcatcacccatttagcactgcttttctgaagacttcagttttgttaaggagatttagttttactgctttgactggtgggtctctagaagcaaaactgagtgataactcatgagaagtactgataggacctttatctggatatggtcctataggttattctgaaataaagataaacatttctaagtgaaaaaa

SEQ ID NO: 458548 - DNA, 468 bp, Homo sapiens
tctttcttatgtatgacgtgtaccatgtgctgggttttagtctaggcactggaaatagagtggtaaaaaatatatatattccggccaggcatggtggctcatacctgtaatcccagaactgagagagaccaagacgagtggatagcttgaggtcaggaaggcgaaaccctgtatctactaaaaatacaaaaattagctgggcatggtggcgcatgcttgtaatcccagctactcaggagcctgaggcatgagaattgcttgaacctgcgacacagaggttgcagtgagccgagatcacaccactgcactccaggctgagtgacagagcaagactgtgtctcaaaaaaaaaaaaaaaaaatcccgggggaaaccgttttccccctaaaaaaaattggcacgggggaacccttaaaattcaccctgggggtttgcagcttggccagggcccgccttttaacaaggtcgga

SEQ ID NO: 458549 - DNA, 718 bp, Homo sapiens
gtgaagtttgccagtttctaggaatctccagaggttgttccccagaaccaagccttaactttggtggtatcttcctgttaaatgtggagccagaaccacggcttaaatgttagacactaggatgatgcccactttgtgccacatgatggtggctactgcctgtaggcattttccagtgactgaaagaggctgctagtggtagggatgaggtatcatccaatttcctaaaaagattgaacccttcatattcaccagaagaataacagctgttccccacctcccacacatctgcatcaagctgaagttctgtgtcctcatgagctgatttcacctttgcacagatcttgggggagggctcctgcactgactcctgagactattttaactgggattggttatcacttttctgtaacgcctgcttgtccctgcccagaattcccagctgcctgtgtcagcctgtccccctgagatcagagtcctacagtggctgtcacgcagccaccaggtcatctcctttcatccccacctcaaggctgatggctgtgaccctgcttcctgcactgacccagagcctctgcctgtgcacggccagctgcgtctactcaggccccaaggggtttctgtttctattctctcctcagactgctcaagagaagcacatgaaaaccattacctgactttagagcttttttacataattaaacatgatcctgagtta

SEQ ID NO: 458550 - DNA, 1209 bp, Homo sapiens
ttttctgaggtacatcagatccatcaggtccaagctgtgttgactaccactacttttcccttcgtctcaattatgtcttggaagaaggctttgcggatccctggaggccttcgggtagcaactgtgaccttgatgctggcgatgctgagcaccccagtggctgagggcagagactctcccgaggatttcgtgtaccagtttaagggcatgtgctacttcaccaacgggacggagcgcgtgcgtcttgtgaccagatacatctataaccgagaggagtacgcacgcttcgacagcgacgtgggggtgtatcgggcggtgacgccgctggggccgcctgacgccgagtactggaacagccagaaggaagtcctggagaggacccgggcggagttggacacggtgtgcagacacaactaccagttggagctccgcacgaccttgcagcggcgagtggagcccacagtgaccatctccccatccaggacagaggccctcaaccaccacaacctgctggtctgctcagtgacagatttctatccagcccagatcaaagtccggtggtttcggaatgaccaggaggagacaaccggcgttgtgtccaccccccttattaggaacggtgactggaccttccagatcctggtgatgctggaaatgactccccagcgtggagacgtctacacctgccacgtggagcaccccagcctccagaaccccatcaccgtggagtggcgggctcagtctgaatctgcccagagcaagatgctgagtggcattggaggcttcgtgctggggctgatcttcctcgggctgggccttattatccatcacaggagtcagaaagggctcctgcactgactcctgagactattttaactgggattggttatcacttttctgtaacgcctgcttgtccctgcccagaattcccagctgcctgtgtcagcctgtccccctgagatcagagtcctacagtggctgtcacgcagccaccaggtcatctcctttcatccccacctcaaggctgatggctgtgaccctgcttcctgcactgacccagagcctctgcctgtgcacggccagctgcgtctactcaggccccaaggggtttctgtttctattctctcctcagactgctcaagagaagcacatgaaaaccattacctgactttagagcttttttacataattaaacatgatcctgagtta

SEQ ID NO: 458551 - DNA, 1299 bp, Homo sapiens
aggaaattaagaaaaagcaggaaaatgagagaacatattaccaagtaaataaagcatacattaaatatttactataattttacactaaagaaataaaggaaatgcagtaaaatggccagagaggtaaaggttaagatgtataaaatatgcagggaaaggtgtgtcatttttgaccatgagcagcgctctgagaagataaaggaattgagttatgggcaaacatgatgtttgatcagtgttagtttttttcaaggcctgcctacttttccttcaaatattacaaacttttgaaataacattcaattttttggtctctgttactagattgcaagttctataaaggcaggaaccagggtttgttgtttatttttggattctcagtgattgtcaaatttatatttgttgaaggaaccttaatccaagacttggactccaggtatctttccattctggttccaaggagggaccttcctcacagcaggcgtgctgtgtggtctcacatctcactcctatatctttccctgtctgttactgccctcagtggagcccacagtgaccatctccccatccaggacagaggccctcaaccaccacaacctgctggtctgctcggtgacagatttctatccaggccagatcaaagtccggtggtttcggaatgatcaggaggagacagccggcgttgtgtccaccccccttattaggaatggtgactggaccttccagatcctggtgatgctggaaatgactccccagcgtggagatgtctacacctgccacgtggagcaccccagcctccagagccccatcaccgtggagtggcgggctcagtctgaatctgcccagagcaagatgctgagtggcattggaggcttcgtgctggggctgatcttcctcgggctgggccttattatccatcacaggagtcagaaagggctcctgcactgactcctgagactattttaactgggattggttatcacttttctgtaacgcctgcttgtccctgcccagaattcccagctgcctgtgtcagcctgtccccctgagatcagagtcctacagtggctgtcacgcagccaccaggtcatctcctttcatccccacctcaaggctgatggctgtgaccctgcttcctgcactgacccagagcctctgcctgtgcacggccagctgcgtctactcaggccccaaggggtttctgtttctattctctcctcagactgctcaagagaagcacatgaaaaccattacctgactttagagcttttttacataattaaacatgatcctgagtta

SEQ ID NO: 458552 - DNA, 828 bp, Homo sapiens
ttttctgaggtacatcagatccatcaggtccaagctgtgttgactaccactacttttcccttcgtctcaattatgtcttggaagaaggctttgcggatccctggaggccttcgggtagcaactgtgaccttgatgctggcgatgctgagcaccccagtggctgagggcagagactctcccgtggagcccacagtgaccatctccccatccaggacagaggccctcaaccaccacaacctgctggtctgctcagtgacagatttctatccagcccagatcaaagtccggtggtttcggaatgaccaggaggagacaaccggcgttgtgtccaccccccttattaggaacggtgactggaccttccagatcctggtgatgctggaaatgactccccagcgtggagacgtctacacctgccacgtggagcaccccagcctccagaaccccatcaccgtggagtggcggctcctgcactgactcctgagactattttaactgggattggttatcacttttctgtaacgcctgcttgtccctgcccagaattcccagctgcctgtgtcagcctgtccccctgagatcagagtcctacagtggctgtcacgcagccaccaggtcatctcctttcatccccacctcaaggctgatggctgtgaccctgcttcctgcactgacccagagcctctgcctgtgcacggccagctgcgtctactcaggccccaaggggtttctgtttctattctctcctcagactgctcaagagaagcacatgaaaaccattacctgactttagagcttttttacataattaaacatgatcctgagtta

SEQ ID NO: 458553 - DNA, 546 bp, Homo sapiens
gtgaagtttgccagtttctaggaatctccagaggttgttccccagaaccaagccttaactttggtggtatcttcctgttaaatgtggagccagaaccacggcttaaatgttagacactaggatgatgcccactttgtgccacatgatggtggctactgcctgtaggcattttccagtgactgaaagaggctgctagtggtagggatgaggtatcatccaatttcctaaaaagattgaacccttcatattcaccagaagaataacagctgttccccacctcccacacatctgcatcaagctgaagttctgtgtcctcatgagctgatttcacctttgcacagatcttgggggaggtgatgacaatacaccctggaccctgcttcctgcactgacccagagcctctgcctgtgcacggccagctgcgtctactcaggccccaaggggtttctgtttctattctctcctcagactgctcaagagaagcacatgaaaaccattacctgactttagagcttttttacataattaaacatgatcctgagtta

SEQ ID NO: 458554 - DNA, 310 bp, Homo sapiens
aaggcagggaccatggtatgttgtttgtctttggattctcagtgattgttatatttatatttgttgaaggaaccttaatccaagacttggactccaagtcatctcctttcatccccacctcaaggctgatggctgtgaccctgcttcctgcactgacccagagcctctgcctgtgcacggccagctgcgtctactcaggccccaaggggtttctgtttctattctctcctcagactgctcaagagaagcacatgaaaaccattacctgactttagagcttttttacataattaaacatgatcctgagtta

SEQ ID NO: 458555 - DNA, 1953 bp, Homo sapiens
ttttctgaggtacatcagatccatcaggtccaagctgtgttgactaccactacttttcccttcgtctcaattatgtcttggaagaaggctttgcggatccctggaggccttcgggtagcaactgtgaccttgatgctggcgatgctgagcaccccagtggctgagggcagagactctcccgaggatttcgtgtaccagtttaagggcatgtgctacttcaccaacgggacggagcgcgtgcgtcttgtgaccagatacatctataaccgagaggagtacgcacgcttcgacagcgacgtgggggtgtatcgggcggtgacgccgctggggccgcctgacgccgagtactggaacagccagaaggaagtcctggagaggacccgggcggagttggacacggtgtgcagacacaactaccagttggagctccgcacgaccttgcagcggcgagtggagcccacagtgaccatctccccatccaggacagaggccctcaaccaccacaacctgctggtctgctcagtgacagatttctatccagcccagatcaaagtccggtggtttcggaatgaccaggaggagacaaccggcgttgtgtccaccccccttattaggaacggtgactggaccttccagatcctggtgatgctggaaatgactccccagcgtggagacgtctacacctgccacgtggagcaccccagcctccagaaccccatcaccgtggagtggcgggctcagtctgaatctgcccagagcaagatgctgagtggcattggaggcttcgtgctggggctgatcttcctcgggctgggccttattatccatcacaggagtcagaaagggctcctgcactgactcctgagactattttaactgggattggttatcacttttctgtaacgcctgcttgtccctgcccagaattcccagctgcctgtgtcagcctgtccccctgagatcagagtcctacagtggctgtcacgcagccaccaggtcatctcctttcatccccacctcaaggctgatggctgtgaccctgcttcctgcactgacccagagcctctgcctgtgcacggccagctgcgtctactcaggccccaaggggtttctgtttctattctctcctcagactgctcaagagaagcacatgaaaaccattacctgactttagagcttttttacataattaaacatgatcctgagttatctgtattctcaacttccttaattgagcagaggcaggaaatcactgcagaatgaaggaacataccttgaggtgacccagccaacctgtgcccagaaggagggttgtaccttgaaaagacactgaaagaatttggggtgcaaagtcatggtgggcagaggaggtagaaaatcaactcagttgtcgcatcattcatggttctttcatattgatgttcagtgcagtggcctgagaatatcccagcctctcttctggtttggtgagtgctatataagtaaacatggtggaattgtttgggggcagatatagtgacccttggtcactggtgtttcaaacattctggcaagtcacatcaatcaagaataatttttacttttaagaaagcataaccagcaataaaagtattatttttgattctaaatgatagaaacccaaatatattttgttcatggtgcaaaggaagcctagagtcaagttgatttcagaagtgactagttccagatacacaatgagatcttcacctctctttctgttatatctctatctgtgaatctgcctctctttctgtgtctctttgtccctgtatagttctttctgcgtgtctctctgcatctttgtctctgcccccttgttgtgtctttcactacattgttgcctttctatttttctaatccatggtcactgtttatctgcattttttctatctccgtgtttctttttgcatctatttttctgcatttctcttc

SEQ ID NO: 458556 - DNA, 1659 bp, Homo sapiens
ttttctgaggtacatcagatccatcaggtccaagctgtgttgactaccactacttttcccttcgtctcaattatgtcttggaagaaggctttgcggatccctggaggccttcgggtagcaactgtgaccttgatgctggcgatgctgagcaccccagtggctgagggcagagactctcccgaggatttcgtgtaccagtttaagggcatgtgctacttcaccaacgggacggagcgcgtgcgtcttgtgaccagatacatctataaccgagaggagtacgcacgcttcgacagcgacgtgggggtgtatcgggcggtgacgccgctggggccgcctgacgccgagtactggaacagccagaaggaagtcctggagaggacccgggcggagttggacacggtgtgcagacacaactaccagttggagctccgcacgaccttgcagcggcgagtggagcccacagtgaccatctccccatccaggacagaggccctcaaccaccacaacctgctggtctgctcagtgacagatttctatccagcccagatcaaagtccggtggtttcggaatgaccaggaggagacaaccggcgttgtgtccaccccccttattaggaacggtgactggaccttccagatcctggtgatgctggaaatgactccccagcgtggagacgtctacacctgccacgtggagcaccccagcctccagaaccccatcaccgtggagtggcgggctcagtctgaatctgcccagagcaagatgctgagtggcattggaggcttcgtgctggggctgatcttcctcgggctgggccttattatccatcacaggagtcagaaagggctcctgcactgactcctgagactattttaactgggattggttatcacttttctgtaacgcctgcttgtccctgcccagaattcccagctgcctgtgtcagcctgtccccctgagatcagagtcctacagtggctgtcacgcagccaccaggtcatctcctttcatccccacctcaaggctgatggctgtgaccctgcttcctgcactgacccagagcctctgcctgtgcacggccagctgcgtctactcaggccccaaggggtttctgtttctattctctcctcagactgctcaagagaagcacatgaaaaccattacctgactttagagcttttttacataattaaacatgatcctgagttaaaaaaaaaaaaaaaaaaaaaaaaaaaaaaaaaaaaaaacaaagaaaaaaaaaaaaaaaaaaaaaaaagggggggggggccaaaaaataccccgggggggggcccaatgcccccctttttttgaaaaaaggggcggcccccaatggagggggggccgcttataaaaagaagcggacgacgcaggcgcgccggttaaaacacacagctcgtggggaggggcaaaaccaccggccacgcggggagcaaatctgtggggagacgaggacccccatctctcggggggcgggagacaaaagtggggcaccaaaccccccaccaaggaaattagaggcccccagcagggagatatacaaacaacgcacgggtgtcgtccggggggcacaccccacagcataatgcacggccgaagaaagaatcgcccaccgaagatacgtgacgaacaactttcccg

SEQ ID NO: 458557 - DNA, 1195 bp, Homo sapiens
ttttctgaggtacatcagatccatcaggtccaagctgtgttgactaccactacttttcccttcgtctcaattatgtcttggaagaaggctttgcggatccctggaggccttcgggtagcaactgtgaccttgatgctggcgatgctgagcaccccagtggctgagggcagagactctcccgaggatttcgtgtaccagtttaagggcatgtgctacttcaccaacgggacggagcgcgtgcgtcttgtgaccagatacatctataaccgagaggagtacgcacgcttcgacagcgacgtgggggtgtatcgggcggtgacgccgctggggccgcctgacgccgagtactggaacagccagaaggaagtcctggagaggacccgggcggagttggacacggtgtgcagacacaactaccagttggagctccgcacgaccttgcagcggcgagtggagcccacagtgaccatctccccatccaggacagaggccctcaaccaccacaacctgctggtctgctcagtgacagatttctatccagcccagatcaaagtccggtggtttcggaatgaccaggaggagacaaccggcgttgtgtccaccccccttattaggaacggtgactggaccttccagatcctggtgatgctggaaatgactccccagcgtggagacgtctacacctgccacgtggagcaccccagcctccagaaccccatcaccgtggagtggcgggctcagtctgaatctgcccagagcaagatgctgagtggcattggaggcttcgtgctggggctgatcttcctcgggctgggccttattatccatcacaggagtcagaaagggctcctgcactgactcctgagactattttaactgggattggttatcacttttctgtaacgcctgcttgtccctgcccagaattcccagctgcctgtgtcagcctgtccccctgagatcagagtcctacagtggctgtcacgcagccaccaggtcatctcctttcatccccacctcaaggctgatggctgtgaccctgcttcctgcactgacccagagcctctgcctgtgcacggccagttctatgagttttgatgaatgtgtcctgcttcctcccaggcttccaccatctcttcccctaaaggcaaccaccattctgatttctctcaccataggactggtaatatcccaa

SEQ ID NO: 458558 - DNA, 1090 bp, Homo sapiens
acagataacttttgatcatgtttaattatgtaaaaaggggctaaatttaggtaatggttttcaggatttcgtgtaccagtttaagggcatgtgctacttcaccaacgggacggagcgcgtgcgtcttgtgaccagatacatctataaccgagaggagtacgcacgcttcgacagcgacgtgggggtgtatcgggcggtgacgccgctggggccgcctgacgccgagtactggaacagccagaaggaagtcctggagaggacccgggcggagttggacacggtgtgcagacacaactaccagttggagctccgcacgaccttgcagcggcgagtggagcccacagtgaccatctccccatccaggacagaggccctcaaccaccacaacctgctggtctgctcagtgacagatttctatccagcccagatcaaagtccggtggtttcggaatgaccaggaggagacaaccggcgttgtgtccaccccccttattaggaacggtgactggaccttccagatcctggtgatgctggaaatgactccccagcgtggagacgtctacacctgccacgtggagcaccccagcctccagaaccccatcaccgtggagtggcgggctcagtctgaatctgcccagagcaagatgctgagtggcattggaggcttcgtgctggggctgatcttcctcgggctgggccttattatccatcacaggagtcagaaagggctcctgcactgactcctgagactattttaactgggattggttatcacttttctgtaacgcctgcttgtccctgcccagaattcccagctgcctgtgtcagcctgtccccctgagatcagagtcctacagtggctgtcacgcagccaccaggtcatctcctttcatccccacctcaaggctgatggctgtgaccctgcttcctgcactgacccagagcctctgcctgtgcacggccagctgcgtctactcaggccccaaggggtttctgtttctattctctcctcagactgctcaagagaagcacatgaaaaccattacctgactttagagcttttttacataattaaacatgatcctgagtta

SEQ ID NO: 458559 - DNA, 2043 bp, Homo sapiens
aggaaattaagaaaaagcaggaaaatgagagaacatattaccaagtaaataaagcatacattaaatatttactataattttacactaaagaaataaaggaaatgcagtaaaatggccagagaggtaaaggttaagatgtataaaatatgcagggaaaggtgtgtcatttttgaccatgagcagcgctctgagaagataaaggaattgagttatgggcaaacatgatgtttgatcagtgttagtttttttcaaggcctgcctacttttccttcaaatattacaaacttttgaaataacattcaattttttggtctctgttactagattgcaagttctataaaggcaggaaccagggtttgttgtttatttttggattctcagtgattgtcaaatttatatttgttgaaggaaccttaatccaagacttggactccaggtatctttccattctggttccaaggagggaccttcctcacagcaggcgtgctgtgtggtctcacatctcactcctatatctttccctgtctgttactgccctcagtggagcccacagtgaccatctccccatccaggacagaggccctcaaccaccacaacctgctggtctgctcggtgacagatttctatccaggccagatcaaagtccggtggtttcggaatgatcaggaggagacagccggcgttgtgtccaccccccttattaggaatggtgactggaccttccagatcctggtgatgctggaaatgactccccagcgtggagatgtctacacctgccacgtggagcaccccagcctccagagccccatcaccgtggagtggcgggctcagtctgaatctgcccagagcaagatgctgagtggcattggaggcttcgtgctggggctgatcttcctcgggctgggccttattatccatcacaggagtcagaaagggctcctgcactgactcctgagactattttaactgggattggttatcacttttctgtaacgcctgcttgtccctgcccagaattcccagctgcctgtgtcagcctgtccccctgagatcagagtcctacagtggctgtcacgcagccaccaggtcatctcctttcatccccacctcaaggctgatggctgtgaccctgcttcctgcactgacccagagcctctgcctgtgcacggccagctgcgtctactcaggccccaaggggtttctgtttctattctctcctcagactgctcaagagaagcacatgaaaaccattacctgactttagagcttttttacataattaaacatgatcctgagttatctgtattctcaacttccttaattgagcagaggcaggaaatcactgcagaatgaaggaacataccttgaggtgacccagccaacctgtgcccagaaggagggttgtaccttgaaaagacactgaaagaatttggggtgcaaagtcatggtgggcagaggaggtagaaaatcaactcagttgtcgcatcattcatggttctttcatattgatgttcagtgcagtggcctgagaatatcccagcctctcttctggtttggtgagtgctatataagtaaacatggtggaattgtttgggggcagatatagtgacccttggtcactggtgtttcaaacattctggcaagtcacatcaatcaagaataatttttacttttaagaaagcataaccagcaataaaagtattatttttgattctaaatgatagaaacccaaatatattttgttcatggtgcaaaggaagcctagagtcaagttgatttcagaagtgactagttccagatacacaatgagatcttcacctctctttctgttatatctctatctgtgaatctgcctctctttctgtgtctctttgtccctgtatagttctttctgcgtgtctctctgcatctttgtctctgcccccttgttgtgtctttcactacattgttgcctttctatttttctaatccatggtcactgtttatctgcattttttctatctccgtgtttctttttgcatctatttttctgcatttctcttc

SEQ ID NO: 458560 - DNA, 1098 bp, Homo sapiens
ttttctgaggtacatcagatccatcaggtccaagctgtgttgactaccactacttttcccttcgtctcaattatgtcttggaagaaggctttgcggatccctggaggccttcgggtagcaactgtgaccttgatgctggcgatgctgagcaccccagtggctgagggcagagactctcccgaggatttcgtgtaccagtttaagggcatgtgctacttcaccaacgggacggagcgcgtgcgtcttgtgaccagatacatctataaccgagaggagtacgcacgcttcgacagcgacgtgggggtgtatcgggcggtgacgccgctggggccgcctgacgccgagtactggaacagccagaaggaagtcctggagaggacccgggcggagttggacacggtgtgcagacacaactaccagttggagctccgcacgaccttgcagcggcgagtggagcccacagtgaccatctccccatccaggacagaggccctcaaccaccacaacctgctggtctgctcagtgacagatttctatccagcccagatcaaagtccggtggtttcggaatgaccaggaggagacaaccggcgttgtgtccaccccccttattaggaacggtgactggaccttccagatcctggtgatgctggaaatgactccccagcgtggagacgtctacacctgccacgtggagcaccccagcctccagaaccccatcaccgtggagtggcggctcctgcactgactcctgagactattttaactgggattggttatcacttttctgtaacgcctgcttgtccctgcccagaattcccagctgcctgtgtcagcctgtccccctgagatcagagtcctacagtggctgtcacgcagccaccaggtcatctcctttcatccccacctcaaggctgatggctgtgaccctgcttcctgcactgacccagagcctctgcctgtgcacggccagctgcgtctactcaggccccaaggggtttctgtttctattctctcctcagactgctcaagagaagcacatgaaaaccattacctgactttagagcttttttacataattaaacatgatcctgagtta

SEQ ID NO: 458561 - DNA, 1182 bp, Homo sapiens
taggtttgagctgtgttgactaccactgctttttccttggtctcacttatgtcttggaagatggctctgcagatccctggaggcttttgggcagcagctgtgaccgtgatgctggtgatgctgagcaccccagtggctgaggccagagactttcccaaggatttcttggtccagtttaagggcatgtgctacttcaccaacgggacagagcgcgtgcgcggtgtggccagatacatctataaccgcgaggagtacgggcgcttcgacagcgacgttggggagttccaggcggtgaccgagctggggcggagcatcgaggactggaacaactataaggacttcttggagcaggagcgggccgcggtggacaaggtgtgcagacacaactacgaggcggagctccgcgggatcttgcagaggagagtggagcccacagtgaccatctccccatccaggacagaggccctcaaccaccacaacctgctggtctgctcagtgacagatttctatccagcccagatcaaagtccggtggtttcggaatgaccaggaggagacaaccggcgttgtgtccaccccccttattaggaacggtgactggaccttccagatcctggtgatgctggaaatgactccccagcgtggagacgtctacacctgccacgtggagcaccccagcctccagaaccccatcaccgtggagtggcgggctcagtctgaatctgcccagagcaagatgctgagtggcattggaggcttcgtgctggggctgatcttcctcgggctgggccttattatccatcacaggagtcagaaagggctcctgcactgactcctgagactattttaactgggattggttatcacttttctgtaacgcctgcttgtccctgcccagaattcccagctgcctgtgtcagcctgtccccctgagatcagagtcctacagtggctgtcacgcagccaccaggtcatctcctttcatccccacctcaaggctgatggctgtgaccctgcttcctgcactgacccagagcctctgcctgtgcacggccagctgcgtctactcaggccccaaggggtttctgtttctattctctcctcagactgctcaagagaagcacatgaaaaccattacctgactttagagcttttttacataattaaacatgatcctgagtta

SEQ ID NO: 458562 - DNA, 821 bp, Homo sapiens
  misc_feature (42)..(42): n is a, c, g, or t
  misc_feature (52)..(52): n is a, c, g, or t
taccccaagcaggtaatacagactctactacgaggtggcgtncgcgggatcngcagaggagagtggagcccacagtgaccatctccccatccaggacagaggccctcaaccaccacaacctgctggtctgctcagtgacagatttctatccagcccagatcaaagtccggtggtttcggaatgaccaggaggagacaaccggcgttgtgtccaccccccttattaggaacggtgactggaccttccagatcctggtgatgctggaaatgactccccagcgtggagacgtctacacctgccacgtggagcaccccagcctccagaaccccatcaccgtggagtggcgggctcagtctgaatctgcccagagcaagatgctgagtggcattggaggcttcgtgctggggctgatcttcctcgggctgggccttattatccatcacaggagtcagaaagggctcctgcactgactcctgagactattttaactgggattggttatcacttttctgtaacgcctgcttgtccctgcccagaattcccagctgcctgtgtcagcctgtccccctgagatcagagtcctacagtggctgtcacgcagccaccaggtcatctcctttcatccccacctcaaggctgatggctgtgaccctgcttcctgcactgacccagagcctctgcctgtgcacggccagctgcgtctactcaggccccaaggggtttctgtttctattctctcctcagactgctcaagagaagcacatgaaaaccattacctgactttagagcttttttacataattaaacatgatcctgagtta

SEQ ID NO: 458563 - DNA, 1330 bp, Homo sapiens
aggaaattaagaaaaagcaggaaaatgagagaacatattaccaagtaaataaagcatacattaaatatttactataattttacactaaagaaataaaggaaatgcagtaaaatggccagagaggtaaaggttaagatgtataaaatatgcagggaaaggtgtgtcatttttgaccatgagcagcgctctgagaagataaaggaattgagttatgggcaaacatgatgtttgatcagtgttagtttttttcaaggcctgcctacttttccttcaaatattacaaacttttgaaataacattcaattttttggtctctgttactagattgcaagttctataaaggcaggaaccagggtttgttgtttatttttggattctcagtgattgtcaaatttatatttgttgaaggaaccttaatccaagacttggactccaggtatctttccattctggttccaaggagggaccttcctcacagcaggcgtgctgtgtggtctcacatctcactcctatatctttccctgtctgttactgccctcagtggagcccacagtgaccatctccccatccaggacagaggccctcaaccaccacaacctgctggtctgctcggtgacagatttctatccaggccagatcaaagtccggtggtttcggaatgatcaggaggagacagccggcgttgtgtccaccccccttattaggaatggtgactggaccttccagatcctggtgatgctggaaatgactccccagcgtggagatgtctacacctgccacgtggagcaccccagcctccagagccccatcaccgtggagtggcgggctcagtctgaatctgcccagagcaagatgctgagtggcgttggaggcttcgtgctggggctgatcttcctcgggctgggccttatcatccgtcacaggggtcagaaaggacctcgagggcctccacctgcaggactcctgcactgactcctgaggacttttgtctgggattggtcatcactcttctgtaatgcccacctgcccctgcccagaattcctagctgcctgtgtcatcctgtcccactgaggtcagagtcctacagtggctcatgcagccacaggtcaccttctgtgatccccatcccaaggcactggcggtgactctgcttcctgcactgacccagagcctctgcctgtgcactgcaagctgtgtctactcaggccccaaggggcatctctgtttccattctccccccacagacctgtcaagagaagcatgacaaacaaaatcatttacctaactttagtgctttttcccataattaaacctgattctgagttatct

SEQ ID NO: 458564 - DNA, 1213 bp, Homo sapiens
taggtttgagctgtgttgactaccactgctttttccttggtctcacttatgtcttggaagatggctctgcagatccctggaggcttttgggcagcagctgtgaccgtgatgctggtgatgctgagcaccccagtggctgaggccagagactttcccaaggatttcttggtccagtttaagggcatgtgctacttcaccaacgggacagagcgcgtgcgcggtgtggccagatacatctataaccgcgaggagtacgggcgcttcgacagcgacgttggggagttccaggcggtgaccgagctggggcggagcatcgaggactggaacaactataaggacttcttggagcaggagcgggccgcggtggacaaggtgtgcagacacaactacgaggcggagctccgcgggatcttgcagaggagagtggagcccacagtgaccatctccccatccaggacagaggccctcaaccaccacaacctgctggtctgctcggtgacagatttctatccaggccagatcaaagtccggtggtttcggaatgatcaggaggagacagccggcgttgtgtccaccccccttattaggaatggtgactggaccttccagatcctggtgatgctggaaatgactccccagcgtggagatgtctacacctgccacgtggagcaccccagcctccagagccccatcaccgtggagtggcgggctcagtctgaatctgcccagagcaagatgctgagtggcgttggaggcttcgtgctggggctgatcttcctcgggctgggccttatcatccgtcacaggggtcagaaaggacctcgagggcctccacctgcaggactcctgcactgactcctgaggacttttgtctgggattggtcatcactcttctgtaatgcccacctgcccctgcccagaattcctagctgcctgtgtcatcctgtcccactgaggtcagagtcctacagtggctcatgcagccacaggtcaccttctgtgatccccatcccaaggcactggcggtgactctgcttcctgcactgacccagagcctctgcctgtgcactgcaagctgtgtctactcaggccccaaggggcatctctgtttccattctccccccacagacctgtcaagagaagcatgacaaacaaaatcatttacctaactttagtgctttttcccataattaaacctgattctgagttatct

SEQ ID NO: 458565 - DNA, 1306 bp, Homo sapiens
aggaaattaagaaaaagcaggaaaatgagagaacatattaccaagtaaataaagcatacattaaatatttactataattttacactaaagaaataaaggaaatgcagtaaaatggccagagaggtaaaggttaagatgtataaaatatgcagggaaaggtgtgtcatttttgaccatgagcagcgctctgagaagataaaggaattgagttatgggcaaacatgatgtttgatcagtgttagtttttttcaaggcctgcctacttttccttcaaatattacaaacttttgaaataacattcaattttttggtctctgttactagattgcaagttctataaaggcaggaaccagggtttgttgtttatttttggattctcagtgattgtcaaatttatatttgttgaaggaaccttaatccaagacttggactccaggtatctttccattctggttccaaggagggaccttcctcacagcaggcgtgctgtgtggtctcacatctcactcctatatctttccctgtctgttactgccctcagtggagcccacagtgaccatctccccatccaggacagaggccctcaaccaccacaacctgctggtctgctcggtgacagatttctatccaggccagatcaaagtccggtggtttcggaatgatcaggaggagacagccggcgttgtgtccaccccccttattaggaatggtgactggaccttccagatcctggtgatgctggaaatgactccccagcgtggagatgtctacacctgccacgtggagcaccccagcctccagagccccatcaccgtggagtggcgggctcagtctgaatctgcccagagcaagatgctgagtggcgttggaggcttcgtgctggggctgatcttcctcgggctgggccttatcatccgtcacaggggtcagaaaggactcctgcactgactcctgaggacttttgtctgggattggtcatcactcttctgtaatgcccacctgcccctgcccagaattcctagctgcctgtgtcatcctgtcccactgaggtcagagtcctacagtggctcatgcagccacaggtcaccttctgtgatccccatcccaaggcactggcggtgactctgcttcctgcactgacccagagcctctgcctgtgcactgcaagctgtgtctactcaggccccaaggggcatctctgtttccattctccccccacagacctgtcaagagaagcatgacaaacaaaatcatttacctaactttagtgctttttcccataattaaacctgattctgagttatct

SEQ ID NO: 458566 - DNA, 1842 bp, Homo sapiens
ttttctgaggtacatcagatccatcaggtccaagctgtgttgactaccactacttttcccttcgtctcaattatgtcttggaagaaggctttgcggatccctggaggccttcgggtagcaactgtgaccttgatgctggcgatgctgagcaccccagtggctgagggcagagactctcccgaggatttcgtgtaccagtttaagggcatgtgctacttcaccaacgggacggagcgcgtgcgtcttgtgaccagatacatctataaccgagaggagtacgcacgcttcgacagcgacgtgggggtgtatcgggcggtgacgccgctggggccgcctgacgccgagtactggaacagccagaaggaagtcctggagaggacccgggcggagttggacacggtgtgcagacacaactaccagttggagctccgcacgaccttgcagcggcgagtggagcccacagtgaccatctccccatccaggacagaggccctcaaccaccacaacctgctggtctgctcagtgacagatttctatccagcccagatcaaagtccggtggtttcggaatgaccaggaggagacaaccggcgttgtgtccaccccccttattaggaacggtgactggaccttccagatcctggtgatgctggaaatgactccccagcgtggagacgtctacacctgccacgtggagcaccccagcctccagaaccccatcaccgtggagtggcggctcctgcactgactcctgagactattttaactgggattggttatcacttttctgtaacgcctgcttgtccctgcccagaattcccagctgcctgtgtcagcctgtccccctgagatcagagtcctacagtggctgtcacgcagccaccaggtcatctcctttcatccccacctcaaggctgatggctgtgaccctgcttcctgcactgacccagagcctctgcctgtgcacggccagctgcgtctactcaggccccaaggggtttctgtttctattctctcctcagactgctcaagagaagcacatgaaaaccattacctgactttagagcttttttacataattaaacatgatcctgagttatctgtattctcaacttccttaattgagcagaggcaggaaatcactgcagaatgaaggaacataccttgaggtgacccagccaacctgtgcccagaaggagggttgtaccttgaaaagacactgaaagaatttggggtgcaaagtcatggtgggcagaggaggtagaaaatcaactcagttgtcgcatcattcatggttctttcatattgatgttcagtgcagtggcctgagaatatcccagcctctcttctggtttggtgagtgctatataagtaaacatggtggaattgtttgggggcagatatagtgacccttggtcactggtgtttcaaacattctggcaagtcacatcaatcaagaataatttttacttttaagaaagcataaccagcaataaaagtattatttttgattctaaatgatagaaacccaaatatattttgttcatggtgcaaaggaagcctagagtcaagttgatttcagaagtgactagttccagatacacaatgagatcttcacctctctttctgttatatctctatctgtgaatctgcctctctttctgtgtctctttgtccctgtatagttctttctgcgtgtctctctgcatctttgtctctgcccccttgttgtgtctttcactacattgttgcctttctatttttctaatccatggtcactgtttatctgcattttttctatctccgtgtttctttttgcatctatttttctgcatttctcttc

SEQ ID NO: 458567 - DNA, 1098 bp, Homo sapiens
taggtttgagctgtgttgactaccactgctttttccttggtctcacttatgtcttggaagatggctctgcagatccctggaggcttttgggcagcagctgtgaccgtgatgctggtgatgctgagcaccccagtggctgaggccagagactttcccaaggatttcttggtccagtttaagggcatgtgctacttcaccaacgggacagagcgcgtgcgcggtgtggccagatacatctataaccgcgaggagtacgggcgcttcgacagcgacgttggggagttccaggcggtgaccgagctggggcggagcatcgaggactggaacaactataaggacttcttggagcaggagcgggccgcggtggacaaggtgtgcagacacaactacgaggcggagctccgcgggatcttgcagaggagagtggagcccacagtgaccatctccccatccaggacagaggccctcaaccaccacaacctgctggtctgctcggtgacagatttctatccaggccagatcaaagtccggtggtttcggaatgatcaggaggagacagccggcgttgtgtccaccccccttattaggaatggtgactggaccttccagatcctggtgatgctggaaatgactccccagcgtggagatgtctacacctgccacgtggagcaccccagcctccagagccccatcaccgtggagtggcgcctcatctctcttctccaggactcctgcactgactcctgaggacttttgtctgggattggtcatcactcttctgtaatgcccacctgcccctgcccagaattcctagctgcctgtgtcatcctgtcccactgaggtcagagtcctacagtggctcatgcagccacaggtcaccttctgtgatccccatcccaaggcactggcggtgactctgcttcctgcactgacccagagcctctgcctgtgcactgcaagctgtgtctactcaggccccaaggggcatctctgtttccattctccccccacagacctgtcaagagaagcatgacaaacaaaatcatttacctaactttagtgctttttcccataattaaacctgattctgagttatct

SEQ ID NO: 458568 - DNA, 1182 bp, Homo sapiens
taggtttgagctgtgttgactaccactgctttttccttggtctcacttatgtcttggaagatggctctgcagatccctggaggcttttgggcagcagctgtgaccgtgatgctggtgatgctgagcaccccagtggctgaggccagagactttcccaaggatttcttggtccagtttaagggcatgtgctacttcaccaacgggacagagcgcgtgcgcggtgtggccagatacatctataaccgcgaggagtacgggcgcttcgacagcgacgttggggagttccaggcggtgaccgagctggggcggagcatcgaggactggaacaactataaggacttcttggagcaggagcgggccgcggtggacaaggtgtgcagacacaactacgaggcggagctccgcgggatcttgcagaggagagtggagcccacagtgaccatctccccatccaggacagaggccctcaaccaccacaacctgctggtctgctcggtgacagatttctatccaggccagatcaaagtccggtggtttcggaatgatcaggaggagacagccggcgttgtgtccaccccccttattaggaatggtgactggaccttccagatcctggtgatgctggaaatgactccccagcgtggagatgtctacacctgccacgtggagcaccccagcctccagagccccatcaccgtggagtggcgggctcagtctgaatctgcccagagcaagatgctgagtggcattggaggcttcgtgctggggctgatcttcctcgggctgggccttattatccatcacaggagtcagaaagggctcctgcactgactcctgagactattttaactgggattggttatcacttttctgtaacgcctgcttgtccctgcccagaattcccagctgcctgtgtcagcctgtccccctgagatcagagtcctacagtggctgtcacgcagccaccaggtcatctcctttcatccccacctcaaggctgatggctgtgaccctgcttcctgcactgacccagagcctctgcctgtgcacggccagctgcgtctactcaggccccaaggggtttctgtttctattctctcctcagactgctcaagagaagcacatgaaaaccattacctgactttagagcttttttacataattaaacatgatcctgagtta

SEQ ID NO: 458569 - DNA, 1187 bp, Homo sapiens
ttttctgaggtacatcagatccatcaggtccaagctgtgttgactaccactacttttcccttcgtctcaattatgtcttggaagaaggctttgcggatccctggaggccttcgggtagcaactgtgaccttgatgctggcgatgctgagcaccccagtggctgagggcagagactctcccgaggatttcgtgtaccagtttaagggcatgtgctacttcaccaacgggacggagcgcgtgcgtcttgtgaccagatacatctataaccgagaggagtacgcacgcttcgacagcgacgtgggggtgtatcgggcggtgacgccgctggggccgcctgacgccgagtactggaacagccagaaggaagtcctggagaggacccgggcggagttggacacggtgtgcagacacaactaccagttggagctctggagcccacagtgaccatctccccatccaggacagaggccctcaaccaccacaacctgctggtctgctcagtgacagatttctatccagcccagatcaaagtccggtggtttcggaatgaccaggaggagacaaccggcgttgtgtccaccccccttattaggaacggtgactggaccttccagatcctggtgatgctggaaatgactccccagcgtggagacgtctacacctgccacgtggagcaccccagcctccagaaccccatcaccgtggagtggcgggctcagtctgaatctgcccagagcaagatgctgagtggcattggaggcttcgtgctggggctgatcttcctcgggctgggccttattatccatcacaggagtcagaaagggctcctgcactgactcctgagactattttaactgggattggttatcacttttctgtaacgcctgcttgtccctgcccagaattcccagctgcctgtgtcagcctgtccccctgagatcagagtcctacagtggctgtcacgcagccaccaggtcatctcctttcatccccacctcaaggctgatggctgtgaccctgcttcctgcactgacccagagcctctgcctgtgcacggccagctgcgtctactcaggccccaaggggtttctgtttctattctctcctcagactgctcaagagaagcacatgaaaaccattacctgactttagagcttttttacataattaaacatgatcctgagtta

SEQ ID NO: 458570 - DNA, 1158 bp, Homo sapiens
ttttctgaggtacatcagatccatcaggtccaagctgtgttgactaccactacttttcccttcgtctcaattatgtcttggaagaaggctttgcggatccctggaggccttcgggtagcaactgtgaccttgatgctggcgatgctgagcaccccagtggctgagggcagagactctcccgaggatttcgtgtaccagtttaagggcatgtgctacttcaccaacgggacggagcgcgtgcgtcttgtgaccagatacatctataaccgagaggagtacgcacgcttcgacagcgacgtgggggtgtatcgggcggtgacgccgctggggccgcctgacgccgagtactggaacagccagaaggaagtcctggagaggacccgggcggagttggacacggtgtgcagacacaactaccagttggagctccgcacgaccttgcagcggcgagtggagcccacagtgaccatctccccatccaggacagaggccctcaaccaccacaacctgctggtctgctcagtgacagatttctatccagcccagatcaaagtccggtggtttcggaatgaccaggaggagacaaccggcgttgtgtccaccccccttattaggaacggtgactggaccttccagatcctggtgatgctggaaatgactccccagcgtggagacgtctacacctgccacgtggagcaccccagcagcaagatgctgagtggcattggaggcttcgtgctggggctgatcttcctcgggctgggccttattatccatcacaggagtcagaaagggctcctgcactgactcctgagactattttaactgggattggttatcacttttctgtaacgcctgcttgtccctgcccagaattcccagctgcctgtgtcagcctgtccccctgagatcagagtcctacagtggctgtcacgcagccaccaggtcatctcctttcatccccacctcaaggctgatggctgtgaccctgcttcctgcactgacccagagcctctgcctgtgcacggccagctgcgtctactcaggccccaaggggtttctgtttctattctctcctcagactgctcaagagaagcacatgaaaaccattacctgactttagagcttttttacataattaaacatgatcctgagtta

SEQ ID NO: 458571 - DNA, 795 bp, Homo sapiens
gcggcggctaatactactaaattcggggccggttcgacggctttgctaggatggaatcaacagaaaaatgtgaagctgttattggtcattttaatggaaaatttattaagacaccaccaggagtttctgcccccacagaacctttattgtgtaagtttgctgatggaggacagaaaaagagacagaacccaaacaaatacatccctaatggaagaccatggcatagagaaggagaggtgagacttgctggaatgacacttacttacgacccaactacagctgctatacagaacggattttatccttcaccatacagtattgctacaaaccgaatgatcactcaaacttctattacaccctatattgcatctcctgtatctgcctaccaggtgcaaagtccttcgtggatgcaacctcaaccatatattctacagcaccctgtaagttttttatcttaatgactttgtgttttacaagtaagttatgtgtatattctctctaggttaaaaccatttgccaagggtggtataggatttgggaaattttaaacatggaatatgagaatgtacaatttcattataaaacttcttctcatccttataaaacaacttggtagaagatattaagttacattttctataagaacttaaaatatatcatatttgaggcagggcaccattttcttattcataccagctctttagagatcattcaaatgagaggctacatttttaatagtacttgggataaaaccgctctcattttttacattctgtttaatgcagatataaagtt

SEQ ID NO: 458572 - DNA, 1222 bp, Homo sapiens
gaaagtctattctctgggtatctctcctttacgagaatatagcacccacacgtgaccacatctagccttttatgactagtgtcatctatataactagtaccactgtccctgtggcagtgtcatgaagcgaaagacgaaggtaatacaagatggtaaaagcagggaattatttctcgcttatttcttcttttatggagtttgggagtattgaatcatggtcttaatattgaaatatttcaccaaagtccaggggactcctttgggtaatgaggttgagctggcaccagatcagcttccagatttgatgcttagcattttgctggtaagatggctaaaggattttaatttagcctctattctatagtggcttaaaagaacaaagggtggtgcgttttccccttatacactcaaaacctacagctgtttcttgtgaaggctaagccagggccacacatatccaatgagactgactagaaatttctcctgcctttgggaaaggatgactgtcagtgtcagaaaagccaggctctgctgcctaatctgcagtgacctgttagaggtctaataagtcttacccctgtgggctctacctgtagaaacaatactaggtactagtttagggggctgctagaaaataatgaggtcctttgaggagagatcttctaaaatcacacattagtgatactgaattattgagagtgacaaacttttttatcttcacccataataaactttttttatcttcactttgttagcaaatccaaagaaatgtggaatttttagtttagcagattcaaaaagtagaaaacagtttaccttccatatgacatatttatatgcactatttaagctttgaggtgtagcccatttaaatttcttctttgagatttccaaatacattatatccatctcacaatccccccacgtactccaaattttgcatggtttaccattgcccattctgacctcattcttctttctagtacatgcctgcaacgtcagctatgcaaggagcctacttgccacagtatgcacatatgcagacgacagcggttcctgttgaggttggtagagaccatccagtgaccattctggctataagtagtttcagaaatgggtaaattaaatagaactcagaaaaatctaccagacgtcaaatatttgcataaagaattgcgtttagccagatgtggtgggtcatgcctgtaagtccaacactttg

SEQ ID NO: 458573 - DNA, 643 bp, Homo sapiens
ctgaggatccgtatcagagcatacccctaaagaggttaagaaccaatagtaaagagtttacaaaacattattattcccattttataattagaaaattgaggaatagaaattgacagcagctgatttgctgcttaagaaagaaaattagatgtcatagttccctaatcctgtaatgctataagctattagattattaagaccactgaagcatataaaaaatgggggcatctggcccaaattagggtctgtagggagttgtttgccttcccatcatatatccagtgagggccctgcactcatgttggagtgggcctttctccactaaaccaccataagcttatgcaattggatttgagaaattggcagctgcaagaaaccaccaaccccaatggggaaaggctacagtccagataactgaaatgttaacaaggcagaagcacttaactttggtctgccttaggtggcaaaggaaaccagagaaaacaagtatcggggctctgctatcaaggtaaatcgcaatacattcttcccccatgactcttccccatatcctctctgttgaacctctgaagttaacaataggggataaaatgcaggagggttttgttgttaagaattggaaactgaaacttaataaaattac

SEQ ID NO: 458574 - DNA, 576 bp, Homo sapiens
agtgaccagtttgccaagaattctaactgccttaatctttttaatcattgatagtattgtttccttgttttctttctgtagatttttaacatgattaaaaagagttctaaagaaataggtaagctttacaatgaaaatcaatatttctttcaaaatcctcccttttctaggtgcaaagtccttcgtggatgcaacctcaaccatatattctacagcaccctgtaagttttttatcttaatgactttgtgttttacaagtaagttatgtgtatattctctctaggttaaaaccatttgccaagggtggtataggatttgggaaattttaaacatggaatatgagaatgtacaatttcattataaaacttcttctcatccttataaaacaacttggtagaagatattaagttacattttctataagaacttaaaatatatcatatttgaggcagggcaccattttcttattcataccagctctttagagatcattcaaatgagaggctacatttttaatagtacttgggataaaaccgctctcattttttacattctgtttaatgcagatataaagtt

SEQ ID NO: 458575 - DNA, 4360 bp, Homo sapiens
  misc_feature (4024)..(4024): n is a, c, g, or t
  misc_feature (4029)..(4029): n is a, c, g, or t
ggcacgaggggtggagcagcggcagcagcagcagccgccgccgccgccgccgctgccgccgccgccggaaagggagaggcaggagagcccgagacttggaaaccccaaagtgtccgcgaccctgcacggcagctcccttccagcttcatgggcaaagtgtggaaacagcagatgtaccctcagtacgccacctactattacccccagtatctgcaagccaagcagtctctggtcccagcccaccccatggcccctcccagtcccagcaccaccagcagtaataacaacagtagcagcagtagcaactcaggatgggatcagctcagcaaaacgaacctctatatccgaggactgcctccccacaccaccgaccaggacctggtgaagctctgtcaaccatatgggaaaatagtctccacaaaggcaattttggataagacaacgaacaaatgcaaaggttatggttttgtcgactttgacagccctgcagcagctcaaaaagctgtgtctgccctgaaggccagtggggttcaagctcaaatggcaaagcaacaggaacaagatcctaccaacctctacatttctaatttgccactctccatggatgagcaagaactagaaaatatgctcaaaccatttggacaagttatttctacaaggatactacgtgattccagtggtacaagtcgtggtgttggctttgctaggatggaatcaacagaaaaatgtgaagctgttattggtcattttaatggaaaatttattaagacaccaccaggagtttctgcccccacagaacctttattgtgtaagtttgctgatggaggacagaaaaagagacagaacccaaacaaatacatccctaatggaagaccatggcatagagaaggagaggtgagacttgctggaatgacacttacttacgacccaactacagctgctatacagaacggattttatccttcaccatacagtattgctacaaaccgaatgatcactcaaacttctattacaccctatattgcatctcctgtatctgcctaccaggtgcaaagtccttcgtggatgcaacctcaaccatatattctacagcaccctggtgccgtgttaactccctcaatggagcacaccatgtcactacagcccgcatcaatgatcagccctctggcccagcagatgagtcatctgtcactaggcagcaccggaacatacatgcctgcaacgtcagctatgcaaggagcctacttgccacagtatgcacatatgcagacgacagcggttcctgttgaggaggcaagtggtcaacagcaggtggctgtcgagacgtctaatgaccattctccatatacctttcaacctaataagtaactgtgagatgtacagaaaggtgttcttacatgaagaagggtgtgaaggctgaacaatcatggatttttctgatcaattgtgctttaggaaattattgacagttttgcacaggttcttgaaaacgttatttataatgaaatcaactaaaactatttttgctataagttctataaggtgcataaaacccttaaattcatctagtagctgttcccccgaacaggtttattttagtaaaaaaaaaaaaccaaaaacaaaaacaaaagatttttatcaaatgttatgatgcaaaaaaagaaaaagaaaaaaaaaaagaaaagaaaacttcaattttctgggtatgcacaaagaccatgaagacttatccaagtgcatgaccggatttttgtggttttgttcattttgtgtttaatttgtgttttttttttccagctgtatgaaatgggctttctgaagtttaaatagtccgacttcacccatggtgttctgtgcttgcagtgcgagtgttgctgtaattcagtgttgccgtcagtgtctcttttcttagctttctgtctttctttcaacgtagtgtgaagtgtcttatccttttctatgaattccaatttgccttaactcttttgatgctgtagctgtttcagtaaaagttagttcaaactaatgatgtagaatgctttgaccaaatgagctggtctattatgccttgtaaaacagcagcatagggcttttaaaaggtagtcaataaaagttgctgaaattttggcttttttaaatatgtagtaggtgtttttaatgatttttcacataatgtgtaaggtagtgaaatgcaagaagggaaaaatgttttgtgtgaaacacattttctgactggggaacttttattagggtaaattgtttgtaaggctgtacgccaacagtttcctctgatagtttgactgatttaggatatctgctgtatgatgcaatgtaaagtcttttttgccttttttcaggaaaaaaaaaaaagctaacttgatgtactagatttagtgtaggtagtgttggggttggggatgggggtgggggaggggagtcactgaatgttttgtccttcctttatactaatgatagtgctttagaatgagaattatgcctgaaatctggcaaaccgaaaaatgttgctattgcaacaaagtggcaaaagctaaaagtaaggatttatcttcaaacataagctgagataacgaatagaagcaaaacgattggctactagctctctctctctctctctattaggtaaatttgaaaaataaaaatgacttggcacttttaaaggtaacttcaccaaagaccgaagagccagtaaccagtagctccaacttgtctcagcatcacatcttctgtgctctttatttttgccggaccagtttgcggttaggagaatgtgccttttttgtacctttgcatttaggttttataattttaattgatgtatggacacacacaaacaaaaaagcatgaaggaagatttggatccaagcagtgccacactttacatcatcactacaagtgttcaagtgtaaagaaaaccaattttgaaactatgaaattcctgattcataaatacacagttatttctactttagtacatataagataattcactgttattaaagctcttttattaaggcaattgcatatgttttaaaagcaatggtaaattaagttgtcttccaaaactgtgtacttgtctggtcagctgtgtatgatcagttatctacctcagagtctattttcttttgtgctgggacaggttgctggccctccctgtttccacagaccaaatcctcctagctcaggagctagggctaagcagttatttctttcaagtattttttagttcttaaattttatgcttgtatttgatgatagatgtcagtgacatttcatagtttcaaaagtccttgctgctctgagaagtgtagattctagtgaaaattacatagtcataagagaaatgtgtttttgtttttgtttttgtttcatttttttaaagttgtggtattattggttctatgctccctggaatattactgctttgtgaaagtccagactgaacgcagcaccctctgtgtacctagtacagttataaacctgggtctctcactacttgatatttttgcattagttaagacagaaatttgatagctcggttagaggggaggggaaatctgctgctagaaatgtctgaactaagtgccatactcgtctgggtaagatttgggaaacataacctctgtacataaaaaaaaaaaaatcagttaaacatcacatagtagacagccattaaattataaaaaaattaatttatgaagaaagaccttttgtacagattgaaaaaaaaagattttcatagagatatctatatgatcaagagagttaattttttatttttgttttactagtgccacagacttgccagtggtaacttatttgtccggttcaagataactctgtagttttctttcctaggacttgttgttaaacgccaaaagacatttttgaactgtacatttgatcagattgttagcttttctgttttatttcttttgagaacctttgaataaaaaacatctgaaattttaaaaaaacaaaaaaaaaacaaaaaaaaaaaaaaaanttgtnggggcggccagggcccctgagggaagagttttttaaaaacaattggtaggggcaccgcggacccctggaataggttagggtgacgacgtgtgggccacataccgtggttccacaagggaaaactcggggacaggaaacatagtgctgtgggtattctcttccaccgaaataataaacaatcgccggggcgacaaacgcgacgtgttctggaaccaaaatcggaaatgggaagcacgcgacaggcccattccaggggcactcttactcacagcggggaagctcataacgagagagccacaatatacaaataaaggccggcagcgtgagagag

SEQ ID NO: 458576 - DNA, 4625 bp, Homo sapiens
gttaaaaaccaaggacctgatatcttataattcagtttaagcctaatacagttcatgtaaactccttttttggcaatttaacatatacatggatcaagtttagtaggtttagaggaaaatgaatgtcttgttctgaaaaaatagcagtaccagctgagctttggggaggtgacagattgagtcacttcacagcttaattctgttatgaactggtcccatgggcatggattgtcaattagggagacttgaatcttttagatattaaatctacaggcagacaacaaagaacacattattcttttgtaaaaatagaggaacctggctgtctactacagaactagaggaacctagcttagacagaagctcatcccacttcagcacctacaacagatttgatacctttgagcaagattggatacttttctcaaagtaaatactgggttggtaccccagagttatgcaccactgaacatggattttaacttaaaatacttaagggcagatttttactgttagttttcttgactaacagagcaacccagtgcagttcctaaagacttctgattttgtgtagcaccagctcctgttgcattttctgaatgaattagtattaaaaatggagccccaagaagctggttaaatttttagccttctgcatttaagctgtagcccaggctgtgagctagtatcgcatcttattcattatccaacatagaaccaggtttacaacaggcactcaaaatgtttgtgggatgaatgaatgagaaactgccaattctggggatttctgtttcagaagagttgatgctaagctgttctttctaacaatggttcccaggttcagctgtttcagtccacaccttgttcacagtaagatattcaattcaattcagcaaacatttgttgtgtgcttgctgctctgtgcctgaccagaagaaatgaagccaagatacaaataatagaaccctgtcatgagcacagaaagacctgctgagtttctattgattgtggtaaaccagcctgcatccagttccaagtaacagctgcccacttagtgaatactctctcatgtttcaacactcagttctagtgtagcctcttctataaagcctttcttttccagatgcagctcaaaaagctgtgtctgccctgaaggccagtggggttcaagctcaaatggcaaagcaacaggaacaagatcctaccaacctctacatttctaatttgccactctccatggatgagcaagaactagaaaatatgctcaaaccatttggacaagttatttctacaaggatactacgtgattccagtggtacaagtcgtggtgttggctttgctaggatggaatcaacagaaaaatgtgaagctgttattggtcattttaatggaaaatttattaagacaccaccaggagtttctgcccccacagaacctttattgtgtaagtttgctgatggaggacagaaaaagagacagaacccaaacaaatacatccctaatggaagaccatggcatagagaaggagaggtgagacttgctggaatgacacttacttacgacccaactacagctgctatacagaacggattttatccttcaccatacagtattgctacaaaccgaatgatcactcaaacttctattacaccctatattgcatctcctgtatctgcctaccaggtgcaaagtccttcgtggatgcaacctcaaccatatattctacagcaccctggtgccgtgttaactccctcaatggagcacaccatgtcactacagcccgcatcaatgatcagccctctggcccagcagatgagtcatctgtcactaggcagcaccggaacatacatgcctgcaacgtcagctatgcaaggagcctacttgccacagtatgcacatatgcagacgacagcggttcctgttgaggaggcaagtggtcaacagcaggtggctgtcgagacgtctaatgaccattctccatatacctttcaacctaataagtaactgtgagatgtacagaaaggtgttcttacatgaagaagggtgtgaaggctgaacaatcatggatttttctgatcaattgtgctttaggaaattattgacagttttgcacaggttcttgaaaacgttatttataatgaaatcaactaaaactatttttgctataagttctataaggtgcataaaacccttaaattcatctagtagctgttcccccgaacaggtttattttagtaaaaaaaaaaaaccaaaaacaaaaacaaaagatttttatcaaatgttatgatgcaaaaaaagaaaaagaaaaaaaaaaagaaaagaaaacttcaattttctgggtatgcacaaagaccatgaagacttatccaagtgcatgaccggatttttgtggttttgttcattttgtgtttaatttgtgttttttttttccagctgtatgaaatgggctttctgaagtttaaatagtccgacttcacccatggtgttctgtgcttgcagtgcgagtgttgctgtaattcagtgttgccgtcagtgtctcttttcttagctttctgtctttctttcaacgtagtgtgaagtgtcttatccttttctatgaattccaatttgccttaactcttttgatgctgtagctgtttcagtaaaagttagttcaaactaatgatgtagaatgctttgaccaaatgagctggtctattatgccttgtaaaacagcagcatagggcttttaaaaggtagtcaataaaagttgctgaaattttggcttttttaaatatgtagtaggtgtttttaatgatttttcacataatgtgtaaggtagtgaaatgcaagaagggaaaaatgttttgtgtgaaacacattttctgactggggaacttttattagggtaaattgtttgtaaggctgtacgccaacagtttcctctgatagtttgactgatttaggatatctgctgtatgatgcaatgtaaagtcttttttgccttttttcaggaaaaaaaaaaaagctaacttgatgtactagatttagtgtaggtagtgttggggttggggatgggggtgggggaggggagtcactgaatgttttgtccttcctttatactaatgatagtgctttagaatgagaattatgcctgaaatctggcaaaccgaaaaatgttgctattgcaacaaagtggcaaaagctaaaagtaaggatttatcttcaaacataagctgagataacgaatagaagcaaaacgattggctactagctctctctctctctctctattaggtaaatttgaaaaataaaaatgacttggcacttttaaaggtaacttcaccaaagaccgaagagccagtaaccagtagctccaacttgtctcagcatcacatcttctgtgctctttatttttgccggaccagtttgcggttaggagaatgtgccttttttgtacctttgcatttaggttttataattttaattgatgtatggacacacacaaacaaaaaagcatgaaggaagatttggatccaagcagtgccacactttacatcatcactacaagtgttcaagtgtaaagaaaaccaattttgaaactatgaaattcctgattcataaatacacagttatttctactttagtacatataagataattcactgttattaaagctcttttattaaggcaattgcatatgttttaaaagcaatggtaaattaagttgtcttccaaaactgtgtacttgtctggtcagctgtgtatgatcagttatctacctcagagtctattttcttttgtgctgggacaggttgctggccctccctgtttccacagaccaaatcctcctagctcaggagctagggctaagcagttatttctttcaagtattttttagttcttaaattttatgcttgtatttgatgatagatgtcagtgacatttcatagtttcaaaagtccttgctgctctgagaagtgtagattctagtgaaaattacatagtcataagagaaatgtgtttttgtttttgtttttgtttcatttttttaaagttgtggtattattggttctatgctccctggaatattactgctttgtgaaagtccagactgaacgcagcaccctctgtgtacctagtacagttataaacctgggtctctcactacttgatatttttgcattagttaagacagaaatttgatagctcggttagaggggaggggaaatctgctgctagaaatgtctgaactaagtgccatactcgtctgggtaagatttgggaaacataacctctgtacataaaaaaaaaaaaatcagttaaacatcacatagtagacagccattaaattataaaaaaattaatttatgaagaaagaccttttgtacagattgaaaaaaaaagattttcatagagatatctatatgatcaagagagttaattttttatttttgttttactagtgccacagacttgccagtggtaacttatttgtccggttcaagataactctgtagttttctttcctaggacttgttgttaaacgccaaaagacatttttgaactgtacatttgatcagattgttagcttttctgttttatttcttttgagaacctttgaataaaaaacatctgaaatttta

SEQ ID NO: 458577 - DNA, 4037 bp, Homo sapiens
ggcacgaggggtggagcagcggcagcagcagcagccgccgccgccgccgccgctgccgccgccgccggaaagggagaggcaggagagcccgagacttggaaaccccaaagtgtccgcgaccctgcacggcagctcccttccagcttcatgggcaaagtgtggaaacagcagatgtaccctcagtacgccacctactattacccccagtatctgcaagccaagcagtctctggtcccagcccaccccatggcccctcccagtcccagcaccaccagcagtaataacaacagtagcagcagtagcaactcaggatgggatcagctcagcaaaacgaacctctatatccgaggactgcctccccacaccaccgaccaggacctggtgaagctctgtcaaccatatgggaaaatagtctccacaaaggcaattttggataagacaacgaacaaatgcaaaggttatggttttgtcgactttgacagccctgcagcagctcaaaaagctgtgtctgccctgaaggccagtggggttcaagctcaaatggcaaagcaacaggaacaagatcctaccaacctctacatttctaatttgccactctccatggatgagcaagaactagaaaatatgctcaaaccatttggacaagttatttctacaaggatactacgtgattccagtggtacaagtcgtggtgttggctttgctaggatggaatcaacagaaaaatgtgaagctgttattggtcattttaatggaaaatttattaagacaccaccaggagtttctgcccccacagaacctttattgtgtaagtttgctgatggaggacagaaaaagagacagaacccaaacaaatacatccctaatggaagaccatggcatagagaaggagaggtgagacttgctggaatgacacttacttacgacccaactacagctgctatacagaacggattttatccttcaccatacagtattgctacaaaccgaatgatcactcaaacttctattacaccctatattgcatctcctgtatctgcctaccaggtggcaaaggaaaccagagaaaacaagtatcggggctctgctatcaaggtgcaaagtccttcgtggatgcaacctcaaccatatattctacagcaccctggtgccgtgttaactccctcaatggagcacaccatgtcactacagcccgcatcaatgatcagccctctggcccagcagatgagtcatctgtcactaggcagcaccggaacatacatgcctgcaacgtcagctatgcaaggagcctacttgccacagtatgcacatatgcagacgacagcggttcctgttgaggaggcaagtggtcaacagcaggtggctgtcgagacgtctaatgaccattctccatatacctttcaacctaataagtaactgtgagatgtacagaaaggtgttcttacatgaagaagggtgtgaaggctgaacaatcatggatttttctgatcaattgtgctttaggaaattattgacagttttgcacaggttcttgaaaacgttatttataatgaaatcaactaaaactatttttgctataagttctataaggtgcataaaacccttaaattcatctagtagctgttcccccgaacaggtttattttagtaaaaaaaaaaaaccaaaaacaaaaacaaaagatttttatcaaatgttatgatgcaaaaaaagaaaaagaaaaaaaaaaagaaaagaaaacttcaattttctgggtatgcacaaagaccatgaagacttatccaagtgcatgaccggatttttgtggttttgttcattttgtgtttaatttgtgttttttttttccagctgtatgaaatgggctttctgaagtttaaatagtccgacttcacccatggtgttctgtgcttgcagtgcgagtgttgctgtaattcagtgttgccgtcagtgtctcttttcttagctttctgtctttctttcaacgtagtgtgaagtgtcttatccttttctatgaattccaatttgccttaactcttttgatgctgtagctgtttcagtaaaagttagttcaaactaatgatgtagaatgctttgaccaaatgagctggtctattatgccttgtaaaacagcagcatagggcttttaaaaggtagtcaataaaagttgctgaaattttggcttttttaaatatgtagtaggtgtttttaatgatttttcacataatgtgtaaggtagtgaaatgcaagaagggaaaaatgttttgtgtgaaacacattttctgactggggaacttttattagggtaaattgtttgtaaggctgtacgccaacagtttcctctgatagtttgactgatttaggatatctgctgtatgatgcaatgtaaagtcttttttgccttttttcaggaaaaaaaaaaaagctaacttgatgtactagatttagtgtaggtagtgttggggttggggatgggggtgggggaggggagtcactgaatgttttgtccttcctttatactaatgatagtgctttagaatgagaattatgcctgaaatctggcaaaccgaaaaatgttgctattgcaacaaagtggcaaaagctaaaagtaaggatttatcttcaaacataagctgagataacgaatagaagcaaaacgattggctactagctctctctctctctctctattaggtaaatttgaaaaataaaaatgacttggcacttttaaaggtaacttcaccaaagaccgaagagccagtaaccagtagctccaacttgtctcagcatcacatcttctgtgctctttatttttgccggaccagtttgcggttaggagaatgtgccttttttgtacctttgcatttaggttttataattttaattgatgtatggacacacacaaacaaaaaagcatgaaggaagatttggatccaagcagtgccacactttacatcatcactacaagtgttcaagtgtaaagaaaaccaattttgaaactatgaaattcctgattcataaatacacagttatttctactttagtacatataagataattcactgttattaaagctcttttattaaggcaattgcatatgttttaaaagcaatggtaaattaagttgtcttccaaaactgtgtacttgtctggtcagctgtgtatgatcagttatctacctcagagtctattttcttttgtgctgggacaggttgctggccctccctgtttccacagaccaaatcctcctagctcaggagctagggctaagcagttatttctttcaagtattttttagttcttaaattttatgcttgtatttgatgatagatgtcagtgacatttcatagtttcaaaagtccttgctgctctgagaagtgtagattctagtgaaaattacatagtcataagagaaatgtgtttttgtttttgtttttgtttcatttttttaaagttgtggtattattggttctatgctccctggaatattactgctttgtgaaagtccagactgaacgcagcaccctctgtgtacctagtacagttataaacctgggtctctcactacttgatatttttgcattagttaagacagaaatttgatagctcggttagaggggaggggaaatctgctgctagaaatgtctgaactaagtgccatactcgtctgggtaagatttgggaaacataacctctgtacataaaaaaaaaaaaatcagttaaacatcacatagtagacagccattaaattataaaaaaattaatttatgaagaaagaccttttgtacagattgaaaaaaaaagattttcatagagatatctatatgatcaagagagttaattttttatttttgttttactagtgccacagacttgccagtggtaacttatttgtccggttcaagataactctgtagttttctttcctaggacttgttgttaaacgccaaaagacatttttgaactgtacatttgatcagattgttagcttttctgttttatttcttttgagaacctttgaataaaaaacatctgaaatttta

SEQ ID NO: 458578 - DNA, 3445 bp, Homo sapiens
tggtcgactctagacatccccctaccaacctctacatttctaatttgccactctccatggatgagcaagaactagaaaatatgctcaaaccatttggacaagttatttctacaaggatactacgtgattccagtggtacaagtcgtggtgttggctttgctaggatggaatcaacagaaaaatgtgaagctgttattggtcattttaatggaaaatttattaagacaccaccaggagtttctgcccccacagaacctttattgtgtaagtttgctgatggaggacagaaaaagagacagaacccaaacaaatacatccctaatggaagaccatggcatagagaaggagaggtgagacttgctggaatgacacttacttacgacccaactacagctgctatacagaacggattttatccttcaccatacagtattgctacaaaccgaatgatcactcaaacttctattacaccctatattgcatctcctgtatctgcctaccaggtgcaaagtccttcgtggatgcaacctcaaccatatattctacagcaccctggtgccgtgttaactccctcaatggagcacaccatgtcactacagcccgcatcaatgatcagccctctggcccagcagatgagtcatctgtcactaggcagcaccggaacatacatgcctgcaacgtcagctatgcaaggagcctacttgccacagtatgcacatatgcagacgacagcggttcctgttgaggaggcaagtggtcaacagcaggtggctgtcgagacgtctaatgaccattctccatatacctttcaacctaataagtaactgtgagatgtacagaaaggtgttcttacatgaagaagggtgtgaaggctgaacaatcatggatttttctgatcaattgtgctttaggaaattattgacagttttgcacaggttcttgaaaacgttatttataatgaaatcaactaaaactatttttgctataagttctataaggtgcataaaacccttaaattcatctagtagctgttcccccgaacaggtttattttagtaaaaaaaaaaaaccaaaaacaaaaacaaaagatttttatcaaatgttatgatgcaaaaaaagaaaaagaaaaaaaaaaagaaaagaaaacttcaattttctgggtatgcacaaagaccatgaagacttatccaagtgcatgaccggatttttgtggttttgttcattttgtgtttaatttgtgttttttttttccagctgtatgaaatgggctttctgaagtttaaatagtccgacttcacccatggtgttctgtgcttgcagtgcgagtgttgctgtaattcagtgttgccgtcagtgtctcttttcttagctttctgtctttctttcaacgtagtgtgaagtgtcttatccttttctatgaattccaatttgccttaactcttttgatgctgtagctgtttcagtaaaagttagttcaaactaatgatgtagaatgctttgaccaaatgagctggtctattatgccttgtaaaacagcagcatagggcttttaaaaggtagtcaataaaagttgctgaaattttggcttttttaaatatgtagtaggtgtttttaatgatttttcacataatgtgtaaggtagtgaaatgcaagaagggaaaaatgttttgtgtgaaacacattttctgactggggaacttttattagggtaaattgtttgtaaggctgtacgccaacagtttcctctgatagtttgactgatttaggatatctgctgtatgatgcaatgtaaagtcttttttgccttttttcaggaaaaaaaaaaaagctaacttgatgtactagatttagtgtaggtagtgttggggttggggatgggggtgggggaggggagtcactgaatgttttgtccttcctttatactaatgatagtgctttagaatgagaattatgcctgaaatctggcaaaccgaaaaatgttgctattgcaacaaagtggcaaaagctaaaagtaaggatttatcttcaaacataagctgagataacgaatagaagcaaaacgattggctactagctctctctctctctctctattaggtaaatttgaaaaataaaaatgacttggcacttttaaaggtaacttcaccaaagaccgaagagccagtaaccagtagctccaacttgtctcagcatcacatcttctgtgctctttatttttgccggaccagtttgcggttaggagaatgtgccttttttgtacctttgcatttaggttttataattttaattgatgtatggacacacacaaacaaaaaagcatgaaggaagatttggatccaagcagtgccacactttacatcatcactacaagtgttcaagtgtaaagaaaaccaattttgaaactatgaaattcctgattcataaatacacagttatttctactttagtacatataagataattcactgttattaaagctcttttattaaggcaattgcatatgttttaaaagcaatggtaaattaagttgtcttccaaaactgtgtacttgtctggtcagctgtgtatgatcagttatctacctcagagtctattttcttttgtgctgggacaggttgctggccctccctgtttccacagaccaaatcctcctagctcaggagctagggctaagcagttatttctttcaagtattttttagttcttaaattttatgcttgtatttgatgatagatgtcagtgacatttcatagtttcaaaagtccttgctgctctgagaagtgtagattctagtgaaaattacatagtcataagagaaatgtgtttttgtttttgtttttgtttcatttttttaaagttgtggtattattggttctatgctccctggaatattactgctttgtgaaagtccagactgaacgcagcaccctctgtgtacctagtacagttataaacctgggtctctcactacttgatatttttgcattagttaagacagaaatttgatagctcggttagaggggaggggaaatctgctgctagaaatgtctgaactaagtgccatactcgtctgggtaagatttgggaaacataacctctgtacataaaaaaaaaaaaatcagttaaacatcacatagtagacagccattaaattataaaaaaattaatttatgaagaaagaccttttgtacagattgaaaaaaaaagattttcatagagatatctatatgatcaagagagttaattttttatttttgttttactagtgccacagacttgccagtggtaacttatttgtccggttcaagataactctgtagttttctttcctaggacttgttgttaaacgccaaaagacatttttgaactgtacatttgatcagattgttagcttttctgttttatttcttttgagaacctttgaataaaaaacatctgaaatttta

SEQ ID NO: 458579 - DNA, 3375 bp, Homo sapiens
atgatgctctccaccattagtccaactgtcttgctagcaagatactacctgattcccgtggtacaacgttctggcttggaaaggctttgctaggatggaatcaacagaaaaatgtgaagctgttattggtcattttaatggaaaatttattaagacaccaccaggagtttctgcccccacagaacctttattgtgtaagtttgctgatggaggacagaaaaagagacagaacccaaacaaatacatccctaatggaagaccatggcatagagaaggagaggtgagacttgctggaatgacacttacttacgacccaactacagctgctatacagaacggattttatccttcaccatacagtattgctacaaaccgaatgatcactcaaacttctattacaccctatattgcatctcctgtatctgcctaccaggtgcaaagtccttcgtggatgcaacctcaaccatatattctacagcaccctggtgccgtgttaactccctcaatggagcacaccatgtcactacagcccgcatcaatgatcagccctctggcccagcagatgagtcatctgtcactaggcagcaccggaacatacatgcctgcaacgtcagctatgcaaggagcctacttgccacagtatgcacatatgcagacgacagcggttcctgttgaggaggcaagtggtcaacagcaggtggctgtcgagacgtctaatgaccattctccatatacctttcaacctaataagtaactgtgagatgtacagaaaggtgttcttacatgaagaagggtgtgaaggctgaacaatcatggatttttctgatcaattgtgctttaggaaattattgacagttttgcacaggttcttgaaaacgttatttataatgaaatcaactaaaactatttttgctataagttctataaggtgcataaaacccttaaattcatctagtagctgttcccccgaacaggtttattttagtaaaaaaaaaaaaccaaaaacaaaaacaaaagatttttatcaaatgttatgatgcaaaaaaagaaaaagaaaaaaaaaaagaaaagaaaacttcaattttctgggtatgcacaaagaccatgaagacttatccaagtgcatgaccggatttttgtggttttgttcattttgtgtttaatttgtgttttttttttccagctgtatgaaatgggctttctgaagtttaaatagtccgacttcacccatggtgttctgtgcttgcagtgcgagtgttgctgtaattcagtgttgccgtcagtgtctcttttcttagctttctgtctttctttcaacgtagtgtgaagtgtcttatccttttctatgaattccaatttgccttaactcttttgatgctgtagctgtttcagtaaaagttagttcaaactaatgatgtagaatgctttgaccaaatgagctggtctattatgccttgtaaaacagcagcatagggcttttaaaaggtagtcaataaaagttgctgaaattttggcttttttaaatatgtagtaggtgtttttaatgatttttcacataatgtgtaaggtagtgaaatgcaagaagggaaaaatgttttgtgtgaaacacattttctgactggggaacttttattagggtaaattgtttgtaaggctgtacgccaacagtttcctctgatagtttgactgatttaggatatctgctgtatgatgcaatgtaaagtcttttttgccttttttcaggaaaaaaaaaaaagctaacttgatgtactagatttagtgtaggtagtgttggggttggggatgggggtgggggaggggagtcactgaatgttttgtccttcctttatactaatgatagtgctttagaatgagaattatgcctgaaatctggcaaaccgaaaaatgttgctattgcaacaaagtggcaaaagctaaaagtaaggatttatcttcaaacataagctgagataacgaatagaagcaaaacgattggctactagctctctctctctctctctattaggtaaatttgaaaaataaaaatgacttggcacttttaaaggtaacttcaccaaagaccgaagagccagtaaccagtagctccaacttgtctcagcatcacatcttctgtgctctttatttttgccggaccagtttgcggttaggagaatgtgccttttttgtacctttgcatttaggttttataattttaattgatgtatggacacacacaaacaaaaaagcatgaaggaagatttggatccaagcagtgccacactttacatcatcactacaagtgttcaagtgtaaagaaaaccaattttgaaactatgaaattcctgattcataaatacacagttatttctactttagtacatataagataattcactgttattaaagctcttttattaaggcaattgcatatgttttaaaagcaatggtaaattaagttgtcttccaaaactgtgtacttgtctggtcagctgtgtatgatcagttatctacctcagagtctattttcttttgtgctgggacaggttgctggccctccctgtttccacagaccaaatcctcctagctcaggagctagggctaagcagttatttctttcaagtattttttagttcttaaattttatgcttgtatttgatgatagatgtcagtgacatttcatagtttcaaaagtccttgctgctctgagaagtgtagattctagtgaaaattacatagtcataagagaaatgtgtttttgtttttgtttttgtttcatttttttaaagttgtggtattattggttctatgctccctggaatattactgctttgtgaaagtccagactgaacgcagcaccctctgtgtacctagtacagttataaacctgggtctctcactacttgatatttttgcattagttaagacagaaatttgatagctcggttagaggggaggggaaatctgctgctagaaatgtctgaactaagtgccatactcgtctgggtaagatttgggaaacataacctctgtacataaaaaaaaaaaaatcagttaaacatcacatagtagacagccattaaattataaaaaaattaatttatgaagaaagaccttttgtacagattgaaaaaaaaagattttcatagagatatctatatgatcaagagagttaattttttatttttgttttactagtgccacagacttgccagtggtaacttatttgtccggttcaagataactctgtagttttctttcctaggacttgttgttaaacgccaaaagacatttttgaactgtacatttgatcagattgttagcttttctgttttatttcttttgagaacctttgaataaaaaacatctgaaatttta

SEQ ID NO: 458580 - DNA, 3112 bp, Homo sapiens
agtgaccagtttgccaagaattctaactgccttaatctttttaatcattgatagtattgtttccttgttttctttctgtagatttttaacatgattaaaaagagttctaaagaaataggtaagctttacaatgaaaatcaatatttctttcaaaatcctcccttttctaggtgcaaagtccttcgtggatgcaacctcaaccatatattctacagcaccctggtgccgtgttaactccctcaatggagcacaccatgtcactacagcccgcatcaatgatcagccctctggcccagcagatgagtcatctgtcactaggcagcaccggaacatacatgcctgcaacgtcagctatgcaaggagcctacttgccacagtatgcacatatgcagacgacagcggttcctgttgaggaggcaagtggtcaacagcaggtggctgtcgagacgtctaatgaccattctccatatacctttcaacctaataagtaactgtgagatgtacagaaaggtgttcttacatgaagaagggtgtgaaggctgaacaatcatggatttttctgatcaattgtgctttaggaaattattgacagttttgcacaggttcttgaaaacgttatttataatgaaatcaactaaaactatttttgctataagttctataaggtgcataaaacccttaaattcatctagtagctgttcccccgaacaggtttattttagtaaaaaaaaaaaaccaaaaacaaaaacaaaagatttttatcaaatgttatgatgcaaaaaaagaaaaagaaaaaaaaaaagaaaagaaaacttcaattttctgggtatgcacaaagaccatgaagacttatccaagtgcatgaccggatttttgtggttttgttcattttgtgtttaatttgtgttttttttttccagctgtatgaaatgggctttctgaagtttaaatagtccgacttcacccatggtgttctgtgcttgcagtgcgagtgttgctgtaattcagtgttgccgtcagtgtctcttttcttagctttctgtctttctttcaacgtagtgtgaagtgtcttatccttttctatgaattccaatttgccttaactcttttgatgctgtagctgtttcagtaaaagttagttcaaactaatgatgtagaatgctttgaccaaatgagctggtctattatgccttgtaaaacagcagcatagggcttttaaaaggtagtcaataaaagttgctgaaattttggcttttttaaatatgtagtaggtgtttttaatgatttttcacataatgtgtaaggtagtgaaatgcaagaagggaaaaatgttttgtgtgaaacacattttctgactggggaacttttattagggtaaattgtttgtaaggctgtacgccaacagtttcctctgatagtttgactgatttaggatatctgctgtatgatgcaatgtaaagtcttttttgccttttttcaggaaaaaaaaaaaagctaacttgatgtactagatttagtgtaggtagtgttggggttggggatgggggtgggggaggggagtcactgaatgttttgtccttcctttatactaatgatagtgctttagaatgagaattatgcctgaaatctggcaaaccgaaaaatgttgctattgcaacaaagtggcaaaagctaaaagtaaggatttatcttcaaacataagctgagataacgaatagaagcaaaacgattggctactagctctctctctctctctctattaggtaaatttgaaaaataaaaatgacttggcacttttaaaggtaacttcaccaaagaccgaagagccagtaaccagtagctccaacttgtctcagcatcacatcttctgtgctctttatttttgccggaccagtttgcggttaggagaatgtgccttttttgtacctttgcatttaggttttataattttaattgatgtatggacacacacaaacaaaaaagcatgaaggaagatttggatccaagcagtgccacactttacatcatcactacaagtgttcaagtgtaaagaaaaccaattttgaaactatgaaattcctgattcataaatacacagttatttctactttagtacatataagataattcactgttattaaagctcttttattaaggcaattgcatatgttttaaaagcaatggtaaattaagttgtcttccaaaactgtgtacttgtctggtcagctgtgtatgatcagttatctacctcagagtctattttcttttgtgctgggacaggttgctggccctccctgtttccacagaccaaatcctcctagctcaggagctagggctaagcagttatttctttcaagtattttttagttcttaaattttatgcttgtatttgatgatagatgtcagtgacatttcatagtttcaaaagtccttgctgctctgagaagtgtagattctagtgaaaattacatagtcataagagaaatgtgtttttgtttttgtttttgtttcatttttttaaagttgtggtattattggttctatgctccctggaatattactgctttgtgaaagtccagactgaacgcagcaccctctgtgtacctagtacagttataaacctgggtctctcactacttgatatttttgcattagttaagacagaaatttgatagctcggttagaggggaggggaaatctgctgctagaaatgtctgaactaagtgccatactcgtctgggtaagatttgggaaacataacctctgtacataaaaaaaaaaaaatcagttaaacatcacatagtagacagccattaaattataaaaaaattaatttatgaagaaagaccttttgtacagattgaaaaaaaaagattttcatagagatatctatatgatcaagagagttaattttttatttttgttttactagtgccacagacttgccagtggtaacttatttgtccggttcaagataactctgtagttttctttcctaggacttgttgttaaacgccaaaagacatttttgaactgtacatttgatcagattgttagcttttctgttttatttcttttgagaacctttgaataaaaaacatctgaaatttta

SEQ ID NO: 458581 - DNA, 3129 bp, Homo sapiens
attgttgtgaagtgaatgccaagatatcatttcccctaacgctcttaaaaaactctcaggaagagcaatttagaagatttttaggaaactgtttatgatgccatttgcaagattgaggaaggttgtttttgcttcacattcttaaacaaactaaggtatttcctttgtaaaaagtaattacaggatcttaactcttgcctcagtttgtctaattttgctcctgtctccaactccccagggtgccgtgttaactccctcaatggagcacaccatgtcactacagcccgcatcaatgatcagccctctggcccagcagatgagtcatctgtcactaggcagcaccggaacatacatgcctgcaacgtcagctatgcaaggagcctacttgccacagtatgcacatatgcagacgacagcggttcctgttgaggaggcaagtggtcaacagcaggtggctgtcgagacgtctaatgaccattctccatatacctttcaacctaataagtaactgtgagatgtacagaaaggtgttcttacatgaagaagggtgtgaaggctgaacaatcatggatttttctgatcaattgtgctttaggaaattattgacagttttgcacaggttcttgaaaacgttatttataatgaaatcaactaaaactatttttgctataagttctataaggtgcataaaacccttaaattcatctagtagctgttcccccgaacaggtttattttagtaaaaaaaaaaaaccaaaaacaaaaacaaaagatttttatcaaatgttatgatgcaaaaaaagaaaaagaaaaaaaaaaagaaaagaaaacttcaattttctgggtatgcacaaagaccatgaagacttatccaagtgcatgaccggatttttgtggttttgttcattttgtgtttaatttgtgttttttttttccagctgtatgaaatgggctttctgaagtttaaatagtccgacttcacccatggtgttctgtgcttgcagtgcgagtgttgctgtaattcagtgttgccgtcagtgtctcttttcttagctttctgtctttctttcaacgtagtgtgaagtgtcttatccttttctatgaattccaatttgccttaactcttttgatgctgtagctgtttcagtaaaagttagttcaaactaatgatgtagaatgctttgaccaaatgagctggtctattatgccttgtaaaacagcagcatagggcttttaaaaggtagtcaataaaagttgctgaaattttggcttttttaaatatgtagtaggtgtttttaatgatttttcacataatgtgtaaggtagtgaaatgcaagaagggaaaaatgttttgtgtgaaacacattttctgactggggaacttttattagggtaaattgtttgtaaggctgtacgccaacagtttcctctgatagtttgactgatttaggatatctgctgtatgatgcaatgtaaagtcttttttgccttttttcaggaaaaaaaaaaaagctaacttgatgtactagatttagtgtaggtagtgttggggttggggatgggggtgggggaggggagtcactgaatgttttgtccttcctttatactaatgatagtgctttagaatgagaattatgcctgaaatctggcaaaccgaaaaatgttgctattgcaacaaagtggcaaaagctaaaagtaaggatttatcttcaaacataagctgagataacgaatagaagcaaaacgattggctactagctctctctctctctctctattaggtaaatttgaaaaataaaaatgacttggcacttttaaaggtaacttcaccaaagaccgaagagccagtaaccagtagctccaacttgtctcagcatcacatcttctgtgctctttatttttgccggaccagtttgcggttaggagaatgtgccttttttgtacctttgcatttaggttttataattttaattgatgtatggacacacacaaacaaaaaagcatgaaggaagatttggatccaagcagtgccacactttacatcatcactacaagtgttcaagtgtaaagaaaaccaattttgaaactatgaaattcctgattcataaatacacagttatttctactttagtacatataagataattcactgttattaaagctcttttattaaggcaattgcatatgttttaaaagcaatggtaaattaagttgtcttccaaaactgtgtacttgtctggtcagctgtgtatgatcagttatctacctcagagtctattttcttttgtgctgggacaggttgctggccctccctgtttccacagaccaaatcctcctagctcaggagctagggctaagcagttatttctttcaagtattttttagttcttaaattttatgcttgtatttgatgatagatgtcagtgacatttcatagtttcaaaagtccttgctgctctgagaagtgtagattctagtgaaaattacatagtcataagagaaatgtgtttttgtttttgtttttgtttcatttttttaaagttgtggtattattggttctatgctccctggaatattactgctttgtgaaagtccagactgaacgcagcaccctctgtgtacctagtacagttataaacctgggtctctcactacttgatatttttgcattagttaagacagaaatttgatagctcggttagaggggaggggaaatctgctgctagaaatgtctgaactaagtgccatactcgtctgggtaagatttgggaaacataacctctgtacataaaaaaaaaaaaatcagttaaacatcacatagtagacagccattaaattataaaaaaattaatttatgaagaaagaccttttgtacagattgaaaaaaaaagattttcatagagatatctatatgatcaagagagttaattttttatttttgttttactagtgccacagacttgccagtggtaacttatttgtccggttcaagataactctgtagttttctttcctaggacttgttgttaaacgccaaaagacatttttgaactgtacatttgatcagattgttagcttttctgttttatttcttttgagaacctttgaataaaaaacatctgaaatttta

SEQ ID NO: 458582 - DNA, 3763 bp, Homo sapiens
gaaagtctattctctgggtatctctcctttacgagaatatagcacccacacgtgaccacatctagccttttatgactagtgtcatctatataactagtaccactgtccctgtggcagtgtcatgaagcgaaagacgaaggtaatacaagatggtaaaagcagggaattatttctcgcttatttcttcttttatggagtttgggagtattgaatcatggtcttaatattgaaatatttcaccaaagtccaggggactcctttgggtaatgaggttgagctggcaccagatcagcttccagatttgatgcttagcattttgctggtaagatggctaaaggattttaatttagcctctattctatagtggcttaaaagaacaaagggtggtgcgttttccccttatacactcaaaacctacagctgtttcttgtgaaggctaagccagggccacacatatccaatgagactgactagaaatttctcctgcctttgggaaaggatgactgtcagtgtcagaaaagccaggctctgctgcctaatctgcagtgacctgttagaggtctaataagtcttacccctgtgggctctacctgtagaaacaatactaggtactagtttagggggctgctagaaaataatgaggtcctttgaggagagatcttctaaaatcacacattagtgatactgaattattgagagtgacaaacttttttatcttcacccataataaactttttttatcttcactttgttagcaaatccaaagaaatgtggaatttttagtttagcagattcaaaaagtagaaaacagtttaccttccatatgacatatttatatgcactatttaagctttgaggtgtagcccatttaaatttcttctttgagatttccaaatacattatatccatctcacaatccccccacgtactccaaattttgcatggtttaccattgcccattctgacctcattcttctttctagtacatgcctgcaacgtcagctatgcaaggagcctacttgccacagtatgcacatatgcagacgacagcggttcctgttgaggaggcaagtggtcaacagcaggtggctgtcgagacgtctaatgaccattctccatatacctttcaacctaataagtaactgtgagatgtacagaaaggtgttcttacatgaagaagggtgtgaaggctgaacaatcatggatttttctgatcaattgtgctttaggaaattattgacagttttgcacaggttcttgaaaacgttatttataatgaaatcaactaaaactatttttgctataagttctataaggtgcataaaacccttaaattcatctagtagctgttcccccgaacaggtttattttagtaaaaaaaaaaaaccaaaaacaaaaacaaaagatttttatcaaatgttatgatgcaaaaaaagaaaaagaaaaaaaaaaagaaaagaaaacttcaattttctgggtatgcacaaagaccatgaagacttatccaagtgcatgaccggatttttgtggttttgttcattttgtgtttaatttgtgttttttttttccagctgtatgaaatgggctttctgaagtttaaatagtccgacttcacccatggtgttctgtgcttgcagtgcgagtgttgctgtaattcagtgttgccgtcagtgtctcttttcttagctttctgtctttctttcaacgtagtgtgaagtgtcttatccttttctatgaattccaatttgccttaactcttttgatgctgtagctgtttcagtaaaagttagttcaaactaatgatgtagaatgctttgaccaaatgagctggtctattatgccttgtaaaacagcagcatagggcttttaaaaggtagtcaataaaagttgctgaaattttggcttttttaaatatgtagtaggtgtttttaatgatttttcacataatgtgtaaggtagtgaaatgcaagaagggaaaaatgttttgtgtgaaacacattttctgactggggaacttttattagggtaaattgtttgtaaggctgtacgccaacagtttcctctgatagtttgactgatttaggatatctgctgtatgatgcaatgtaaagtcttttttgccttttttcaggaaaaaaaaaaaagctaacttgatgtactagatttagtgtaggtagtgttggggttggggatgggggtgggggaggggagtcactgaatgttttgtccttcctttatactaatgatagtgctttagaatgagaattatgcctgaaatctggcaaaccgaaaaatgttgctattgcaacaaagtggcaaaagctaaaagtaaggatttatcttcaaacataagctgagataacgaatagaagcaaaacgattggctactagctctctctctctctctctattaggtaaatttgaaaaataaaaatgacttggcacttttaaaggtaacttcaccaaagaccgaagagccagtaaccagtagctccaacttgtctcagcatcacatcttctgtgctctttatttttgccggaccagtttgcggttaggagaatgtgccttttttgtacctttgcatttaggttttataattttaattgatgtatggacacacacaaacaaaaaagcatgaaggaagatttggatccaagcagtgccacactttacatcatcactacaagtgttcaagtgtaaagaaaaccaattttgaaactatgaaattcctgattcataaatacacagttatttctactttagtacatataagataattcactgttattaaagctcttttattaaggcaattgcatatgttttaaaagcaatggtaaattaagttgtcttccaaaactgtgtacttgtctggtcagctgtgtatgatcagttatctacctcagagtctattttcttttgtgctgggacaggttgctggccctccctgtttccacagaccaaatcctcctagctcaggagctagggctaagcagttatttctttcaagtattttttagttcttaaattttatgcttgtatttgatgatagatgtcagtgacatttcatagtttcaaaagtccttgctgctctgagaagtgtagattctagtgaaaattacatagtcataagagaaatgtgtttttgtttttgtttttgtttcatttttttaaagttgtggtattattggttctatgctccctggaatattactgctttgtgaaagtccagactgaacgcagcaccctctgtgtacctagtacagttataaacctgggtctctcactacttgatatttttgcattagttaagacagaaatttgatagctcggttagaggggaggggaaatctgctgctagaaatgtctgaactaagtgccatactcgtctgggtaagatttgggaaacataacctctgtacataaaaaaaaaaaaatcagttaaacatcacatagtagacagccattaaattataaaaaaattaatttatgaagaaagaccttttgtacagattgaaaaaaaaagattttcatagagatatctatatgatcaagagagttaattttttatttttgttttactagtgccacagacttgccagtggtaacttatttgtccggttcaagataactctgtagttttctttcctaggacttgttgttaaacgccaaaagacatttttgaactgtacatttgatcagattgttagcttttctgttttatttcttttgagaacctttgaataaaaaacatctgaaatttta

SEQ ID NO: 458583 - DNA, 2832 bp, Homo sapiens
ctctacatgacgtgaagaaatttactttaaagagtaactgtttttaaggcactgttggattcagtcaggcctaagtagcagagctgaggttttttcactaacatgtctcatccattctgctttgtttgttgaggaggcaagtggtcaacagcaggtggctgtcgagacgtctaatgaccattctccatatacctttcaacctaataagtaactgtgagatgtacagaaaggtgttcttacatgaagaagggtgtgaaggctgaacaatcatggatttttctgatcaattgtgctttaggaaattattgacagttttgcacaggttcttgaaaacgttatttataatgaaatcaactaaaactatttttgctataagttctataaggtgcataaaacccttaaattcatctagtagctgttcccccgaacaggtttattttagtaaaaaaaaaaaaccaaaaacaaaaacaaaagatttttatcaaatgttatgatgcaaaaaaagaaaaagaaaaaaaaaaagaaaagaaaacttcaattttctgggtatgcacaaagaccatgaagacttatccaagtgcatgaccggatttttgtggttttgttcattttgtgtttaatttgtgttttttttttccagctgtatgaaatgggctttctgaagtttaaatagtccgacttcacccatggtgttctgtgcttgcagtgcgagtgttgctgtaattcagtgttgccgtcagtgtctcttttcttagctttctgtctttctttcaacgtagtgtgaagtgtcttatccttttctatgaattccaatttgccttaactcttttgatgctgtagctgtttcagtaaaagttagttcaaactaatgatgtagaatgctttgaccaaatgagctggtctattatgccttgtaaaacagcagcatagggcttttaaaaggtagtcaataaaagttgctgaaattttggcttttttaaatatgtagtaggtgtttttaatgatttttcacataatgtgtaaggtagtgaaatgcaagaagggaaaaatgttttgtgtgaaacacattttctgactggggaacttttattagggtaaattgtttgtaaggctgtacgccaacagtttcctctgatagtttgactgatttaggatatctgctgtatgatgcaatgtaaagtcttttttgccttttttcaggaaaaaaaaaaaagctaacttgatgtactagatttagtgtaggtagtgttggggttggggatgggggtgggggaggggagtcactgaatgttttgtccttcctttatactaatgatagtgctttagaatgagaattatgcctgaaatctggcaaaccgaaaaatgttgctattgcaacaaagtggcaaaagctaaaagtaaggatttatcttcaaacataagctgagataacgaatagaagcaaaacgattggctactagctctctctctctctctctattaggtaaatttgaaaaataaaaatgacttggcacttttaaaggtaacttcaccaaagaccgaagagccagtaaccagtagctccaacttgtctcagcatcacatcttctgtgctctttatttttgccggaccagtttgcggttaggagaatgtgccttttttgtacctttgcatttaggttttataattttaattgatgtatggacacacacaaacaaaaaagcatgaaggaagatttggatccaagcagtgccacactttacatcatcactacaagtgttcaagtgtaaagaaaaccaattttgaaactatgaaattcctgattcataaatacacagttatttctactttagtacatataagataattcactgttattaaagctcttttattaaggcaattgcatatgttttaaaagcaatggtaaattaagttgtcttccaaaactgtgtacttgtctggtcagctgtgtatgatcagttatctacctcagagtctattttcttttgtgctgggacaggttgctggccctccctgtttccacagaccaaatcctcctagctcaggagctagggctaagcagttatttctttcaagtattttttagttcttaaattttatgcttgtatttgatgatagatgtcagtgacatttcatagtttcaaaagtccttgctgctctgagaagtgtagattctagtgaaaattacatagtcataagagaaatgtgtttttgtttttgtttttgtttcatttttttaaagttgtggtattattggttctatgctccctggaatattactgctttgtgaaagtccagactgaacgcagcaccctctgtgtacctagtacagttataaacctgggtctctcactacttgatatttttgcattagttaagacagaaatttgatagctcggttagaggggaggggaaatctgctgctagaaatgtctgaactaagtgccatactcgtctgggtaagatttgggaaacataacctctgtacataaaaaaaaaaaaatcagttaaacatcacatagtagacagccattaaattataaaaaaattaatttatgaagaaagaccttttgtacagattgaaaaaaaaagattttcatagagatatctatatgatcaagagagttaattttttatttttgttttactagtgccacagacttgccagtggtaacttatttgtccggttcaagataactctgtagttttctttcctaggacttgttgttaaacgccaaaagacatttttgaactgtacatttgatcagattgttagcttttctgttttatttcttttgagaacctttgaataaaaaacatctgaaatttta

SEQ ID NO: 458584 - DNA, 3148 bp, Homo sapiens
  misc_feature (27)..(27): n is a, c, g, or t
ttacagaattgcgagctccggtacccngttcaattgtctacaccaacgtttagcaacatcttgattatgaatttagataaatgtcaatatccttagattgaaagattatattcccaactctcacttgaaccacaaatttcaaaacttttcactttaccatgcagactgtaataaaatagctgtgtagaacttagaataccctggtttctgcattgccctggtgatatagaataccttggtttctggattgccctggtgataacatgtatttttgatttcataaagtcactctttagagacccaaatgaatttggctctaaattagaaaagaaagtattttgcaagtcctggatgtgacaggcattgaaagtaaccatcagttccagagtctgcatttatcagtctaccatcagtgatgagcataacctttttcaaacacatatctctttaaaacaagaaacagattacaaagctctgtagtgtttccacacccaaatctaccaaaagcatttgtcttttatttttctcttccagatgtacagaaaggtgttcttacatgaagaagggtgtgaaggctgaacaatcatggatttttctgatcaattgtgctttaggaaattattgacagttttgcacaggttcttgaaaacgttatttataatgaaatcaactaaaactatttttgctataagttctataaggtgcataaaacccttaaattcatctagtagctgttcccccgaacaggtttattttagtaaaaaaaaaaaaccaaaaacaaaaacaaaagatttttatcaaatgttatgatgcaaaaaaagaaaaagaaaaaaaaaaagaaaagaaaacttcaattttctgggtatgcacaaagaccatgaagacttatccaagtgcatgaccggatttttgtggttttgttcattttgtgtttaatttgtgttttttttttccagctgtatgaaatgggctttctgaagtttaaatagtccgacttcacccatggtgttctgtgcttgcagtgcgagtgttgctgtaattcagtgttgccgtcagtgtctcttttcttagctttctgtctttctttcaacgtagtgtgaagtgtcttatccttttctatgaattccaatttgccttaactcttttgatgctgtagctgtttcagtaaaagttagttcaaactaatgatgtagaatgctttgaccaaatgagctggtctattatgccttgtaaaacagcagcatagggcttttaaaaggtagtcaataaaagttgctgaaattttggcttttttaaatatgtagtaggtgtttttaatgatttttcacataatgtgtaaggtagtgaaatgcaagaagggaaaaatgttttgtgtgaaacacattttctgactggggaacttttattagggtaaattgtttgtaaggctgtacgccaacagtttcctctgatagtttgactgatttaggatatctgctgtatgatgcaatgtaaagtcttttttgccttttttcaggaaaaaaaaaaaagctaacttgatgtactagatttagtgtaggtagtgttggggttggggatgggggtgggggaggggagtcactgaatgttttgtccttcctttatactaatgatagtgctttagaatgagaattatgcctgaaatctggcaaaccgaaaaatgttgctattgcaacaaagtggcaaaagctaaaagtaaggatttatcttcaaacataagctgagataacgaatagaagcaaaacgattggctactagctctctctctctctctctattaggtaaatttgaaaaataaaaatgacttggcacttttaaaggtaacttcaccaaagaccgaagagccagtaaccagtagctccaacttgtctcagcatcacatcttctgtgctctttatttttgccggaccagtttgcggttaggagaatgtgccttttttgtacctttgcatttaggttttataattttaattgatgtatggacacacacaaacaaaaaagcatgaaggaagatttggatccaagcagtgccacactttacatcatcactacaagtgttcaagtgtaaagaaaaccaattttgaaactatgaaattcctgattcataaatacacagttatttctactttagtacatataagataattcactgttattaaagctcttttattaaggcaattgcatatgttttaaaagcaatggtaaattaagttgtcttccaaaactgtgtacttgtctggtcagctgtgtatgatcagttatctacctcagagtctattttcttttgtgctgggacaggttgctggccctccctgtttccacagaccaaatcctcctagctcaggagctagggctaagcagttatttctttcaagtattttttagttcttaaattttatgcttgtatttgatgatagatgtcagtgacatttcatagtttcaaaagtccttgctgctctgagaagtgtagattctagtgaaaattacatagtcataagagaaatgtgtttttgtttttgtttttgtttcatttttttaaagttgtggtattattggttctatgctccctggaatattactgctttgtgaaagtccagactgaacgcagcaccctctgtgtacctagtacagttataaacctgggtctctcactacttgatatttttgcattagttaagacagaaatttgatagctcggttagaggggaggggaaatctgctgctagaaatgtctgaactaagtgccatactcgtctgggtaagatttgggaaacataacctctgtacataaaaaaaaaaaaatcagttaaacatcacatagtagacagccattaaattataaaaaaattaatttatgaagaaagaccttttgtacagattgaaaaaaaaagattttcatagagatatctatatgatcaagagagttaattttttatttttgttttactagtgccacagacttgccagtggtaacttatttgtccggttcaagataactctgtagttttctttcctaggacttgttgttaaacgccaaaagacatttttgaactgtacatttgatcagattgttagcttttctgttttatttcttttgagaacctttgaataaaaaacatctgaaatttta

SEQ ID NO: 458585 - DNA, 2603 bp, Homo sapiens
tctagagtatacactcccggcaagcccaggctgaacaatcatggatttttctgatcaattgtgctttaggaaattattgacagttttgcacaggttcttgaaaacgttatttataatgaaatcaactaaaactatttttgctataagttctataaggtgcataaaacccttaaattcatctagtagctgttcccccgaacaggtttattttagtaaaaaaaaaaaaccaaaaacaaaaacaaaagatttttatcaaatgttatgatgcaaaaaaagaaaaagaaaaaaaaaaagaaaagaaaacttcaattttctgggtatgcacaaagaccatgaagacttatccaagtgcatgaccggatttttgtggttttgttcattttgtgtttaatttgtgttttttttttccagctgtatgaaatgggctttctgaagtttaaatagtccgacttcacccatggtgttctgtgcttgcagtgcgagtgttgctgtaattcagtgttgccgtcagtgtctcttttcttagctttctgtctttctttcaacgtagtgtgaagtgtcttatccttttctatgaattccaatttgccttaactcttttgatgctgtagctgtttcagtaaaagttagttcaaactaatgatgtagaatgctttgaccaaatgagctggtctattatgccttgtaaaacagcagcatagggcttttaaaaggtagtcaataaaagttgctgaaattttggcttttttaaatatgtagtaggtgtttttaatgatttttcacataatgtgtaaggtagtgaaatgcaagaagggaaaaatgttttgtgtgaaacacattttctgactggggaacttttattagggtaaattgtttgtaaggctgtacgccaacagtttcctctgatagtttgactgatttaggatatctgctgtatgatgcaatgtaaagtcttttttgccttttttcaggaaaaaaaaaaaagctaacttgatgtactagatttagtgtaggtagtgttggggttggggatgggggtgggggaggggagtcactgaatgttttgtccttcctttatactaatgatagtgctttagaatgagaattatgcctgaaatctggcaaaccgaaaaatgttgctattgcaacaaagtggcaaaagctaaaagtaaggatttatcttcaaacataagctgagataacgaatagaagcaaaacgattggctactagctctctctctctctctctattaggtaaatttgaaaaataaaaatgacttggcacttttaaaggtaacttcaccaaagaccgaagagccagtaaccagtagctccaacttgtctcagcatcacatcttctgtgctctttatttttgccggaccagtttgcggttaggagaatgtgccttttttgtacctttgcatttaggttttataattttaattgatgtatggacacacacaaacaaaaaagcatgaaggaagatttggatccaagcagtgccacactttacatcatcactacaagtgttcaagtgtaaagaaaaccaattttgaaactatgaaattcctgattcataaatacacagttatttctactttagtacatataagataattcactgttattaaagctcttttattaaggcaattgcatatgttttaaaagcaatggtaaattaagttgtcttccaaaactgtgtacttgtctggtcagctgtgtatgatcagttatctacctcagagtctattttcttttgtgctgggacaggttgctggccctccctgtttccacagaccaaatcctcctagctcaggagctagggctaagcagttatttctttcaagtattttttagttcttaaattttatgcttgtatttgatgatagatgtcagtgacatttcatagtttcaaaagtccttgctgctctgagaagtgtagattctagtgaaaattacatagtcataagagaaatgtgtttttgtttttgtttttgtttcatttttttaaagttgtggtattattggttctatgctccctggaatattactgctttgtgaaagtccagactgaacgcagcaccctctgtgtacctagtacagttataaacctgggtctctcactacttgatatttttgcattagttaagacagaaatttgatagctcggttagaggggaggggaaatctgctgctagaaatgtctgaactaagtgccatactcgtctgggtaagatttgggaaacataacctctgtacataaaaaaaaaaaaatcagttaaacatcacatagtagacagccattaaattataaaaaaattaatttatgaagaaagaccttttgtacagattgaaaaaaaaagattttcatagagatatctatatgatcaagagagttaattttttatttttgttttactagtgccacagacttgccagtggtaacttatttgtccggttcaagataactctgtagttttctttcctaggacttgttgttaaacgccaaaagacatttttgaactgtacatttgatcagattgttagcttttctgttttatttcttttgagaacctttgaataaaaaacatctgaaatttta

SEQ ID NO: 458586 - DNA, 3935 bp, Homo sapiens
gttaaaaaccaaggacctgatatcttataattcagtttaagcctaatacagttcatgtaaactccttttttggcaatttaacatatacatggatcaagtttagtaggtttagaggaaaatgaatgtcttgttctgaaaaaatagcagtaccagctgagctttggggaggtgacagattgagtcacttcacagcttaattctgttatgaactggtcccatgggcatggattgtcaattagggagacttgaatcttttagatattaaatctacaggcagacaacaaagaacacattattcttttgtaaaaatagaggaacctggctgtctactacagaactagaggaacctagcttagacagaagctcatcccacttcagcacctacaacagatttgatacctttgagcaagattggatacttttctcaaagtaaatactgggttggtaccccagagttatgcaccactgaacatggattttaacttaaaatacttaagggcagatttttactgttagttttcttgactaacagagcaacccagtgcagttcctaaagacttctgattttgtgtagcaccagctcctgttgcattttctgaatgaattagtattaaaaatggagccccaagaagctggttaaatttttagccttctgcatttaagctgtagcccaggctgtgagctagtatcgcatcttattcattatccaacatagaaccaggtttacaacaggcactcaaaatgtttgtgggatgaatgaatgagaaactgccaattctggggatttctgtttcagaagagttgatgctaagctgttctttctaacaatggttcccaggttcagctgtttcagtccacaccttgttcacagtaagatattcaattcaattcagcaaacatttgttgtgtgcttgctgctctgtgcctgaccagaagaaatgaagccaagatacaaataatagaaccctgtcatgagcacagaaagacctgctgagtttctattgattgtggtaaaccagcctgcatccagttccaagtaacagctgcccacttagtgaatactctctcatgtttcaacactcagttctagtgtagcctcttctataaagcctttcttttccagatgcagctcaaaaagctgtgtctgccctgaaggccagtggggttcaagctcaaatggcaaagcaacaggaacaagatcctaccaacctctacatttctaatttgccactctccatggatgagcaagaactagaaaatatgctcaaaccatttggacaagttatttctacaaggatactacgtgattccagtggtacaagtcgtggtgttggctttgctaggatggaatcaacagaaaggctgaacaatcatggatttttctgatcaattgtgctttaggaaattattgacagttttgcacaggttcttgaaaacgttatttataatgaaatcaactaaaactatttttgctataagttctataaggtgcataaaacccttaaattcatctagtagctgttcccccgaacaggtttattttagtaaaaaaaaaaaaccaaaaacaaaaacaaaagatttttatcaaatgttatgatgcaaaaaaagaaaaagaaaaaaaaaaagaaaagaaaacttcaattttctgggtatgcacaaagaccatgaagacttatccaagtgcatgaccggatttttgtggttttgttcattttgtgtttaatttgtgttttttttttccagctgtatgaaatgggctttctgaagtttaaatagtccgacttcacccatggtgttctgtgcttgcagtgcgagtgttgctgtaattcagtgttgccgtcagtgtctcttttcttagctttctgtctttctttcaacgtagtgtgaagtgtcttatccttttctatgaattccaatttgccttaactcttttgatgctgtagctgtttcagtaaaagttagttcaaactaatgatgtagaatgctttgaccaaatgagctggtctattatgccttgtaaaacagcagcatagggcttttaaaaggtagtcaataaaagttgctgaaattttggcttttttaaatatgtagtaggtgtttttaatgatttttcacataatgtgtaaggtagtgaaatgcaagaagggaaaaatgttttgtgtgaaacacattttctgactggggaacttttattagggtaaattgtttgtaaggctgtacgccaacagtttcctctgatagtttgactgatttaggatatctgctgtatgatgcaatgtaaagtcttttttgccttttttcaggaaaaaaaaaaaagctaacttgatgtactagatttagtgtaggtagtgttggggttggggatgggggtgggggaggggagtcactgaatgttttgtccttcctttatactaatgatagtgctttagaatgagaattatgcctgaaatctggcaaaccgaaaaatgttgctattgcaacaaagtggcaaaagctaaaagtaaggatttatcttcaaacataagctgagataacgaatagaagcaaaacgattggctactagctctctctctctctctctattaggtaaatttgaaaaataaaaatgacttggcacttttaaaggtaacttcaccaaagaccgaagagccagtaaccagtagctccaacttgtctcagcatcacatcttctgtgctctttatttttgccggaccagtttgcggttaggagaatgtgccttttttgtacctttgcatttaggttttataattttaattgatgtatggacacacacaaacaaaaaagcatgaaggaagatttggatccaagcagtgccacactttacatcatcactacaagtgttcaagtgtaaagaaaaccaattttgaaactatgaaattcctgattcataaatacacagttatttctactttagtacatataagataattcactgttattaaagctcttttattaaggcaattgcatatgttttaaaagcaatggtaaattaagttgtcttccaaaactgtgtacttgtctggtcagctgtgtatgatcagttatctacctcagagtctattttcttttgtgctgggacaggttgctggccctccctgtttccacagaccaaatcctcctagctcaggagctagggctaagcagttatttctttcaagtattttttagttcttaaattttatgcttgtatttgatgatagatgtcagtgacatttcatagtttcaaaagtccttgctgctctgagaagtgtagattctagtgaaaattacatagtcataagagaaatgtgtttttgtttttgtttttgtttcatttttttaaagttgtggtattattggttctatgctccctggaatattactgctttgtgaaagtccagactgaacgcagcaccctctgtgtacctagtacagttataaacctgggtctctcactacttgatatttttgcattagttaagacagaaatttgatagctcggttagaggggaggggaaatctgctgctagaaatgtctgaactaagtgccatactcgtctgggtaagatttgggaaacataacctctgtacataaaaaaaaaaaaatcagttaaacatcacatagtagacagccattaaattataaaaaaattaatttatgaagaaagaccttttgtacagattgaaaaaaaaagattttcatagagatatctatatgatcaagagagttaattttttatttttgttttactagtgccacagacttgccagtggtaacttatttgtccggttcaagataactctgtagttttctttcctaggacttgttgttaaacgccaaaagacatttttgaactgtacatttgatcagattgttagcttttctgttttatttcttttgagaacctttgaataaaaaacatctgaaatttta

SEQ ID NO: 458587 - DNA, 1662 bp, Homo sapiens
aatgaacccaaacacttccttcaccaaggggccctgcttttggacaccatgtgtcccaaaaattgaaacttaagataattgccgttagatataatacagaataggtgtgtacccttgcttttgtttattcttcagcaggaaatgatagtgctttagaatgagaattatgcctgaaatctggcaaaccgaaaaatgttgctattgcaacaaagtggcaaaagctaaaagtaaggatttatcttcaaacataagctgagataacgaatagaagcaaaacgattggctactagctctctctctctctctctattaggtaaatttgaaaaataaaaatgacttggcacttttaaaggtaacttcaccaaagaccgaagagccagtaaccagtagctccaacttgtctcagcatcacatcttctgtgctctttatttttgccggaccagtttgcggttaggagaatgtgccttttttgtacctttgcatttaggttttataattttaattgatgtatggacacacacaaacaaaaaagcatgaaggaagatttggatccaagcagtgccacactttacatcatcactacaagtgttcaagtgtaaagaaaaccaattttgaaactatgaaattcctgattcataaatacacagttatttctactttagtacatataagataattcactgttattaaagctcttttattaaggcaattgcatatgttttaaaagcaatggtaaattaagttgtcttccaaaactgtgtacttgtctggtcagctgtgtatgatcagttatctacctcagagtctattttcttttgtgctgggacaggttgctggccctccctgtttccacagaccaaatcctcctagctcaggagctagggctaagcagttatttctttcaagtattttttagttcttaaattttatgcttgtatttgatgatagatgtcagtgacatttcatagtttcaaaagtccttgctgctctgagaagtgtagattctagtgaaaattacatagtcataagagaaatgtgtttttgtttttgtttttgtttcatttttttaaagttgtggtattattggttctatgctccctggaatattactgctttgtgaaagtccagactgaacgcagcaccctctgtgtacctagtacagttataaacctgggtctctcactacttgatatttttgcattagttaagacagaaatttgatagctcggttagaggggaggggaaatctgctgctagaaatgtctgaactaagtgccatactcgtctgggtaagatttgggaaacataacctctgtacataaaaaaaaaaaaatcagttaaacatcacatagtagacagccattaaattataaaaaaattaatttatgaagaaagaccttttgtacagattgaaaaaaaaagattttcatagagatatctatatgatcaagagagttaattttttatttttgttttactagtgccacagacttgccagtggtaacttatttgtccggttcaagataactctgtagttttctttcctaggacttgttgttaaacgccaaaagacatttttgaactgtacatttgatcagattgttagcttttctgttttatttcttttgagaacctttgaataaaaaacatctgaaatttta

SEQ ID NO: 458588 - DNA, 930 bp, Homo sapiens
  misc_feature (50)..(50): n is a, c, g, or t
atcgagctcggcccttgtcatttaggttttataattttacctaatagagngagagagagagagagagagacagtctattttcttttgtgctgggacaggttgctggccctccctgtttccacagaccaaatcctcctagctcaggagctagggctaagcagttatttctttcaagtattttttagttcttaaattttatgcttgtatttgatgatagatgtcagtgacatttcatagtttcaaaagtccttgctgctctgagaagtgtagattctagtgaaaattacatagtcataagagaaatgtgtttttgtttttgtttttgtttcatttttttaaagttgtggtattattggttctatgctccctggaatattactgctttgtgaaagtccagactgaacgcagcaccctctgtgtacctagtacagttataaacctgggtctctcactacttgatatttttgcattagttaagacagaaatttgatagctcggttagaggggaggggaaatctgctgctagaaatgtctgaactaagtgccatactcgtctgggtaagatttgggaaacataacctctgtacataaaaaaaaaaaaatcagttaaacatcacatagtagacagccattaaattataaaaaaattaatttatgaagaaagaccttttgtacagattgaaaaaaaaagattttcatagagatatctatatgatcaagagagttaattttttatttttgttttactagtgccacagacttgccagtggtaacttatttgtccggttcaagataactctgtagttttctttcctaggacttgttgttaaacgccaaaagacatttttgaactgtacatttgatcagattgttagcttttctgttttatttcttttgagaacctttgaataaaaaacatctgaaatttta

SEQ ID NO: 458589 - DNA, 1811 bp, Homo sapiens
ggcacgaggggtggagcagcggcagcagcagcagccgccgccgccgccgccgctgccgccgccgccggaaagggagaggcaggagagcccgagacttggaaaccccaaagtgtccgcgaccctgcacggcagctcccttccagcttcatgggcaaagtgtggaaacagcagatgtaccctcagtacgccacctactattacccccagtatctgcaagccaagtttggaaggcattcgggaataccaagtgaaaaggaagagtgaagaacagaaaaatgttagtgggatggcaaacactgtgaacattgctgtttctagtgggccagaaaaatcagtctctggtcccagcccaccccatggcccctcccagtcccagcaccaccagcagtaataacaacagtagcagcagtagcaactcaggatgggatcagctcagcaaaacgaacctctatatccgaggactgcctccccacaccaccgaccaggacctggtgaagctctgtcaaccatatgggaaaatagtctccacaaaggcaattttggataagacaacgaacaaatgcaaaggttatggttttgtcgactttgacagccctgcagcagctcaaaaagctgtgtctgccctgaaggccagtggggttcaagctcaaatggcaaagcaacaggaacaagatcctaccaacctctacatttctaatttgccactctccatggatgagcaagaactagaaaatatgctcaaaccatttggacaagttatttctacaaggatactacgtgattccagtggtacaagtcgtggtgttggctttgctaggatggaatcaacagaaaaatgtgaagctgttattggtcattttaatggaaaatttattaagacaccaccaggagtttctgcccccacagaacctttattgtgtaagtttgctgatggaggacagaaaaagagacagaacccaaacaaatacatccctaatggaagaccatggcatagagaaggagaggtgagacttgctggaatgacacttacttacgacccaactacagctgctatacagaacggattttatccttcaccatacagtattgctacaaaccgaatgatcactcaaacttctattacaccctatattgcatctcctgtatctgcctaccaggtgcaaagtccttcgtggatgcaacctcaaccatatattctacagcaccctggtgccgtgttaactccctcaatggagcacaccatgtcactacagcccgcatcaatgatcagccctctggcccagcagatgagtcatctgtcactaggcagcaccggaacatacatgcctgcaacgtcagctatgcaaggagcctacttgccacagtatgcacatatgcagacgacagcggttcctgttgaggaggcaagtggtcaacagcaggtggctgtcgagacgtctaatgaccattctccatatacctttcaacctaataagtaactgtgaggtatgagggaaaggtcttcataactggggggctcaaatcaagcacaatctatagggctttttttaaaatcagaatggtgattgggataactcggattttatcatactgctttaatcgtggccaaggcatctagtcttgttgaaatattaaaatcagtgattttatgaatttaagattaatcattttgtctaaagagaatgctttatactgaagccaaatgtatactctccccactaaaaagaaaaaagataaaaatctgtaacatcagagaacaattttggttcttggtgttctctggtcgacgcggccgcgatttagtagtagta

SEQ ID NO: 458590 - DNA, 905 bp, Homo sapiens
  misc_feature (50)..(50): n is a, c, g, or t
atcgagctcggcccttgtcatttaggttttataattttacctaatagagngagagagagagagagagagacaggttgctggccctccctgtttccacagaccaaatcctcctagctcaggagctagggctaagcagttatttctttcaagtattttttagttcttaaattttatgcttgtatttgatgatagatgtcagtgacatttcatagtttcaaaagtccttgctgctctgagaagtgtagattctagtgaaaattacatagtcataagagaaatgtgtttttgtttttgtttttgtttcatttttttaaagttgtggtattattggttctatgctccctggaatattactgctttgtgaaagtccagactgaacgcagcaccctctgtgtacctagtacagttataaacctgggtctctcactacttgatatttttgcattagttaagacagaaatttgatagctcggttagaggggaggggaaatctgctgctagaaatgtctgaactaagtgccatactcgtctgggtaagatttgggaaacataacctctgtacataaaaaaaaaaaaatcagttaaacatcacatagtagacagccattaaattataaaaaaattaatttatgaagaaagaccttttgtacagattgaaaaaaaaagattttcatagagatatctatatgatcaagagagttaattttttatttttgttttactagtgccacagacttgccagtggtaacttatttgtccggttcaagataactctgtagttttctttcctaggacttgttgttaaacgccaaaagacatttttgaactgtacatttgatcagattgttagcttttctgttttatttcttttgagaacctttgaataaaaaacatctgaaatttta

SEQ ID NO: 458591 - DNA, 1102 bp, Homo sapiens
  misc_feature (1088)..(1088): n is a, c, g, or t
ggcacgaggggtggagcagcggcagcagcagcagccgccgccgccgccgccgctgccgccgccgccggaaagggagaggcaggagagcccgagacttggaaaccccaaagtgtccgcgaccctgcacggcagctcccttccagcttcatgggcaaagtgtggaaacagcagatgtaccctcagtacgccacctactattacccccagtatctgcaagccaagtttggaaggcattcgggaataccaagtgaaaaggaagagtgaagaacagaaaaatgttagtgggatggcaaacactgtgaacattgctgtttctagtgggccagaaaaatcagtctctggtcccagcccaccccatggcccctcccagtcccagcaccaccagcagtaataacaacagtagcagcagtagcaactcaggatgggatcagctcagcaaaacgaacctctatatccgaggactgcctccccacaccaccgaccaggacctggtgaagctctgtcaaccatatgggaaaatagtctccacaaaggcaattttggataagacaacgaacaaatgcaaaggttatggttttgtcgactttgacagccctgcagcagctcaaaaagctgtgtctgccctgaaggccagtggggttcaagctcaaatggcaaagcaacaggaacaagatcctaccaacctctacatttctaatttgccactctccatggatgagcaagaactagaaaatatgctcaaaccatttggacaagttatttctacaaggatactacgtgattccagtggtacaagtcgtggtgttggctttgctaggatggaatcaacagaaaaatgtgaagctgttattggtcattttaatggaaaatttattaagacaccaccaggagtttctgcccccacagaacctttattgtgtaagtttgctgatggaggacagaaaaagagacagaacccaaacaaatacatccctaatggaagaccatggcatagagaaggagaggtgagacttgctggaatgacacttacttacgacccaactacagctgctatacagaacggattttatccttcaccatacgtaacncatactgccggtcc

SEQ ID NO: 458592 - DNA, 718 bp, Homo sapiens
ctttaagtgatctgtgactccttaagttgtttgcaaaatgttgcttgtgtgtgtgcaattaagtggggaaaaatgttctatttccctaattaggttttcagagggctccatgaccctaaagaggttaagaaccaatagtaaagagtttacaaaacattattattcccattttataattagaaaattgaggaatagaaattgacagcagctgatttgctgcttaagaaagaaaattagatgtcatagttccctaatcctgtaatgctataagctattagattattaagaccactgaagcatataaaaaatgggggcatctggcccaaattagggtctgtagggagttgtttgccttcccatcatatatccagtgagggccctgcactcatgttggagtgggcctttctccactaaaccaccataagcttatgcaattggatttgagaaattggcagctgcaagaaaccaccaaccccaatggggaaaggctacagtccagataactgaaatgttaacaaggcagaagcacttaactttggtctgccttaggtggcaaaggaaaccagagaaaacaagtatcggggctctgctatcaaggtaaatcgcaatacattcttcccccatgactcttccccatatcctctctgttgaacctctgaagttaacaataggggataaaatgcaggagggttttgttgttaagaattggaaactgaaa

SEQ ID NO: 458593 - DNA, 3989 bp, Homo sapiens
ggcacgaggggtggagcagcggcagcagcagcagccgccgccgccgccgccgctgccgccgccgccggaaagggagaggcaggagagcccgagacttggaaaccccaaagtgtccgcgaccctgcacggcagctcccttccagcttcatgggcaaagtgtggaaacagcagatgtaccctcagtacgccacctactattacccccagtatctgcaagccaagcagtctctggtcccagcccaccccatggcccctcccagtcccagcaccaccagcagtaataacaacagtagcagcagtagcaactcaggatgggatcagctcagcaaaacgaacctctatatccgaggactgcctccccacaccaccgaccaggacctggtgaagctctgtcaaccatatgggaaaatagtctccacaaaggcaattttggataagacaacgaacaaatgcaaaggttatggttttgtcgactttgacagccctgcagcagctcaaaaagctgtgtctgccctgaaggccagtggggttcaagctcaaatggcaaagcaacaggaacaagatcctaccaacctctacatttctaatttgccactctccatggatgagcaagaactagaaaatatgctcaaaccatttggacaagttatttctacaaggatactacgtgattccagtggtacaagtcgtggtgttggctttgctaggatggaatcaacagaaaaatgtgaagctgttattggtcattttaatggaaaatttattaagacaccaccaggagtttctgcccccacagaacctttattgtgtaagtttgctgatggaggacagaaaaagagacagaacccaaacaaatacatccctaatggaagaccatggcatagagaaggagaggtgagacttgctggaatgacacttacttacgacccaactacagctgctatacagaacggattttatccttcaccatacagtattgctacaaaccgaatgatcactcaaacttctattacaccctatattgcatctcctgtatctgcctaccaggtgcaaagtccttcgtggatgcaacctcaaccatatattctacagcaccctggtgccgtgttaactccctcaatggagcacaccatgtcactacagcccgcatcaatgatcagccctctggcccagcagatgagtcatctgtcactaggcagcaccggaacatacatgcctgcaacgtcagctatgcaaggagcctacttgccacagtatgcacatatgcagacgacagcggttcctgttgaggaggcaagtggtcaacagcaggtggctgtcgagacgtctaatgaccattctccatatacctttcaacctaataagtaactgtgagatgtacagaaaggtgttcttacatgaagaagggtgtgaaggctgaacaatcatggatttttctgatcaattgtgctttaggaaattattgacagttttgcacaggttcttgaaaacgttatttataatgaaatcaactaaaactatttttgctataagttctataaggtgcataaaacccttaaattcatctagtagctgttcccccgaacaggtttattttagtaaaaaaaaaaaaccaaaaacaaaaacaaaagatttttatcaaatgttatgatgcaaaaaaagaaaaagaaaaaaaaaaagaaaagaaaacttcaattttctgggtatgcacaaagaccatgaagacttatccaagtgcatgaccggatttttgtggttttgttcattttgtgtttaatttgtgttttttttttccagctgtatgaaatgggctttctgaagtttaaatagtccgacttcacccatggtgttctgtgcttgcagtgcgagtgttgctgtaattcagtgttgccgtcagtgtctcttttcttagctttctgtctttctttcaacgtagtgtgaagtgtcttatccttttctatgaattccaatttgccttaactcttttgatgctgtagctgtttcagtaaaagttagttcaaactaatgatgtagaatgctttgaccaaatgagctggtctattatgccttgtaaaacagcagcatagggcttttaaaaggtagtcaataaaagttgctgaaattttggcttttttaaatatgtagtaggtgtttttaatgatttttcacataatgtgtaaggtagtgaaatgcaagaagggaaaaatgttttgtgtgaaacacattttctgactggggaacttttattagggtaaattgtttgtaaggctgtacgccaacagtttcctctgatagtttgactgatttaggatatctgctgtatgatgcaatgtaaagtcttttttgccttttttcaggaaaaaaaaaaaagctaacttgatgtactagatttagtgtaggtagtgttggggttggggatgggggtgggggaggggagtcactgaatgttttgtccttcctttatactaatgatagtgctttagaatgagaattatgcctgaaatctggcaaaccgaaaaatgttgctattgcaacaaagtggcaaaagctaaaagtaaggatttatcttcaaacataagctgagataacgaatagaagcaaaacgattggctactagctctctctctctctctctattaggtaaatttgaaaaataaaaatgacttggcacttttaaaggtaacttcaccaaagaccgaagagccagtaaccagtagctccaacttgtctcagcatcacatcttctgtgctctttatttttgccggaccagtttgcggttaggagaatgtgccttttttgtacctttgcatttaggttttataattttaattgatgtatggacacacacaaacaaaaaagcatgaaggaagatttggatccaagcagtgccacactttacatcatcactacaagtgttcaagtgtaaagaaaaccaattttgaaactatgaaattcctgattcataaatacacagttatttctactttagtacatataagataattcactgttattaaagctcttttattaaggcaattgcatatgttttaaaagcaatggtaaattaagttgtcttccaaaactgtgtacttgtctggtcagctgtgtatgatcagttatctacctcagagtctattttcttttgtgctgggacaggttgctggccctccctgtttccacagaccaaatcctcctagctcaggagctagggctaagcagttatttctttcaagtattttttagttcttaaattttatgcttgtatttgatgatagatgtcagtgacatttcatagtttcaaaagtccttgctgctctgagaagtgtagattctagtgaaaattacatagtcataagagaaatgtgtttttgtttttgtttttgtttcatttttttaaagttgtggtattattggttctatgctccctggaatattactgctttgtgaaagtccagactgaacgcagcaccctctgtgtacctagtacagttataaacctgggtctctcactacttgatatttttgcattagttaagacagaaatttgatagctcggttagaggggaggggaaatctgctgctagaaatgtctgaactaagtgccatactcgtctgggtaagatttgggaaacataacctctgtacataaaaaaaaaaaaatcagttaaacatcacatagtagacagccattaaattataaaaaaattaatttatgaagaaagaccttttgtacagattgaaaaaaaaagattttcatagagatatctatatgatcaagagagttaattttttatttttgttttactagtgccacagacttgccagtggtaacttatttgtccggttcaagataactctgtagttttctttcctaggacttgttgttaaacgccaaaagacatttttgaactgtacatttgatcagattgttagcttttctgttttatttcttttgagaacctttgaataaaaaacatctgaaatttta

SEQ ID NO: 458594 - DNA, 3466 bp, Homo sapiens
ggcacgaggggtggagcagcggcagcagcagcagccgccgccgccgccgccgctgccgccgccgccggaaagggagaggcaggagagcccgagacttggaaaccccaaagtgtccgcgaccctgcacggcagctcccttccagcttcatgggcaaagtgtggaaacagcagatgtaccctcagtacgccacctactattacccccagtatctgcaagccaagcagtctctggtcccagcccaccccatggcccctcccagtcccagcaccaccagcagtaataacaacagtagcagcagtagcaactcaggatgggatcagctcagcaaaacgaacctctatatccgaggactgcctccccacaccaccgaccaggacctggtgaagctctgtcaaccatatgggaaaatagtctccacaaaggcaattttggataagacaacgaacaaatgcaaaggttatggttttgtcgactttgacagccctgcagcagctcaaaaagctgtgtctgccctgaaggccagtggggttcaagctcaaatggcaaagcaacaggaacaagatcctaccaacctctacatttctaatttgccactctccatggatgagcaagaactagaaaatatgctcaaaccatttggacaagttatttctacaaggatactacgtgattccagtggtacaagtcgtggtgttggctttgctaggatggaatcaacagaaaaatgtgaagctgttattggtcattttaatggaaaatttattaagacaccaccaggagtttctgcccccacagaacctttattgtgtaagtttgctgatggaggacagaaaaagagacagaacccaaacaaatacatccctaatggaagaccatggcatagagaaggagaggtgagacttgctggaatgacacttacttacgacccaactacagctgctatacagaacggattttatccttcaccatacagtattgctacaaaccgaatgatcactcaaacttctattacaccctatattgcatctcctgtatctgcctaccaggtgcaaagtccttcgtggatgcaacctcaaccatatattctacagcaccctggtgccgtgttaactccctcaatggagcacaccatgtcactacagcccgcatcaatgatcagccctctggcccagcagatgagtcatctgtcactaggcagcaccggaacatacatgcctgcaacgtcagctatgcaaggagcctacttgccacagtatgcacatatgcagacgacagcggttcctgttgaggaggcaagtggtcaacagcaggtggctgtcgagacgtctaatgaccattctccatatacctttcaacctaataagtaactgtgagatgtacagaaaggtgttcttacatgaagaagggtgtgaaggctgaacaatcatggatttttctgatcaattgtgctttaggaaattattgacagttttgcacaggttcttgaaaacgttatttataatgaaatcaactaaaactatttttgctataagttctataaggtgcataaaacccttaaattcatctagtagctgttcccccgaacaggtttattttagtaaaaaaaaaaaaccaaaaacaaaaacaaaagatttttatcaaatgttatgatgcaaaaaaagaaaaagaaaaaaaaaaagaaaagaaaacttcaattttctgggtatgcacaaagaccatgaagacttatccaagtgcatgaccggatttttgtggttttgttcattttgtgtttaatttgtgttttttttttccagctgtatgaaatgggctttctgaagtttaaatagtccgacttcacccatggtgttctgtgcttgcagtgcgagtgttgctgtaattcagtgttgccgtcagtgtctcttttcttagctttctgtctttctttcaacgtagtgtgaagtgtcttatccttttctatgaattccaatttgccttaactcttttgatgctgtagctgtttcagtaaaagttagttcaaactaatgatgtagaatgctttgaccaaatgagctggtctattatgccttgtaaaacagcagcatagggcttttaaaaggtagtcaataaaagttgctgaaattttggcttttttaaatatgtagtaggtgtttttaatgatttttcacataatgtgtaaggtagtgaaatgcaagaagggaaaaatgttttgtgtgaaacacattttctgactggggaacttttattagggtaaattgtttgtaaggctgtacgccaacagtttcctctgatagtttgactgatttaggatatctgctgtatgatgcaatgtaaagtcttttttgccttttttcaggaaaaaaaaaaaagctaacttgatgtactagatttagtgtaggtagtgttggggttggggatgggggtgggggaggggagtcactgaatgttttgtccttcctttatactaatgatagtgctttagaatgagaattatgcctgaaatctggcaaaccgaaaaatgttgctattgcaacaaagtggcaaaagctaaaagtaaggatttatcttcaaacataagctgagataacgaatagaagcaaaacgattggctactagctctctctctctctctctattaggtaaatttgaaaaataaaaatgacttggcacttttaaaggtaacttcaccaaagaccgaagagccagtaaccagtagctccaacttgtctcagcatcacatcttctgtgctctttatttttgccggaccagtttgcggttaggagaatgtgccttttttgtacctttgcatttaggttttataattttaattgatgtatggacacacacaaacaaaaaagcatgaaggaagatttggatccaagcagtgccacactttacatcatcactacaagtgttcaagtgtaaagaaaaccaattttgaaactatgaaattcctgattcataaatacacagttatttctactttagtacatataagataattcactgttattaaagctcttttattaaggcaattgcatatgttttaaaagcaatggtaaattaagttgtcttccaaaactgtgtacttgtctggtcagctgtgtatgatcagttatctacctcagagtctattttcttttgtgctgggacaggttgctggccctccctgtttccacagaccaaatcctcctagctcaggagctagggctaagcagttatttctttcaagtattttttagttcttaaattttatgcttgtatttgatgatagatgtcagtgacatttcatagtttcaaaagtccttgctgctctgagaagtgtagattctagtgaaaattacatagtcataagagaaatgtgtttttgtttttgtttttgtttcattttttttttttttttttgggggaaaattttatgaaaaaattttttagaggttttaggggggggggaaagggggggg

SEQ ID NO: 458595 - DNA, 4147 bp, Homo sapiens
ggcacgaggggtggagcagcggcagcagcagcagccgccgccgccgccgccgctgccgccgccgccggaaagggagaggcaggagagcccgagacttggaaaccccaaagtgtccgcgaccctgcacggcagctcccttccagcttcatgggcaaagtgtggaaacagcagatgtaccctcagtacgccacctactattacccccagtatctgcaagccaagtttggaaggcattcgggaataccaagtgaaaaggaagagtgaagaacagaaaaatgttagtgggatggcaaacactgtgaacattgctgtttctagtgggccagaaaaatcagtctctggtcccagcccaccccatggcccctcccagtcccagcaccaccagcagtaataacaacagtagcagcagtagcaactcaggatgggatcagctcagcaaaacgaacctctatatccgaggactgcctccccacaccaccgaccaggacctggtgaagctctgtcaaccatatgggaaaatagtctccacaaaggcaattttggataagacaacgaacaaatgcaaaggttatggttttgtcgactttgacagccctgcagcagctcaaaaagctgtgtctgccctgaaggccagtggggttcaagctcaaatggcaaagcaacaggaacaagatcctaccaacctctacatttctaatttgccactctccatggatgagcaagaactagaaaatatgctcaaaccatttggacaagttatttctacaaggatactacgtgattccagtggtacaagtcgtggtgttggctttgctaggatggaatcaacagaaaaatgtgaagctgttattggtcattttaatggaaaatttattaagacaccaccaggagtttctgcccccacagaacctttattgtgtaagtttgctgatggaggacagaaaaagagacagaacccaaacaaatacatccctaatggaagaccatggcatagagaaggagaggtgagacttgctggaatgacacttacttacgacccaactacagctgctatacagaacggattttatccttcaccatacagtattgctacaaaccgaatgatcactcaaacttctattacaccctatattgcatctcctgtatctgcctaccaggtggcaaaggaaaccagagaaaacaagtatcggggctctgctatcaaggtgcaaagtccttcgtggatgcaacctcaaccatatattctacagcaccctggtgccgtgttaactccctcaatggagcacaccatgtcactacagcccgcatcaatgatcagccctctggcccagcagatgagtcatctgtcactaggcagcaccggaacatacatgcctgcaacgtcagctatgcaaggagcctacttgccacagtatgcacatatgcagacgacagcggttcctgttgaggaggcaagtggtcaacagcaggtggctgtcgagacgtctaatgaccattctccatatacctttcaacctaataagtaactgtgagatgtacagaaaggtgttcttacatgaagaagggtgtgaaggctgaacaatcatggatttttctgatcaattgtgctttaggaaattattgacagttttgcacaggttcttgaaaacgttatttataatgaaatcaactaaaactatttttgctataagttctataaggtgcataaaacccttaaattcatctagtagctgttcccccgaacaggtttattttagtaaaaaaaaaaaaccaaaaacaaaaacaaaagatttttatcaaatgttatgatgcaaaaaaagaaaaagaaaaaaaaaaagaaaagaaaacttcaattttctgggtatgcacaaagaccatgaagacttatccaagtgcatgaccggatttttgtggttttgttcattttgtgtttaatttgtgttttttttttccagctgtatgaaatgggctttctgaagtttaaatagtccgacttcacccatggtgttctgtgcttgcagtgcgagtgttgctgtaattcagtgttgccgtcagtgtctcttttcttagctttctgtctttctttcaacgtagtgtgaagtgtcttatccttttctatgaattccaatttgccttaactcttttgatgctgtagctgtttcagtaaaagttagttcaaactaatgatgtagaatgctttgaccaaatgagctggtctattatgccttgtaaaacagcagcatagggcttttaaaaggtagtcaataaaagttgctgaaattttggcttttttaaatatgtagtaggtgtttttaatgatttttcacataatgtgtaaggtagtgaaatgcaagaagggaaaaatgttttgtgtgaaacacattttctgactggggaacttttattagggtaaattgtttgtaaggctgtacgccaacagtttcctctgatagtttgactgatttaggatatctgctgtatgatgcaatgtaaagtcttttttgccttttttcaggaaaaaaaaaaaagctaacttgatgtactagatttagtgtaggtagtgttggggttggggatgggggtgggggaggggagtcactgaatgttttgtccttcctttatactaatgatagtgctttagaatgagaattatgcctgaaatctggcaaaccgaaaaatgttgctattgcaacaaagtggcaaaagctaaaagtaaggatttatcttcaaacataagctgagataacgaatagaagcaaaacgattggctactagctctctctctctctctctattaggtaaatttgaaaaataaaaatgacttggcacttttaaaggtaacttcaccaaagaccgaagagccagtaaccagtagctccaacttgtctcagcatcacatcttctgtgctctttatttttgccggaccagtttgcggttaggagaatgtgccttttttgtacctttgcatttaggttttataattttaattgatgtatggacacacacaaacaaaaaagcatgaaggaagatttggatccaagcagtgccacactttacatcatcactacaagtgttcaagtgtaaagaaaaccaattttgaaactatgaaattcctgattcataaatacacagttatttctactttagtacatataagataattcactgttattaaagctcttttattaaggcaattgcatatgttttaaaagcaatggtaaattaagttgtcttccaaaactgtgtacttgtctggtcagctgtgtatgatcagttatctacctcagagtctattttcttttgtgctgggacaggttgctggccctccctgtttccacagaccaaatcctcctagctcaggagctagggctaagcagttatttctttcaagtattttttagttcttaaattttatgcttgtatttgatgatagatgtcagtgacatttcatagtttcaaaagtccttgctgctctgagaagtgtagattctagtgaaaattacatagtcataagagaaatgtgtttttgtttttgtttttgtttcatttttttaaagttgtggtattattggttctatgctccctggaatattactgctttgtgaaagtccagactgaacgcagcaccctctgtgtacctagtacagttataaacctgggtctctcactacttgatatttttgcattagttaagacagaaatttgatagctcggttagaggggaggggaaatctgctgctagaaatgtctgaactaagtgccatactcgtctgggtaagatttgggaaacataacctctgtacataaaaaaaaaaaaatcagttaaacatcacatagtagacagccattaaattataaaaaaattaatttatgaagaaagaccttttgtacagattgaaaaaaaaagattttcatagagatatctatatgatcaagagagttaattttttatttttgttttactagtgccacagacttgccagtggtaacttatttgtccggttcaagataactctgtagttttctttcctaggacttgttgttaaacgccaaaagacatttttgaactgtacatttgatcagattgttagcttttctgttttatttcttttgagaacctttgaataaaaaacatctgaaatttta

SEQ ID NO: 458596 - DNA, 2834 bp, Homo sapiens
ggcacgaggggtggagcagcggcagcagcagcagccgccgccgccgccgccgctgccgccgccgccggaaagggagaggcaggagagcccgagacttggaaaccccaaagtgtccgcgaccctgcacggcagctcccttccagcttcatgggcaaagtgtggaaacagcagatgtaccctcagtacgccacctactattacccccagtatctgcaagccaagcagtctctggtcccagcccaccccatggcccctcccagtcccagcaccaccagcagtaataacaacagtagcagcagtagcaactcaggatgggatcagctcagcaaaacgaacctctatatccgaggactgcctccccacaccaccgaccaggacctggtgaagctctgtcaaccatatgggaaaatagtctccacaaaggcaattttggataagacaacgaacaaatgcaaaggttatggttttgtcgactttgacagccctgcagcagctcaaaaagctgtgtctgccctgaaggccagtggggttcaagctcaaatggcaaagcaacaggaacaagatcctaccaacctctacatttctaatttgccactctccatggatgagcaagaactagaaaatatgctcaaaccatttggacaagttatttctacaaggatactacgtgattccagtggtacaagtcgtggtgttggctttgctaggatggaatcaacagaaaaatgtgaagctgttattggtcattttaatggaaaatttattaagacaccaccaggagtttctgcccccacagaacctttattgtgtaagtttgctgatggaggacagaaaaagagacagaacccaaacaaatacatccctaatggaagaccatggcatagagaaggagaggtgagacttgctggaatgacacttacttacgacccaactacagctgctatacagaacggattttatccttcaccatacagtattgctacaaaccgaatgatcactcaaacttctattacaccctatattgcatctcctgtatctgcctaccaggtgcaaagtccttcgtggatgcaacctcaaccatatattctacagcaccctggtgccgtgttaactccctcaatggagcacaccatgtcactacagcccgcatcaatgatcagccctctggcccagcagatgagtcatctgtcactaggcagcaccggaacatacatgcctgcaacgtcagctatgcaaggagcctacttgccacagtatgcacatatgcagacgacagcggttcctgttgaggaggcaagtggtcaacagcaggtggctgtcgagacgtctaatgaccattctccatatacctttcaacctaataagtaactgtgagatgtacagaaaggtgttcttacatgaagaagggtgtgaaggctgaacaatcatggatttttctgatcaattgtgctttaggaaattattgacagttttgcacaggttcttgaaaacgttatttataatgaaatcaactaaaactatttttgctataagttctataaggtgcataaaacccttaaattcatctagtagctgttcccccgaacaggtttattttagtaaaaaaaaaaaaccaaaaacaaaaacaaaagatttttatcaaatgttatgatgcaaaaaaagaaaaagaaaaaaaaaaagaaaagaaaacttcaattttctgggtatgcacaaagaccatgaagacttatccaagtgcatgaccggatttttgtggttttgttcattttgtgtttaatttgtgttttttttttccagctgtatgaaatgggctttctgaagtttaaatagtccgacttcacccatggtgttctgtgcttgcagtgcgagtgttgctgtaattcagtgttgccgtcagtgtctcttttcttagctttctgtctttctttcaacgtagtgtgaagtgtcttatccttttctatgaattccaatttgccttaactcttttgatgctgtagctgtttcagtaaaagttagttcaaactaatgatgtagaatgctttgaccaaatgagctggtctattatgccttgtaaaacagcagcatagggcttttaaaaggtagtcaataaaagttgctgaaattttggcttttttaaaaaaaaacaaaaaaaaaacaaaaaaaaaaaaaaaaaaaaaaaagaaaagaaaaaaaaaaaagaaaaaaaaaagaaacaaaagagggcggagcggcgaccgaaaagtacatcactcctacgggcggcgcgcacggtcacacaccccgacccgcccgccctgatttctgtacgagagaggccgcgccccatacgatagagcggtgtcagcttataagacagcgagagcgagcaggcgcgcatcacataacacacagccccgcggcgggcgagaaacagacagcatgcaagaggcgcgcgacctaaccggccagaccgcaaagacccacactacccgggcggcgggcgcgcgaaccactaacacgagggcaacagacacacctccacgcaacgccgatcagtcatcacgacacaccgcgcggacgcgagagcacacacagctcaccagctgggcggcatcgatatgctacgcacggctgacactacgcccgagccccgaacagacaaacggcgacgcggcgaccgggaacgaccaagcgtccccgaggcagaccacacgcgcctccccgcaccagcacacttcacacgagcggagccgaacgccacgacgaaaagaagcgcccgcccgccaccgcagaagcaaacgccgaccaccaacgaccgcgagcacagccccggcacccgcagcacggaccagcgc

SEQ ID NO: 458597 - DNA, 2224 bp, Homo sapiens
ggcacgaggggtggagcagcggcagcagcagcagccgccgccgccgccgccgctgccgccgccgccggaaagggagaggcaggagagcccgagacttggaaaccccaaagtgtccgcgaccctgcacggcagctcccttccagcttcatgggcaaagtgtggaaacagcagatgtaccctcagtacgccacctactattacccccagtatctgcaagccaagcagtctctggtcccagcccaccccatggcccctcccagtcccagcaccaccagcagtaataacaacagtagcagcagtagcaactcaggatgggatcagctcagcaaaacgaacctctatatccgaggactgcctccccacaccaccgaccaggacctggtgaagctctgtcaaccatatgggaaaatagtctccacaaaggcaattttggataagacaacgaacaaatgcaaaggttatggttttgtcgactttgacagccctgcagcagctcaaaaagctgtgtctgccctgaaggccagtggggttcaagctcaaatggcaaagcaacaggaacaagatcctaccaacctctacatttctaatttgccactctccatggatgagcaagaactagaaaatatgctcaaaccatttggacaagttatttctacaaggatactacgtgattccagtggtacaagtcgtggtgttggctttgctaggatggaatcaacagaaaaatgtgaagctgttattggtcattttaatggaaaatttattaagacaccaccaggagtttctgcccccacagaacctttattgtgtaagtttgctgatggaggacagaaaaagagacagaacccaaacaaatacatccctaatggaagaccatggcatagagaaggagaggtgagacttgctggaatgacacttacttacgacccaactacagctgctatacagaacggattttatccttcaccatacagtattgctacaaaccgaatgatcactcaaacttctattacaccctatattgcatctcctgtatctgcctaccaggtgcaaagtccttcgtggatgcaacctcaaccatatattctacagcaccctggtgccgtgttaactccctcaatggagcacaccatgtcactacagcccgcatcaatgatcagccctctggcccagcagatgagtcatctgtcactaggcagcaccggaacatacatgcctgcaacgtcagctatgcaaggagcctacttgccacagtatgcacatatgcagacgacagcggttcctgttgaggaggcaagtggtcaacagcaggtggctgtcgagacgtctaatgaccattctccatatacctttcaacctaataagtaactgtgagatgtacagaaaggtgttcttacatgaagaagggtgtgaaggctgaacaatcatggatttttctgatcaattgtgctttaggaaattattgacagttttgcacaggttcttgaaaacgttatttataatgaaatcaactaaaactatttttgctataagttctataaggtgcataaaacccttaaattcatctagtagctgttcccccgaacaggtttattttagtaaaaaaaaaaaaccaaaaacaaaaacaaaagatttttatcaaatgttatgatgcaaaaaaagaaaaagaaaaaaaaaaagaaaagaaaacttcaattttctgggtatgcacaaagaccatgaagacttatccaagtgcatgaccggatttttgtggttttgttcattttgtgtttaatttgtgttttttttttccagctggtggaagggaggaatcacgccgcttaaagtttgacttattggataagtgtgttccaattgttcctacgggcggtcaaccacgtatgtgtatttgggatcaagagattcaagatgctcagaatttcgctgttttagctgctcaagttattggcttgcatctagattttttaagacaaggcgaaacctcgaactagattactcttttgatcctctatctaaccagaccttaaagatggagttcttgcaaagccgttaaatgtatctgaaaccgtttaccgtgctttgcaaactaaactatgtacgtatcatgaattgaatacgtgcataggtcttgaaggtgcgatgaggatcatagaaatcgggcaagtagccacgtactatgaacaaagattaatttctgctatcagataagagggctcgtgaa

SEQ ID NO: 458598 - DNA, 1563 bp, Homo sapiens
ggcacgaggggtggagcagcggcagcagcagcagccgccgccgccgccgccgctgccgccgccgccggaaagggagaggcaggagagcccgagacttggaaaccccaaagtgtccgcgaccctgcacggcagctcccttccagcttcatgggcaaagtgtggaaacagcagatgtaccctcagtacgccacctactattacccccagtatctgcaagccaagtttggaaggcattcgggaataccaagtgaaaaggaagagtgaagaacagaaaaatgttagtgggatggcaaacactgtgaacattgctgtttctagtgggccagaaaaatcagtctctggtcccagcccaccccatggcccctcccagtcccagcaccaccagcagtaataacaacagtagcagcagtagcaactcaggatgggatcagctcagcaaaacgaacctctatatccgaggactgcctccccacaccaccgaccaggacctggtgaagctctgtcaaccatatgggaaaatagtctccacaaaggcaattttggataagacaacgaacaaatgcaaaggttatggttttgtcgactttgacagccctgcagcagctcaaaaagctgtgtctgccctgaaggccagtggggttcaagctcaaatggcaaagcaacaggaacaagatcctaccaacctctacatttctaatttgccactctccatggatgagcaagaactagaaaatatgctcaaaccatttggacaagttatttctacaaggatactacgtgattccagtggtacaagtcgtggtgttggctttgctaggatggaatcaacagaaaaatgtgaagctgttattggtcattttaatggaaaatttattaagacaccaccaggagtttctgcccccacagaacctttattgtgtaagtttgctgatggaggacagaaaaagagacagaacccaaacaaatacatccctaatggaagaccatggcatagagaaggagaggtgagacttgctggaatgacacttacttacgacccaactacagctgctatacagaacggattttatccttcaccatacagtattgctacaaaccgaatgatcactcaaacttctattacaccctatattgcatctcctgtatctgcctaccaggtgcaaagtccttcgtggatgcaacctcaaccatatattctacagcaccctgtaagttttttatcttaatgactttgtgttttacaagtaagttatgtgtatattctctctaggttaaaaccatttgccaagggtggtataggatttgggaaattttaaacatggaatatgagaatgtacaatttcattataaaacttcttctcatccttataaaacaacttggtagaagatattaagttacattttctataagaacttaaaatatatcatatttgaggcagggcaccattttcttattcataccagctctttagagatcattcaaatgagaggctacatttttaatagtacttgggataaaaccgctctcattttttacattctgtttaatgcagatataaagtt

SEQ ID NO: 458599 - DNA, 9139 bp, Homo sapiens
  misc_feature (3)..(3): n is a, c, g, or t
cgnccctggagggagagagagccagagagcggccgagcgcctaggaggcccgccgagcctcgccgagccccgccagccccggcgcgagagaagttggagaggagagcagcgcagcgcagcgagtcccgtggtcgcgccccaacagcgcccgacagcccccgatagcccaaaccgcggccctagccccggccgcacccccagcccgcgccagcatgatgaacaacagcggctactcagacgccggcctcggcctgggcgatgagacagacgagatgccgtccacggagaaggacctggcggaggacgcgccgtggaagaagatccagcagaacacattcacgcgctggtgcaatgagcacctcaagtgcgtgggcaagcgcctgaccgacctgcagcgcgacctcagcgacgggctccggctcatcgcgctgctcgaggtgctcagccagaagcgcatgtaccgcaagttccatccgcgccccaacttccgccaaatgaagctggagaacgtgtccgtggccctcgagttcctcgagcgcgagcacatcaagctcgtgtccatagacagcaaggccatcgtggatgggaacctgaagctgatcctgggcctgatctggacgctgatcctgcactactccatctccatgcccatgtgggaggatgaagatgatgaggatgcccgcaaacagacgcccaagcagcggctgcttggctggatccagaacaaggtgccccagctgcccatcaccaacttcaaccgtgactggcaggacggcaaagctctgggcgccctggtggacaactgcgcccccggtctctgccccgactgggaggcctgggaccccaaccagcccgtggagaacgcccgggaggccatgcagcaggccgacgactggcttggggtgccccaggtcattgcccctgaggagattgtggaccccaacgtggatgagcattctgttatgacctacctgtcccagttccccaaggccaagctcaaacctggtgcccctgttcgatccaagcagctgaaccccaagaaagccatcgcctatgggcctggcatcgagccacagggcaacaccgtgctgcagcctgcccacttcaccgtgcagacggtggacgcgggcgtgggcgaggtgctggtctacatcgaggaccctgaaggccacaccgaggaggctaaggtggttcccaacaatgacaaggatcgcacctatgctgtctcctatgtgcccaaggtcgctgggttacacaaggtgaccgtgctctttgctggccagaacattgaacgcagtccctttgaggtgaacgtgggcatggccctgggagatgccaacaaggtgtcagcccgtggccctggcctggaacctgtgggcaatgtggccaacaaacccacctactttgacatctacactgcgggggccggcactggcgatgttgctgtggtgatcgtggacccacagggccggcgggacacagtggaggtggccctggaggacaagggtgacagcacgttccgctgcacatacagacctgccatggaggggccacataccgtgcatgtggcctttgcgggtgcccccatcacccgcagtcccttccctgtccatgtgtcggaagcctgtaaccccaacgcctgccgcgcctctgggcgaggcctgcagcccaagggtgttcgcgtgaaagaggtggctgacttcaaggtgtttaccaagggtgccggcagcggggagctcaaggtcacggtcaaggggccaaagggcacagaggagccagtgaaggtgcgggaggctggggatggtgtgttcgagtgcgagtactacccggtggtgcctgggaagtatgtggtgaccatcacgtggggcggctacgccatccctcgcagcccctttgaggtacaggtgagcccagaggcaggagtgcaaaaggtccgggcctggggtcctggtttggagactggccaggtgggcaagtcagccgattttgtggtggaagccattggcaccgaggtggggacactgggcttctccatcgaggggccctcacaagccaagatcgaatgtgacgacaagggggatggctcctgcgatgtgcggtactggcccacggagcctggggagtacgctgtgcacgtcatctgtgacgatgaggacatccgagactcacccttcattgcccacatcctgcccgccccacctgactgcttcccagataaggtgaaggcctttgggcctggcctggagcctaccggctgcatcgtggacaagcccgctgagttcaccattgatgctcgtgcagctggcaagggagacctgaagctctatgcccaggacgccgacggctgtcccatcgacatcaaggtgatccccaacggcgacggcaccttccgctgctcctacgtgcccaccaagcccattaagcacaccatcatcatctcctggggaggcgtaaacgtgcccaagagccccttccgggtgaacgtgggcgagggcagccaccccgagcgggtaaaggtgtacggccccggagtggagaagacaggcctcaaggccaatgagcccacctacttcacggtggactgcagcgaggcggggcaaggcgacgtgagcatcggcatcaagtgcgccccaggcgtggtgggccctgcagaggctgacattgacttcgacatcatcaagaatgacaacgacaccttcaccgtcaagtacacgccaccaggggcgggccgctacaccatcatggtgctgtttgccaaccaggagatccccgccagccccttccacatcaaggtggacccatcccacgatgccagcaaagtcaaggccgagggccctgggctgaatcgcacaggtgtggaagtcgggaagcccacccacttcacggtgctgaccaagggagccggcaaggccaagctggatgtgcagtttgcagggacagccaagggcgaggttgtgcgggactttgagatcatagacaaccatgactactcctacactgtcaagtacaccgctgtccagcagggcaacatggcagtgacagtgacttatggcggggaccctgtccccaagagcccctttgtggtgaatgtggcacccccgctggacctcagcaaaatcaaagttcagggccttaatagcaaggtggctgtgggacaggaacaagcattctctgtgaacacacgaggggctggcggtcagggccaactggatgtgcggatgacttcgccctctcgccggcccatcccctgcaagctggagccaggcggtggagcggaagcccaggctgtgcgctacatgcccccggaggaggggccctacaaggtggatatcacctacgatggtcacccggtgcctggcagcccgtttgctgtggagggtgtcctgccccctgatccctccaaggtctgtgcttatggcccgggtctcaagggtggactggtaggcacccccgcgccattctccatcgacaccaagggggctggcacaggtggcctggggctgaccgtagagggcccctgcgaggccaagatcgagtgccaggacaatggtgatggctcatgtgctgtcagctacctgcccacggagcctggcgagtacaccatcaacatcctgtttgctgaggcccacatccctggctcgcccttcaaagccaccattcggcctgtgtttgacccgagcaaggtgcgggccagtggaccgggcctggagcgcggcaaggtcggtgaggcagccaccttcactgtggactgctcagaggcaggcgaggcggagctgaccattgagatcctgtcggatgccggggtcaaggccgaggtgctgatccacaacaacgcggatggcacctaccacatcacctacagccctgccttccctggcacctacaccattaccatcaagtatggcgggcatcccgtgcccaaattccccacccgtgtccatgtgcagcctgcggtcgataccagtggcgtcaaggtctcagggcctggtgttgagccacacggtgtcctgcgggaggtgaccactgagttcactgtggatgcaagatccctaacagccacaggcggcaaccacgtgacggctcgtgtgctcaacccctcgggggccaagacagacacctatgtgacagacaatggggacggcacctaccgagtgcagtacaccgcctacgaggagggcgtgcatctggtggaggtcctgtatgatgaggtcgctgtgcccaagagccccttccgagtgggcgtgaccgagggctgtgatcccacccgcgtccgagccttcgggccaggcctggagggtggcttggtcaacaaggccaaccgattcactgtggagaccaggggagcgggcaccgggggccttggcctagccatcgagggtccctcggaagccaagatgtcctgcaaggacaacaaggatggtagctgcaccgtggagtacatccccttcactcctggagactatgacgtcaacatcaccttcggggggcggcccatcccagggagcccgttccgcgtgccagtgaaggatgtggtggaccctgggaaggtgaagtgctcagggccagggctgggggctggtgtcagggcccgggttcctcagaccttcacagtggactgcagtcaagctggccgggcgcccctgcaggtggctgtgctgggccccacaggtgtggccgagcctgtggaggtgcgggacaatggagatggcacccacactgtccactacaccccagccactgacgggccctacacggtagccgtcaagtatgctgaccaggaggtgccacgcagccccttcaagatcaaggtcctcccagctcatgatgccagcaaggtgcgggccagcggcccaggcctcaacgcctctggcatccctgccagcctgcctgtggagttcaccatcgacgcacgggacgcgggcgaggggttgctcactgtccagatcttggaccccgagggtaagcccaagaaggccaacatccgggacaatggggatggcacgtacactgtgtcctacctgccggacatgagtggccggtacaccatcaccatcaagtatggcggtgatgagatcccctactcgcccttccgcatccatgctctgcccactggggatgccagcaagtgcctcgtcacagtgtccattggaggccatggcctgggtgcctgcctgggccctcgaatccagattgggcaggagacggtgatcacggtggatgccaaggcagccggtgaggggaaggtgacatgcacggtgtccacgccggatggggcagagctcgatgtggatgtggttgagaaccatgacggtacctttgacatctactacacagcgcccgagccgggcaagtacgtcatcaccatccgcttcgggggtgagcacatccccaacagccccttccacgtgctggcgtgtgaccccctgccgcacgaggaggagccctctgaagtgccacagctgcgccagccctacgctcctccccggcccggcgcccgccccacacactgggccacagaggagccagtggtgcctgtggagccaatggagtccatgctgaggcccttcaacctggtcatccccttcgcggtgcagaaaggggagctcacaggagaggtgcggatgccctcggggaagacggcacggcccaacatcaccgacaacaaggacggcaccatcacggtgaggtatgcacccactgagaaaggcctgcaccagatggggatcaagtatgacggcaaccacatccctgggagccccttacagttctatgtggatgccatcaacagccgccatgtcagtgcctatgggccaggcctgagccatggcatggtcaacaagccagccaccttcactattgtcaccaaagatgctggagaagggggtctgtcactggccgtggagggcccatccaaggcagagatcacctgtaaggacaacaaggatggcacctgcaccgtgtcctatctgccgactgcgcctggagactacagcatcatcgtgcgcttcgatgacaagcacatcccggggagccccttcacagccaagatcacaggtgatgactccatgaggacctcacagctgaatgtgggcacctccacggacgtgtcactgaagatcaccgagagtgatctgagccagctgaccgccagcatccgtgccccctcgggcaacgaggagccctgcctgctgaagcgcctgcccaaccggcacattgggatctccttcacccccaaggaggtcggggagcacgtggtgagcgtgcgcaagagtggcaagcatgtcaccaacagccccttcaagatcctggtggggccatctgagatcggggacgccagcaaggtgcgggtctggggcaaggggctttccgagggacacacattccaggtggcagagttcatcgtggacactcgcaatgcaggttatgggggcttggggctgagtattgaaggcccaagcaaggtggacatcaactgtgaggacatggaggacgggacatgcaaagtcacctactgccccaccgagcccggcacctacatcatcaacatcaagtttgctgacaagcacgtgcctggaagccccttcactgtgaaggtgaccggcgagggccgcatgaaggagagcatcacccggcggagacaggcaccttccatcgccaccatcggcagcacctgtgacctcaacctcaagatcccaggaaactggttccagatggtgtctgcccaggagcgcctgacacgcaccttcacacgcagcagccacacctacacccgcacggagcgcacggagatcagcaagacgcggggcggggagacaaagcgcgaggtgcgggtggaggagtccacccaggtcggcggggaccccttccctgctgtgtttggggacttcctgggccgggagcgcctgggatccttcggcagcatcacccggcagcaggagggtgaggccagctctcaggacatgactgcacaggtgaccagcccatcgggcaaggtggaagccgcagagatcgtcgagggcgaggacagcgcctacagcgtgcgctttgtgccccaggaaatggggccccatacggtcgctgtcaagtaccgtggccagcacgtgcccggcagcccctttcagttcactgtggggccgctgggtgaaggtggtgcccacaaggtgcgggccggaggcacagggctggagcgaggtgtggccggcgtgccagccgagttcagcatctggacccgggaggctggcgctgggggcctgtccattgctgtggagggtcctagcaaagcggagattgcatttgaggatcgcaaagatggctcctgcggcgtctcctatgtcgtccaggaaccaggtgactatgaggtctccatcaagttcaatgatgagcacatcccagacagcccctttgtggtgcctgtggcctccctctcggatgacgctcgccgtctcactgtcaccagcctccaggagacggggctcaaggtgaaccagccagcgtcctttgccgtgcagctgaacggtgcccggggcgtgattgatgcccgggtgcacacaccctcgggggctgtggaggagtgctacgtctctgagctggacagtgacaagcacaccatccgcttcatcccccacgagaatggcgtccactccatcgatgtcaagttcaacggtgcccacatccctggaagtcccttcaagatccgcgttggggagcagagccaggctggggacccaggcttggtgtcagcctacggtcctgggctcgagggaggcactaccggtgtgtcatcagagttcatcgtgaacaccctgaatgccggctcgggggccttgtctgtcaccattgatggcccctccaaggtgcagctggactgtcgggagtgtcctgagggccatgtggtcacttatactcccatggcccctggcaactacctcattgccatcaagtacggtggcccccagcacatcgtgggcagccccttcaaggccaaggtcactggtccgaggctgtccggaggccacagccttcacgaaacatccacggttctggtggagactgtgaccaagtcctcctcaagccggggctccagctacagctccatccccaagttctcctcagatgccagcaaggtggtgactcggggccctgggctgtcccaggccttcgtgggccagaagaactccttcaccgtggactgcagcaaagcaggcaccaacatgatgatggtgggcgtgcacggccccaagaccccctgtgaggaggtgtacgtgaagcacatggggaaccgggtgtacaatgtcacctacactgtcaaggagaaaggggactacatcctcattgtcaagtggggtgacgaaagtgtccctggaagccccttcaaagtcaaggtcccttgaatcccaaaagtgcctccccagcctcagcccccacctccagccacacacacattacacacacacacacacacacacaaatgtgccacacccagacacgcacagaatcagacactacaaacacctgccttgggggtgaagtgaaggcccagcctccccaccccaccgcgccccaggggttggaggaccttgtctgtgtcaggacagtgtccctccctgggaatgtgacatgagggccgactggggccaggctcaggggcagaggctgggacacaaggggctggcgagggctgcgaggccagggaagccctgagtttctggcggggctgagcagtgggggagcattgtgttgtgggtgtctgtgtgtgaggtcaccctcaaactgcaccgccggccagataccctcctgaccccgaggacttggtctggtctctctggtggctacaaccccagagttttaaggacttggaaaggaaagcacaatcagagaagaaaacagcccccgaaccagcaggagtggcctggcacatggaccggcctgagcgatgtgcactccacccaagccaggctcccagggggcctgatttctctctcactgtctctttttttaaaatggttgcacggctctgccccatggggggccttttttacacactgcgaggcccagctttctaggggacttttgcacatgtcatgcagctcagctgggagctgcttaggtggaaaactccaaataaagtgcggctgtcgca

SEQ ID NO: 458600 - DNA, 9355 bp, Homo sapiens
  misc_feature (3)..(3): n is a, c, g, or t
cgnccctggagggagagagagccagagagcggccgagcgcctaggaggcccgccgagcctcgccgagccccgccagccccggcgcgagagaagttggagaggagagcagcgcagcgcagcgagtcccgtggtcgcgccccaacagcgcccgacagcccccgatagcccaaaccgcggccctagccccggccgcacccccagcccgcgccagcatgatgaacaacagcggctactcagacgccggcctcggcctgggcgatgagacagacgagatgccgtccacggagaaggacctggcggaggacgcgccgtggaagaagatccagcagaacacattcacgcgctggtgcaatgagcacctcaagtgcgtgggcaagcgcctgaccgacctgcagcgcgacctcagcgacgggctccggctcatcgcgctgctcgaggtgctcagccagaagcgcatgtaccgcaagttccatccgcgccccaacttccgccaaatgaagctggagaacgtgtccgtggccctcgagttcctcgagcgcgagcacatcaagctcgtgtccatagacagcaaggccatcgtggatgggaacctgaagctgatcctgggcctgatctggacgctgatcctgcactactccatctccatgcccatgtgggaggatgaagatgatgaggatgcccgcaaacagacgcccaagcagcggctgcttggctggatccagaacaaggtgccccagctgcccatcaccaacttcaaccgtgactggcaggacggcaaagctctgggcgccctggtggacaactgcgcccccggtctctgccccgactgggaggcctgggaccccaaccagcccgtggagaacgcccgggaggccatgcagcaggccgacgactggcttggggtgccccaggtcattgcccctgaggagattgtggaccccaacgtggatgagcattctgttatgacctacctgtcccagttccccaaggccaagctcaaacctggtgcccctgttcgatccaagcagctgaaccccaagaaagccatcgcctatgggcctggcatcgagccacagggcaacaccgtgctgcagcctgcccacttcaccgtgcagacggtggacgcgggcgtgggcgaggtgctggtctacatcgaggaccctgaaggccacaccgaggaggctaaggtggttcccaacaatgacaaggatcgcacctatgctgtctcctatgtgcccaaggtcgctgggttacacaaggtgaccgtgctctttgctggccagaacattgaacgcagtccctttgaggtgaacgtgggcatggccctgggagatgccaacaaggtgtcagcccgtggccctggcctggaacctgtgggcaatgtggccaacaaacccacctactttgacatctacactgcgggggccggcactggcgatgttgctgtggtgatcgtggacccacagggccggcgggacacagtggaggtggccctggaggacaagggtgacagcacgttccgctgcacatacagacctgccatggaggggccacataccgtgcatgtggcctttgcgggtgcccccatcacccgcagtcccttccctgtccatgtgtcggaagcctgtaaccccaacgcctgccgcgcctctgggcgaggcctgcagcccaagggtgttcgcgtgaaagaggtggctgacttcaaggtgtttaccaagggtgccggcagcggggagctcaaggtcacggtcaaggggccaaagggcacagaggagccagtgaaggtgcgggaggctggggatggtgtgttcgagtgcgagtactacccggtggtgcctgggaagtatgtggtgaccatcacgtggggcggctacgccatccctcgcagcccctttgaggtacaggtgagcccagaggcaggagtgcaaaaggtccgggcctggggtcctggtttggagactggccaggtgggcaagtcagccgattttgtggtggaagccattggcaccgaggtggggacactgggcttctccatcgaggggccctcacaagccaagatcgaatgtgacgacaagggggatggctcctgcgatgtgcggtactggcccacggagcctggggagtacgctgtgcacgtcatctgtgacgatgaggacatccgagactcacccttcattgcccacatcctgcccgccccacctgactgcttcccagataaggtgaaggcctttgggcctggcctggagcctaccggctgcatcgtggacaagcccgctgagttcaccattgatgctcgtgcagctggcaagggagacctgaagctctatgcccaggacgccgacggctgtcccatcgacatcaaggtgatccccaacggcgacggcaccttccgctgctcctacgtgcccaccaagcccattaagcacaccatcatcatctcctggggaggcgtaaacgtgcccaagagccccttccgggtgaacgtgggcgagggcagccaccccgagcgggtaaaggtgtacggccccggagtggagaagacaggcctcaaggccaatgagcccacctacttcacggtggactgcagcgaggcggggcaaggcgacgtgagcatcggcatcaagtgcgccccaggcgtggtgggccctgcagaggctgacattgacttcgacatcatcaagaatgacaacgacaccttcaccgtcaagtacacgccaccaggggcgggccgctacaccatcatggtgctgtttgccaaccaggagatccccgccagccccttccacatcaaggtggacccatcccacgatgccagcaaagtcaaggccgagggccctgggctgaatcgcacaggtgtggaagtcgggaagcccacccacttcacggtgctgaccaagggagccggcaaggccaagctggatgtgcagtttgcagggacagccaagggcgaggttgtgcgggactttgagatcatagacaaccatgactactcctacactgtcaagtacaccgctgtccagcagggcaacatggcagtgacagtgacttatggcggggaccctgtccccaagagcccctttgtggtgaatgtggcacccccgctggacctcagcaaaatcaaagttcagggccttaatagcaaggtggctgtgggacaggaacaagcattctctgtgaacacacgaggggctggcggtcagggccaactggatgtgcggatgacttcgccctctcgccggcccatcccctgcaagctggagccaggcggtggagcggaagcccaggctgtgcgctacatgcccccggaggaggggccctacaaggtggatatcacctacgatggtcacccggtgcctggcagcccgtttgctgtggagggtgtcctgccccctgatccctccaaggtctgtgcttatggcccgggtctcaagggtggactggtaggcacccccgcgccattctccatcgacaccaagggggctggcacaggtggcctggggctgaccgtagagggcccctgcgaggccaagatcgagtgccaggacaatggtgatggctcatgtgctgtcagctacctgcccacggagcctggcgagtacaccatcaacatcctgtttgctgaggcccacatccctggctcgcccttcaaagccaccattcggcctgtgtttgacccgagcaaggtgcgggccagtggaccgggcctggagcgcggcaaggtcggtgaggcagccaccttcactgtggactgctcagaggcaggcgaggcggagctgaccattgagatcctgtcggatgccggggtcaaggccgaggtgctgatccacaacaacgcggatggcacctaccacatcacctacagccctgccttccctggcacctacaccattaccatcaagtatggcgggcatcccgtgcccaaattccccacccgtgtccatgtgcagcctgcggtcgataccagtggcgtcaaggtctcagggcctggtgttgagccacacggtgtcctgcgggaggtgaccactgagttcactgtggatgcaagatccctaacagccacaggcggcaaccacgtgacggctcgtgtgctcaacccctcgggggccaagacagacacctatgtgacagacaatggggacggcacctaccgagtgcagtacaccgcctacgaggagggcgtgcatctggtggaggtcctgtatgatgaggtcgctgtgcccaagagccccttccgagtgggcgtgaccgagggctgtgatcccacccgcgtccgagccttcgggccaggcctggagggtggcttggtcaacaaggccaaccgattcactgtggagaccaggggagcgggcaccgggggccttggcctagccatcgagggtccctcggaagccaagatgtcctgcaaggacaacaaggatggtagctgcaccgtggagtacatccccttcactcctggagactatgacgtcaacatcaccttcggggggcggcccatcccagggagcccgttccgcgtgccagtgaaggatgtggtggaccctgggaaggtgaagtgctcagggccagggctgggggctggtgtcagggcccgggttcctcagaccttcacagtggactgcagtcaagctggccgggcgcccctgcaggtggctgtgctgggccccacaggtgtggccgagcctgtggaggtgcgggacaatggagatggcacccacactgtccactacaccccagccactgacgggccctacacggtagccgtcaagtatgctgaccaggaggtgccacgcagccccttcaagatcaaggtcctcccagctcatgatgccagcaaggtgcgggccagcggcccaggcctcaacgcctctggcatccctgccagcctgcctgtggagttcaccatcgacgcacgggacgcgggcgaggggttgctcactgtccagatcttggaccccgagggtaagcccaagaaggccaacatccgggacaatggggatggcacgtacactgtgtcctacctgccggacatgagtggccggtacaccatcaccatcaagtatggcggtgatgagatcccctactcgcccttccgcatccatgctctgcccactggggatgccagcaagtgcctcgtcacagtgtccattggaggccatggcctgggtgcctgcctgggccctcgaatccagattgggcaggagacggtgatcacggtggatgccaaggcagccggtgaggggaaggtgacatgcacggtgtccacgccggatggggcagagctcgatgtggatgtggttgagaaccatgacggtacctttgacatctactacacagcgcccgagccgggcaagtacgtcatcaccatccgcttcgggggtgagcacatccccaacagccccttccacgtgctggccacagaggagccagtggtgcctgtggagccaatggagtccatgctgaggcccttcaacctggtcatccccttcgcggtgcagaaaggggagctcacaggagaggtgcggatgccctcggggaagacggcacggcccaacatcaccgacaacaaggacggcaccatcacggtgaggtatgcacccactgagaaaggcctgcaccagatggggatcaagtatgacggcaaccacatccctgggagccccttacagttctatgtggatgccatcaacagccgccatgtcagtgcctatgggccaggcctgagccatggcatggtcaacaagccagccaccttcactattgtcaccaaagatgctggagaagggggtctgtcactggccgtggagggcccatccaaggcagagatcacctgtaaggacaacaaggatggcacctgcaccgtgtcctatctgccgactgcgcctggagactacagcatcatcgtgcgcttcgatgacaagcacatcccggggagccccttcacagccaagatcacaggtgatgactccatgaggacctcacagctgaatgtgggcacctccacggacgtgtcactgaagatcaccgagagtgatctgagccagctgaccgccagcatccgtgccccctcgggcaacgaggagccctgcctgctgaagcgcctgcccaaccggcacattgggatctccttcacccccaaggaggtcggggagcacgtggtgagcgtgcgcaagagtggcaagcatgtcaccaacagccccttcaagatcctggtggggccatctgagatcggggacgccagcaaggtgcgggtctggggcaaggggctttccgagggacacacattccaggtggcagagttcatcgtggacactcgcaatgcaggttatgggggcttggggctgagtattgaaggcccaagcaaggtggacatcaactgtgaggacatggaggacgggacatgcaaagtcacctactgccccaccgagcccggcacctacatcatcaacatcaagtttgctgacaagcacgtgcctggaagccccttcactgtgaaggtgaccggcgagggccgcatgaaggagagcatcacccggcggagacaggcaccttccatcgccaccatcggcagcacctgtgacctcaacctcaagatcccaggaaactggttccagatggtgtctgcccaggagcgcctgacacgcaccttcacacgcagcagccacacctacacccgcacggagcgcacggagatcagcaagacgcggggcggggagacaaagcgcgaggtgcgggtggaggagtccacccaggtcggcggggaccccttccctgctgtgtttggggacttcctgggccgggagcgcctgggatccttcggcagcatcacccggcagcaggagggtgaggccagctctcaggacatgactgcacaggtgaccagcccatcgggcaaggtggaagccgcagagatcgtcgagggcgaggacagcgcctacagcgtgcgctttgtgccccaggaaatggggccccatacggtcgctgtcaagtaccgtggccagcacgtgcccggcagcccctttcagttcactgtggggccgctgggtgaaggtggtgcccacaaggtgcgggccggaggcacagggctggagcgaggtgtggccggcgtgccagccgagttcagcatctggacccgggaggctggcgctgggggcctgtccattgctgtggagggtcctagcaaagcggagattgcatttgaggatcgcaaagatggctcctgcggcgtctcctatgtcgtccaggaaccaggtgactatgaggtctccatcaagttcaatgatgagcacatcccagacagcccctttgtggtgcctgtggcctccctctcggatgacgctcgccgtctcactgtcaccagcctccaggagacggggctcaaggtgaaccagccagcgtcctttgccgtgcagctgaacggtgcccggggcgtgattgatgcccgggtgcacacaccctcgggggctgtggaggagtgctacgtctctgagctggacagtgacaagcacaccatccgcttcatcccccacgagaatggcgtccactccatcgatgtcaagttcaacggtgcccacatccctggaagtcccttcaagatccgcgttggggagcagagccaggctggggacccaggcttggtgtcagcctacggtcctgggctcgagggaggcactaccggtgtgtcatcagagttcatcgtgaacaccctgaatgccggctcgggggccttgtctgtcaccattgatggcccctccaaggtgcagctggactgtcgggagtgtcctgagggccatgtggtcacttatactcccatggcccctggcaactacctcattgccatcaagtacggtggcccccagcacatcgtgggcagccccttcaaggccaaggtcactggtccgaggctgtccggaggccacagccttcacgaaacatccacggttctggtggagactgtgaccaagtcctcctcaagccggggctccagctacagctccatccccaagttctcctcagatgccagcaaggtggtgactcggggccctgggctgtcccaggccttcgtgggccagaagaactccttcaccgtggactgcagcaaagcaggcaccaacatgatgatggtgggcgtgcacggccccaagaccccctgtgaggaggtgtacgtgaagcacatggggaaccgggtgtacaatgtcacctacactgtcaaggagaaaggggactacatcctcattgtcaagtggggtgacgaaagtgtccctggaagccccttcaaagtcaaggtcccttgaatcccaaaagtgcctccccagcctcagcccccacctccagccacacacacattacacacacacacacacacacacaaatgtgccacacccagacacgcacagaatcagacactacaaacacctgccttgggggtgaagtgaaggcccagcctccccaccccaccgcgccccaggggttggaggaccttgtctgtgtcaggacagtgtccctccctgggaatgtgacatgagggccgactggggccaggctcaggggcagaggctgggacacaaggggctggcgagggctgcgaggccagggaagccctgagtttctggcggggctgagcagtgggggagcattgtgttgtgggtgtctgtgtgtgaggtcaccctcaaactgcaccgccggccagataccctcctgaccccgaggacttggtctggtctctctggtggctacaaccccagagttttaaggacttggaaaggaaagcacaatcagagaagaaaacagcccccgaaccagcaggagtggcctggcacatggaccggcctgagcgatgtgcactccacccaagccaggctcccagggggcctgatttctctctcactgtctctttttttaaaatggttgcacggctctgccccatggggggccttttttacacactgcgaggcccagctttctaggggacttttgcacatgtcatgcagctcagctgggagctgcttaggtggaaaactccaaataaagtgcggctgtcgcaaaaaaaaaaaaaagcaaaaaaaacaaaaaagggggggggggaaaaagaacccgcaggggcccaggctcagcggtccccgcttttggtcacacgggcccaaaggggaggcggaataaagcagcgcggcgggcgtacccggctgacggcacacggcctctggccttgggagacccccctgtgggtcctcggcacgccacaggttaggctggaaatacttaggataggtccaccctgccgcgaatcgcgatgatcgcacacgcagaaaggaagagagaacacaacggacacgcaggcacacagaacggtccgcacagt

SEQ ID NO: 458601 - DNA, 7621 bp, Homo sapiens
  misc_feature (3)..(3): n is a, c, g, or t
cgnccctggagggagagagagccagagagcggccgagcgcctaggaggcccgccgagcctcgccgagccccgccagccccggcgcgagagaagttggagaggagagcagcgcagcgcagcgagtcccgtggtcgcgccccaacagcgcccgacagcccccgatagcccaaaccgcggccctagccccggccgcacccccagcccgcgccagcatgatgaacaacagcggctactcagacgccggcctcggcctgggcgatgagacagacgagatgccgtccacggagaaggacctggcggaggacgcgccgtggaagaagatccagcagaacacattcacgcgctggtgcaatgagcacctcaagtgcgtgggcaagcgcctgaccgacctgcagcgcgacctcagcgacgggctccggctcatcgcgctgctcgaggtgctcagccagaagcgcatgtaccgcaagttccatccgcgccccaacttccgccaaatgaagctggagaacgtgtccgtggccctcgagttcctcgagcgcgagcacatcaagctcgtgtccatagacagcaaggccatcgtggatgggaacctgaagctgatcctgggcctgatctggacgctgatcctgcactactccatctccatgcccatgtgggaggatgaagatgatgaggatgcccgcaaacagacgcccaagcagcggctgcttggctggatccagaacaaggtgccccagctgcccatcaccaacttcaaccgtgactggcaggacggcaaagctctgggcgccctggtggacaactgcgcccccggtctctgccccgactgggaggcctgggaccccaaccagcccgtggagaacgcccgggaggccatgcagcaggccgacgactggcttggggtgccccaggtcattgcccctgaggagattgtggaccccaacgtggatgagcattctgttatgacctacctgtcccagttccccaaggccaagctcaaacctggtgcccctgttcgatccaagcagctgaaccccaagaaagccatcgcctatgggcctggcatcgagccacagggcaacaccgtgctgcagcctgcccacttcaccgtgcagacggtggacgcgggcgtgggcgaggtgctggtctacatcgaggaccctgaaggccacaccgaggaggctaaggtggttcccaacaatgacaaggatcgcacctatgctgtctcctatgtgcccaaggtcgctgggttacacaaggtgaccgtgctctttgctggccagaacattgaacgcagtccctttgaggtgaacgtgggcatggccctgggagatgccaacaaggtgtcagcccgtggccctggcctggaacctgtgggcaatgtggccaacaaacccacctactttgacatctacactgcgggggccggcactggcgatgttgctgtggtgatcgtggacccacagggccggcgggacacagtggaggtggccctggaggacaagggtgacagcacgttccgctgcacatacagacctgccatggaggggccacataccgtgcatgtggcctttgcgggtgcccccatcacccgcagtcccttccctgtccatgtgtcggaagcctgtaaccccaacgcctgccgcgcctctgggcgaggcctgcagcccaagggtgttcgcgtgaaagaggtggctgacttcaaggtgtttaccaagggtgccggcagcggggagctcaaggtcacggtcaaggggccaaagggcacagaggagccagtgaaggtgcgggaggctggggatggtgtgttcgagtgcgagtactacccggtggtgcctgggaagtatgtggtgaccatcacgtggggcggctacgccatccctcgcagcccctttgaggtacaggtgagcccagaggcaggagtgcaaaaggtccgggcctggggtcctggtttggagactggccaggtgggcaagtcagccgattttgtggtggaagccattggcaccgaggtggggacactgggcttctccatcgaggggccctcacaagccaagatcgaatgtgacgacaagggggatggctcctgcgatgtgcggtactggcccacggagcctggggagtacgctgtgcacgtcatctgtgacgatgaggacatccgagactcacccttcattgcccacatcctgcccgccccacctgactgcttcccagataaggtgaaggcctttgggcctggcctggagcctaccggctgcatcgtggacaagcccgctgagttcaccattgatgctcgtgcagctggcaagggagacctgaagctctatgcccaggacgccgacggctgtcccatcgacatcaaggtgatccccaacggcgacggcaccttccgctgctcctacgtgcccaccaagcccattaagcacaccatcatcatctcctggggaggcgtaaacgtgcccaagagccccttccgggtgaacgtgggcgagggcagccaccccgagcgggtaaaggtgtacggccccggagtggagaagacaggcctcaaggccaatgagcccacctacttcacggtggactgcagcgaggcggggcaaggcgacgtgagcatcggcatcaagtgcgccccaggcgtggtgggccctgcagaggctgacattgacttcgacatcatcaagaatgacaacgacaccttcaccgtcaagtacacgccaccaggggcgggccgctacaccatcatggtgctgtttgccaaccaggagatccccgccagccccttccacatcaaggtggacccatcccacgatgccagcaaagtcaaggccgagggccctgggctgaatcgcacaggtgtggaagtcgggaagcccacccacttcacggtgctgaccaagggagccggcaaggccaagctggatgtgcagtttgcagggacagccaagggcgaggttgtgcgggactttgagatcatagacaaccatgactactcctacactgtcaagtacaccgctgtccagcagggcaacatggcagtgacagtgacttatggcggggaccctgtccccaagagcccctttgtggtgaatgtggcacccccgctggacctcagcaaaatcaaagttcagggccttaatagcaaggtggctgtgggacaggaacaagcattctctgtgaacacacgaggggctggcggtcagggccaactggatgtgcggatgacttcgccctctcgccggcccatcccctgcaagctggagccaggcggtggagcggaagcccaggctgtgcgctacatgcccccggaggaggggccctacaaggtggatatcacctacgatggtcacccggtgcctggcagcccgtttgctgtggagggtgtcctgccccctgatccctccaaggtctgtgcttatggcccgggtctcaagggtggactggtaggcacccccgcgccattctccatcgacaccaagggggctggcacaggtggcctggggctgaccgtagagggcccctgcgaggccaagatcgagtgccaggacaatggtgatggctcatgtgctgtcagctacctgcccacggagcctggcgagtacaccatcaacatcctgtttgctgaggcccacatccctggctcgcccttcaaagccaccattcggcctgtgtttgacccgagcaaggtgcgggccagtggaccgggcctggagcgcggcaaggtcggtgaggcagccaccttcactgtggactgctcagaggcaggcgaggcggagctgaccattgagatcctgtcggatgccggggtcaaggccgaggtgctgatccacaacaacgcggatggcacctaccacatcacctacagccctgccttccctggcacctacaccattaccatcaagtatggcgggcatcccgtgcccaaattccccacccgtgtccatgtgcagcctgcggtcgataccagtggcgtcaaggtctcagggcctggtgttgagccacacggtgtcctgcgggaggtgaccactgagttcactgtggatgcaagatccctaacagccacaggcggcaaccacgtgacggctcgtgtgctcaacccctcgggggccaagacagacacctatgtgacagacaatggggacggcacctaccgagtgcagtacaccgcctacgaggagggcgtgcatctggtggaggtcctgtatgatgaggtcgctgtgcccaagagccccttccgagtgggcgtgaccgagggctgtgatcccacccgcgtccgagccttcgggccaggcctggagggtggcttggtcaacaaggccaaccgattcactgtggagaccaggggagcgggcaccgggggccttggcctagccatcgagggtccctcggaagccaagatgtcctgcaaggacaacaaggatggtagctgcaccgtggagtacatccccttcactcctggagactatgacgtcaacatcaccttcggggggcggcccatcccagggagcccgttccgcgtgccagtgaaggatgtggtggaccctgggaaggtgaagtgctcagggccagggctgggggctggtgtcagggcccgggttcctcagaccttcacagtggactgcagtcaagctggccgggcgcccctgcaggtggctgtgctgggccccacaggtgtggccgagcctgtggaggtgcgggacaatggagatggcacccacactgtccactacaccccagccactgacgggccctacacggtagccgtcaagtatgctgaccaggaggtgccacgcagccccttcaagatcaaggtcctcccagctcatgatgccagcaaggtgcgggccagcggcccaggcctcaacgcctctggcatccctgccagcctgcctgtggagttcaccatcgacgcacgggacgcgggcgaggggttgctcactgtccagatcttggaccccgagggtaagcccaagaaggccaacatccgggacaatggggatggcacgtacactgtgtcctacctgccggacatgagtggccggtacaccatcaccatcaagtatggcggtgatgagatcccctactcgcccttccgcatgaaggagagcatcacccggcggagacaggcaccttccatcgccaccatcggcagcacctgtgacctcaacctcaagatcccaggaaactggttccagatggtgtctgcccaggagcgcctgacacgcaccttcacacgcagcagccacacctacacccgcacggagcgcacggagatcagcaagacgcggggcggggagacaaagcgcgaggtgcgggtggaggagtccacccaggtcggcggggaccccttccctgctgtgtttggggacttcctgggccgggagcgcctgggatccttcggcagcatcacccggcagcaggagggtgaggccagctctcaggacatgactgcacaggtgaccagcccatcgggcaaggtggaagccgcagagatcgtcgagggcgaggacagcgcctacagcgtgcgctttgtgccccaggaaatggggccccatacggtcgctgtcaagtaccgtggccagcacgtgcccggcagcccctttcagttcactgtggggccgctgggtgaaggtggtgcccacaaggtgcgggccggaggcacagggctggagcgaggtgtggccggcgtgccagccgagttcagcatctggacccgggaggctggcgctgggggcctgtccattgctgtggagggtcctagcaaagcggagattgcatttgaggatcgcaaagatggctcctgcggcgtctcctatgtcgtccaggaaccaggtgactatgaggtctccatcaagttcaatgatgagcacatcccagacagcccctttgtggtgcctgtggcctccctctcggatgacgctcgccgtctcactgtcaccagcctccaggagacggggctcaaggtgaaccagccagcgtcctttgccgtgcagctgaacggtgcccggggcgtgattgatgcccgggtgcacacaccctcgggggctgtggaggagtgctacgtctctgagctggacagtgacaagcacaccatccgcttcatcccccacgagaatggcgtccactccatcgatgtcaagttcaacggtgcccacatccctggaagtcccttcaagatccgcgttggggagcagagccaggctggggacccaggcttggtgtcagcctacggtcctgggctcgagggaggcactaccggtgtgtcatcagagttcatcgtgaacaccctgaatgccggctcgggggccttgtctgtcaccattgatggcccctccaaggtgcagctggactgtcgggagtgtcctgagggccatgtggtcacttatactcccatggcccctggcaactacctcattgccatcaagtacggtggcccccagcacatcgtgggcagccccttcaaggccaaggtcactggtccgaggctgtccggaggccacagccttcacgaaacatccacggttctggtggagactgtgaccaagtcctcctcaagccggggctccagctacagctccatccccaagttctcctcagatgccagcaaggtggtgactcggggccctgggctgtcccaggccttcgtgggccagaagaactccttcaccgtggactgcagcaaagcaggcaccaacatgatgatggtgggcgtgcacggccccaagaccccctgtgaggaggtgtacgtgaagcacatggggaaccgggtgtacaatgtcacctacactgtcaaggagaaaggggactacatcctcattgtcaagtggggtgacgaaagtgtccctggaagccccttcaaagtcaaggtcccttgaatcccaaaagtgcctccccagcctcagcccccacctccagccacacacacattacacacacacacacacacacacaaatgtgccacacccagacacgcacagaatcagacactacaaacacctgccttgggggtgaagtgaaggcccagcctccccaccccaccgcgccccaggggttggaggaccttgtctgtgtcaggacagtgtccctccctgggaatgtgacatgagggccgactggggccaggctcaggggcagaggctgggacacaaggggctggcgagggctgcgaggccagggaagccctgagtttctggcggggctgagcagtgggggagcattgtgttgtgggtgtctgtgtgtgaggtcaccctcaaactgcaccgccggccagataccctcctgaccccgaggacttggtctggtctctctggtggctacaaccccagagttttaaggacttggaaaggaaagcacaatcagagaagaaaacagcccccgaaccagcaggagtggcctggcacatggaccggcctgagcgatgtgcactccacccaagccaggctcccagggggcctgatttctctctcactgtctctttttttaaaatggttgcacggctctgccccatggggggccttttttacacactgcgaggcccagctttctaggggacttttgcacatgtcatgcagctcagctgggagctgcttaggtggaaaactccaaataaagtgcggctgtcgca

SEQ ID NO: 458602 - DNA, 2466 bp, Homo sapiens
cggacgcgtgggcgaccacgcgtgaaactggttccagatggtgtctgcccaggagcgcctgacacgcaccttcacacgcagcagccacacctacacccgcacggagcgcacggagatcagcaagacgcggggcggggagacaaagcgcgaggtgcgggtggaggagtccacccaggtcggcggggaccccttccctgctgtgtttggggacttcctgggccgggagcgcctgggatccttcggcagcatcacccggcagcaggagggtgaggccagctctcaggacatgactgcacaggtgaccagcccatcgggcaaggtggaagccgcagagatcgtcgagggcgaggacagcgcctacagcgtgcgctttgtgccccaggaaatggggccccatacggtcgctgtcaagtaccgtggccagcacgtgcccggcagcccctttcagttcactgtggggccgctgggtgaaggtggtgcccacaaggtgcgggccggaggcacagggctggagcgaggtgtggccggcgtgccagccgagttcagcatctggacccgggaggctggcgctgggggcctgtccattgctgtggagggtcctagcaaagcggagattgcatttgaggatcgcaaagatggctcctgcggcgtctcctatgtcgtccaggaaccaggtgactatgaggtctccatcaagttcaatgatgagcacatcccagacagcccctttgtggtgcctgtggcctccctctcggatgacgctcgccgtctcactgtcaccagcctccaggagacggggctcaaggtgaaccagccagcgtcctttgccgtgcagctgaacggtgcccggggcgtgattgatgcccgggtgcacacaccctcgggggctgtggaggagtgctacgtctctgagctggacagtgacaagcacaccatccgcttcatcccccacgagaatggcgtccactccatcgatgtcaagttcaacggtgcccacatccctggaagtcccttcaagatccgcgttggggagcagagccaggctggggacccaggcttggtgtcagcctacggtcctgggctcgagggaggcactaccggtgtgtcatcagagttcatcgtgaacaccctgaatgccggctcgggggccttgtctgtcaccattgatggcccctccaaggtgcagctggactgtcgggagtgtcctgagggccatgtggtcacttatactcccatggcccctggcaactacctcattgccatcaagtacggtggcccccagcacatcgtgggcagccccttcaaggccaaggtcactggtccgaggctgtccggaggccacagccttcacgaaacatccacggttctggtggagactgtgaccaagtcctcctcaagccggggctccagctacagctccatccccaagttctcctcagatgccagcaaggtggtgactcggggccctgggctgtcccaggccttcgtgggccagaagaactccttcaccgtggactgcagcaaagcaggcaccaacatgatgatggtgggcgtgcacggccccaagaccccctgtgaggaggtgtacgtgaagcacatggggaaccgggtgtacaatgtcacctacactgtcaaggagaaaggggactacatcctcattgtcaagtggggtgacgaaagtgtccctggaagccccttcaaagtcaaggtcccttgaatcccaaaagtgcctccccagcctcagcccccacctccagccacacacacattacacacacacacacacacacacaaatgtgccacacccagacacgcacagaatcagacactacaaacacctgccttgggggtgaagtgaaggcccagcctccccaccccaccgcgccccaggggttggaggaccttgtctgtgtcaggacagtgtccctccctgggaatgtgacatgagggccgactggggccaggctcaggggcagaggctgggacacaaggggctggcgagggctgcgaggccagggaagccctgagtttctggcggggctgagcagtgggggagcattgtgttgtgggtgtctgtgtgtgaggtcaccctcaaactgcaccgccggccagataccctcctgaccccgaggacttggtctggtctctctggtggctacaaccccagagttttaaggacttggaaaggaaagcacaatcagagaagaaaacagcccccgaaccagcaggagtggcctggcacatggaccggcctgagcgatgtgcactccacccaagccaggctcccagggggcctgatttctctctcactgtctctttttttaaaatggttgcacggctctgccccatggggggccttttttacacactgcgaggcccagctttctaggggacttttgcacatgtcatgcagctcagctgggagctgcttaggtggaaaactccaaataaagtgcggctgtcgca

SEQ ID NO: 458603 - DNA, 8266 bp, Homo sapiens
  misc_feature (3)..(3): n is a, c, g, or t
cgnccctggagggagagagagccagagagcggccgagcgcctaggaggcccgccgagcctcgccgagccccgccagccccggcgcgagagaagttggagaggagagcagcgcagcgcagcgagtcccgtggtcgcgccccaacagcgcccgacagcccccgatagcccaaaccgcggccctagccccggccgcacccccagcccgcgccagcatgatgaacaacagcggctactcagacgccggcctcggcctgggcgatgagacagacgagatgccgtccacggagaaggacctggcggaggacgcgccgtggaagaagatccagcagaacacattcacgcgctggtgcaatgagcacctcaagtgcgtgggcaagcgcctgaccgacctgcagcgcgacctcagcgacgggctccggctcatcgcgctgctcgaggtgctcagccagaagcgcatgtaccgcaagttccatccgcgccccaacttccgccaaatgaagctggagaacgtgtccgtggccctcgagttcctcgagcgcgagcacatcaagctcgtgtccatagacagcaaggccatcgtggatgggaacctgaagctgatcctgggcctgatctggacgctgatcctgcactactccatctccatgcccatgtgggaggatgaagatgatgaggatgcccgcaaacagacgcccaagcagcggctgcttggctggatccagaacaaggtgccccagctgcccatcaccaacttcaaccgtgactggcaggacggcaaagctctgggcgccctggtggacaactgcgcccccggtctctgccccgactgggaggcctgggaccccaaccagcccgtggagaacgcccgggaggccatgcagcaggccgacgactggcttggggtgccccaggtcattgcccctgaggagattgtggaccccaacgtggatgagcattctgttatgacctacctgtcccagttccccaaggccaagctcaaacctggtgcccctgttcgatccaagcagctgaaccccaagaaagccatcgcctatgggcctggcatcgagccacagggcaacaccgtgctgcagcctgcccacttcaccgtgcagacggtggacgcgggcgtgggcgaggtgctggtctacatcgaggaccctgaaggccacaccgaggaggctaaggtggttcccaacaatgacaaggatcgcacctatgctgtctcctatgtgcccaaggtcgctgggttacacaaggtgaccgtgctctttgctggccagaacattgaacgcagtccctttgaggtgaacgtgggcatggccctgggagatgccaacaaggtgtcagcccgtggccctggcctggaacctgtgggcaatgtggccaacaaacccacctactttgacatctacactgcgggggccggcactggcgatgttgctgtggtgatcgtggacccacagggccggcgggacacagtggaggtggccctggaggacaagggtgacagcacgttccgctgcacatacagacctgccatggaggggccacataccgtgcatgtggcctttgcgggtgcccccatcacccgcagtcccttccctgtccatgtgtcggaagcctgtaaccccaacgcctgccgcgcctctgggcgaggcctgcagcccaagggtgttcgcgtgaaagaggtggctgacttcaaggtgtttaccaagggtgccggcagcggggagctcaaggtcacggtcaaggggccaaagggcacagaggagccagtgaaggtgcgggaggctggggatggtgtgttcgagtgcgagtactacccggtggtgcctgggaagtatgtggtgaccatcacgtggggcggctacgccatccctcgcagcccctttgaggtacaggtgagcccagaggcaggagtgcaaaaggtccgggcctggggtcctggtttggagactggccaggtgggcaagtcagccgattttgtggtggaagccattggcaccgaggtggggacactgggcttctccatcgaggggccctcacaagccaagatcgaatgtgacgacaagggggatggctcctgcgatgtgcggtactggcccacggagcctggggagtacgctgtgcacgtcatctgtgacgatgaggacatccgagactcacccttcattgcccacatcctgcccgccccacctgactgcttcccagataaggtgaaggcctttgggcctggcctggagcctaccggctgcatcgtggacaagcccgctgagttcaccattgatgctcgtgcagctggcaagggagacctgaagctctatgcccaggacgccgacggctgtcccatcgacatcaaggtgatccccaacggcgacggcaccttccgctgctcctacgtgcccaccaagcccattaagcacaccatcatcatctcctggggaggcgtaaacgtgcccaagagccccttccgggtgaacgtgggcgagggcagccaccccgagcgggtaaaggtgtacggccccggagtggagaagacaggcctcaaggccaatgagcccacctacttcacggtggactgcagcgaggcggggcaaggcgacgtgagcatcggcatcaagtgcgccccaggcgtggtgggccctgcagaggctgacattgacttcgacatcatcaagaatgacaacgacaccttcaccgtcaagtacacgccaccaggggcgggccgctacaccatcatggtgctgtttgccaaccaggagatccccgccagccccttccacatcaaggtggacccatcccacgatgccagcaaagtcaaggccgagggccctgggctgaatcgcacaggtgtggaagtcgggaagcccacccacttcacggtgctgaccaagggagccggcaaggccaagctggatgtgcagtttgcagggacagccaagggcgaggttgtgcgggactttgagatcatagacaaccatgactactcctacactgtcaagtacaccgctgtccagcagggcaacatggcagtgacagtgacttatggcggggaccctgtccccaagagcccctttgtggtgaatgtggcacccccgctggacctcagcaaaatcaaagttcagggccttaatagcaaggtggctgtgggacaggaacaagcattctctgtgaacacacgaggggctggcggtcagggccaactggatgtgcggatgacttcgccctctcgccggcccatcccctgcaagctggagccaggcggtggagcggaagcccaggctgtgcgctacatgcccccggaggaggggccctacaaggtggatatcacctacgatggtcacccggtgcctggcagcccgtttgctgtggagggtgtcctgccccctgatccctccaaggtctgtgcttatggcccgggtctcaagggtggactggtaggcacccccgcgccattctccatcgacaccaagggggctggcacaggtggcctggggctgaccgtagagggcccctgcgaggccaagatcgagtgccaggacaatggtgatggctcatgtgctgtcagctacctgcccacggagcctggcgagtacaccatcaacatcctgtttgctgaggcccacatccctggctcgcccttcaaagccaccattcggcctgtgtttgacccgagcaaggtgcgggccagtggaccgggcctggagcgcggcaaggtcggtgaggcagccaccttcactgtggactgctcagaggcaggcgaggcggagctgaccattgagatcctgtcggatgccggggtcaaggccgaggtgctgatccacaacaacgcggatggcacctaccacatcacctacagccctgccttccctggcacctacaccattaccatcaagtatggcgggcatcccgtgcccaaattccccacccgtgtccatgtgcagcctgcggtcgataccagtggcgtcaaggtctcagggcctggtgttgagccacacggtgtcctgcgggaggtgaccactgagttcactgtggatgcaagatccctaacagccacaggcggcaaccacgtgacggctcgtgtgctcaacccctcgggggccaagacagacacctatgtgacagacaatggggacggcacctaccgagtgcagtacaccgcctacgaggagggcgtgcatctggtggaggtcctgtatgatgaggtcgctgtgcccaagagccccttccgagtgggcgtgaccgagggctgtgatcccacccgcgtccgagccttcgggccaggcctggagggtggcttggtcaacaaggccaaccgattcactgtggagaccaggggagcgggcaccgggggccttggcctagccatcgagggtccctcggaagccaagatgtcctgcaaggacaacaaggatggtagctgcaccgtggagtacatccccttcactcctggagactatgacgtcaacatcaccttcggggggcggcccatcccagggagcccgttccgcgtgccagtgaaggatgtggtggaccctgggaaggtgaagtgctcagggccagggctgggggctggtgtcagggcccgggttcctcagaccttcacagtggactgcagtcaagctggccgggcgcccctgcaggtggctgtgctgggccccacaggtgtggccgagcctgtggaggtgcgggacaatggagatggcacccacactgtccactacaccccagccactgacgggccctacacggtagccgtcaagtatgctgaccaggaggtgccacgcagccccttcaagatcaaggtcctcccagctcatgatgccagcaaggtgcgggccagcggcccaggcctcaacgcctctggcatccctgccagcctgcctgtggagttcaccatcgacgcacgggacgcgggcgaggggttgctcactgtccagatcttggaccccgagggtaagcccaagaaggccaacatccgggacaatggggatggcacgtacactgtgtcctacctgccggacatgagtggccggtacaccatcaccatcaagtatggcggtgatgagatcccctactcgcccttccgcatccatgctctgcccactggggatgccagcaagtgcctcgtcacagtgtccattggaggccatggcctgggtgcctgcctgggccctcgaatccagattgggcaggagacggtgatcacggtggatgccaaggcagccggtgaggggaaggtgacatgcacggtgtccacgccggatggggcagagctcgatgtggatgtggttgagaaccatgacggtacctttgacatctactacacagcgcccgagccgggcaagtacgtcatcaccatccgcttcgggggtgagcacatccccaacagccccttccacgtgctggccacagaggagccagtggtgcctgtggagccaatggagtccatgctgaggcccttcaacctggtcatccccttcgcggtgcagaaaggggagctcacaggagaggtgcggatgccctcggggaagacggcacggcccaacatcaccgacaacaaggacggcaccatcacggtgaggtatgcacccactgagaaaggcctgcaccagatggggatcaagtatgacggcaaccacatccctgggagccccttacagttctatgtggatgccatcaacagccgccatgtcagtgcctatgggccaggcctgagccatggcatggtcaacaagccagccaccttcactattgtcaccaaagatgctggagaagggggtctgtcactggccgtggagggcccatccaaggcagagatcacctgtaaggacaacaaggatggcacctgcaccgtgtcctatctgccgactgcgcctggagactacagcatcatcgtgcgcttcgatgacaagcacatcccggggagccccttcacagccaagatcacaggtgatgactccatgaggacctcacagctgaatgtgggcacctccacggacgtgtcactgaagatcaccgagagtgatctgagccagctgaccgccagcatccgtgccccctcgggcaacgaggagccctgcctgctgaagcgcctgcccaaccggcacattgggatctccttcacccccaaggaggtcggggagcacgtggtgagcgtgcgcaagagtggcaagcatgtcaccaacagccccttcaagatcctggtggggccatctgagatcggggacgccagcaaggtgcgggtctggggcaaggggctttccgagggacacacattccaggtggcagagttcatcgtggacactcgcaatgcaggttatgggggcttggggctgagtattgaaggcccaagcaaggtggacatcaactgtgaggacatggaggacgggacatgcaaagtcacctactgccccaccgagcccggcacctacatcatcaacatcaagtttgctgacaagcacgtgcctggaagccccttcactgtgaaggtgaccggcgagggccgcatgaaggagagcatcacccggcggagacaggcaccttccatcgccaccatcggcagcacctgtgacctcaacctcaagatcccaggaaactggttccagatggtgtctgcccaggagcgcctgacacgcaccttcacacgcagcagccacacctacacccgcacggagcgcacggagatcagcaagacgcggggcggggagacaaagcgcgaggtgcgggtggaggagtccacccaggtcggcggggaccccttccctgctgtgtttggggacttcctgggccgggagcgcctgggatccttcggcagcatcacccggcagcaggagggtgaggccagctctcaggacatgactgcacaggtgaccagcccatcgggcaaggtggaagccgcagagatcgtcgagggcgaggacagcgcctacagcgtgcgctttgtgccccaggaaatggggccccatacggtcgctgtcaagtaccgtggccagcacgtgcccggcagcccctttcagttcactgtggggccgctgggtgaaggtggtgcccacaaggtgcgggccggaggcacagggctggagcgaggtgtggccggcgtgccagccgagttcagcatctggacccgggaggctggcgctgggggcctgtccattgctgtggagggtcctagcaaagcggagattgcatttgaggatcgcaaagatggctcctgcggcgtctcctatgtcgtccaggaaccaggtgactatgaggtctccatcaagttcaatgatgagcacatcccagacagcccctttgtggtgcctgtggcctccctctcggatgacgctcgccgtctcactgtcaccagcctccaggagacggggctcaaggtgaaccagccagcgtcctttgccgtgcagctgaacggtgcccggggcgtgattgatgcccgggtgcacacaccctcgggggctgtggaggagtgctacgtctctgagctggacagtgacaagcacaccatccgcttcatcccccacgagaatggcgtccactccatcgatgtcaagttcaacggtgcccacatccctggaagtcccttcaagatccgcgttggggagcagagccaggctggggacccaggcttggtgtcagcctacggtcctgggctcgagggaggcactaccggtgtgtcatcagagttcatcgtgaacaccctgaatgccggctcgggggccttgtctgtcaccattgatggcccctccaaggtgcagctggactgtcgggagtgtcctgagggccatgtggtcacttatactcccatggcccctggcaactacctcattgccatcaagtacggtggcccccagcacatcgtgggcagccccttcaaggccaaggtcactggtccgaggctgtccggaggccacagccttcacgaaacatccttggtctggtctctctggtggctacaaccccagagttttaaggacttggaaaggaaagcacaatcagagaagaaaacagcccccgaaccagcaggagtggcctggcacatggaccggcctgagcgatgtgcactccacccaagccaggctcccagggggcctgatttctctctcactgtctctttttttaaaatggttgcacggctctgccccatggggggccttttttacacactgcgaggcccagctttctaggggacttttgcacatgtcatgcagctcagctgggagctgcttaggtggaaaactccaaataaagtgcggctgtcgca

SEQ ID NO: 458604 - DNA, 7707 bp, Homo sapiens
  misc_feature (3)..(3): n is a, c, g, or t
cgnccctggagggagagagagccagagagcggccgagcgcctaggaggcccgccgagcctcgccgagccccgccagccccggcgcgagagaagttggagaggagagcagcgcagcgcagcgagtcccgtggtcgcgccccaacagcgcccgacagcccccgatagcccaaaccgcggccctagccccggccgcacccccagcccgcgccagcatgatgaacaacagcggctactcagacgccggcctcggcctgggcgatgagacagacgagatgccgtccacggagaaggacctggcggaggacgcgccgtggaagaagatccagcagaacacattcacgcgctggtgcaatgagcacctcaagtgcgtgggcaagcgcctgaccgacctgcagcgcgacctcagcgacgggctccggctcatcgcgctgctcgaggtgctcagccagaagcgcatgtaccgcaagttccatccgcgccccaacttccgccaaatgaagctggagaacgtgtccgtggccctcgagttcctcgagcgcgagcacatcaagctcgtgtccatagacagcaaggccatcgtggatgggaacctgaagctgatcctgggcctgatctggacgctgatcctgcactactccatctccatgcccatgtgggaggatgaagatgatgaggatgcccgcaaacagacgcccaagcagcggctgcttggctggatccagaacaaggtgccccagctgcccatcaccaacttcaaccgtgactggcaggacggcaaagctctgggcgccctggtggacaactgcgcccccggtctctgccccgactgggaggcctgggaccccaaccagcccgtggagaacgcccgggaggccatgcagcaggccgacgactggcttggggtgccccaggtcattgcccctgaggagattgtggaccccaacgtggatgagcattctgttatgacctacctgtcccagttccccaaggccaagctcaaacctggtgcccctgttcgatccaagcagctgaaccccaagaaagccatcgcctatgggcctggcatcgagccacagggcaacaccgtgctgcagcctgcccacttcaccgtgcagacggtggacgcgggcgtgggcgaggtgctggtctacatcgaggaccctgaaggccacaccgaggaggctaaggtggttcccaacaatgacaaggatcgcacctatgctgtctcctatgtgcccaaggtcgctgggttacacaaggtgaccgtgctctttgctggccagaacattgaacgcagtccctttgaggtgaacgtgggcatggccctgggagatgccaacaaggtgtcagcccgtggccctggcctggaacctgtgggcaatgtggccaacaaacccacctactttgacatctacactgcgggggccggcactggcgatgttgctgtggtgatcgtggacccacagggccggcgggacacagtggaggtggccctggaggacaagggtgacagcacgttccgctgcacatacagacctgccatggaggggccacataccgtgcatgtggcctttgcgggtgcccccatcacccgcagtcccttccctgtccatgtgtcggaagcctgtaaccccaacgcctgccgcgcctctgggcgaggcctgcagcccaagggtgttcgcgtgaaagaggtggctgacttcaaggtgtttaccaagggtgccggcagcggggagctcaaggtcacggtcaaggggccaaagggcacagaggagccagtgaaggtgcgggaggctggggatggtgtgttcgagtgcgagtactacccggtggtgcctgggaagtatgtggtgaccatcacgtggggcggctacgccatccctcgcagcccctttgaggtacaggtgagcccagaggcaggagtgcaaaaggtccgggcctggggtcctggtttggagactggccaggtgggcaagtcagccgattttgtggtggaagccattggcaccgaggtggggacactgggcttctccatcgaggggccctcacaagccaagatcgaatgtgacgacaagggggatggctcctgcgatgtgcggtactggcccacggagcctggggagtacgctgtgcacgtcatctgtgacgatgaggacatccgagactcacccttcattgcccacatcctgcccgccccacctgactgcttcccagataaggtgaaggcctttgggcctggcctggagcctaccggctgcatcgtggacaagcccgctgagttcaccattgatgctcgtgcagctggcaagggagacctgaagctctatgcccaggacgccgacggctgtcccatcgacatcaaggtgatccccaacggcgacggcaccttccgctgctcctacgtgcccaccaagcccattaagcacaccatcatcatctcctggggaggcgtaaacgtgcccaagagccccttccgggtgaacgtgggcgagggcagccaccccgagcgggtaaaggtgtacggccccggagtggagaagacaggcctcaaggccaatgagcccacctacttcacggtggactgcagcgaggcggggcaaggcgacgtgagcatcggcatcaagtgcgccccaggcgtggtgggccctgcagaggctgacattgacttcgacatcatcaagaatgacaacgacaccttcaccgtcaagtacacgccaccaggggcgggccgctacaccatcatggtgctgtttgccaaccaggagatccccgccagccccttccacatcaaggtggacccatcccacgatgccagcaaagtcaaggccgagggccctgggctgaatcgcacaggtgtggaagtcgggaagcccacccacttcacggtgctgaccaagggagccggcaaggccaagctggatgtgcagtttgcagggacagccaagggcgaggttgtgcgggactttgagatcatagacaaccatgactactcctacactgtcaagtacaccgctgtccagcagggcaacatggcagtgacagtgacttatggcggggaccctgtccccaagagcccctttgtggtgaatgtggcacccccgctggacctcagcaaaatcaaagttcagggccttaatagcaaggtggctgtgggacaggaacaagcattctctgtgaacacacgaggggctggcggtcagggccaactggatgtgcggatgacttcgccctctcgccggcccatcccctgcaagctggagccaggcggtggagcggaagcccaggctgtgcgctacatgcccccggaggaggggccctacaaggtggatatcacctacgatggtcacccggtgcctggcagcccgtttgctgtggagggtgtcctgccccctgatccctccaaggtctgtgcttatggcccgggtctcaagggtggactggtaggcacccccgcgccattctccatcgacaccaagggggctggcacaggtggcctggggctgaccgtagagggcccctgcgaggccaagatcgagtgccaggacaatggtgatggctcatgtgctgtcagctacctgcccacggagcctggcgagtacaccatcaacatcctgtttgctgaggcccacatccctggctcgcccttcaaagccaccattcggcctgtgtttgacccgagcaaggtgcgggccagtggaccgggcctggagcgcggcaaggtcggtgaggcagccaccttcactgtggactgctcagaggcaggcgaggcggagctgaccattgagatcctgtcggatgccggggtcaaggccgaggtgctgatccacaacaacgcggatggcacctaccacatcacctacagccctgccttccctggcacctacaccattaccatcaagtatggcgggcatcccgtgcccaaattccccacccgtgtccatgtgcagcctgcggtcgataccagtggcgtcaaggtctcagggcctggtgttgagccacacggtgtcctgcgggaggtgaccactgagttcactgtggatgcaagatccctaacagccacaggcggcaaccacgtgacggctcgtgtgctcaacccctcgggggccaagacagacacctatgtgacagacaatggggacggcacctaccgagtgcagtacaccgcctacgaggagggcgtgcatctggtggaggtcctgtatgatgaggtcgctgtgcccaagagccccttccgagtgggcgtgaccgagggctgtgatcccacccgcgtccgagccttcgggccaggcctggagggtggcttggtcaacaaggccaaccgattcactgtggagaccaggggagcgggcaccgggggccttggcctagccatcgagggtccctcggaagccaagatgtcctgcaaggacaacaaggatggtagctgcaccgtggagtacatccccttcactcctggagactatgacgtcaacatcaccttcggggggcggcccatcccagggagcccgttccgcgtgccagtgaaggatgtggtggaccctgggaaggtgaagtgctcagggccagggctgggggctggtgtcagggcccgggttcctcagaccttcacagtggactgcagtcaagctggccgggcgcccctgcaggtggctgtgctgggccccacaggtgtggccgagcctgtggaggtgcgggacaatggagatggcacccacactgtccactacaccccagccactgacgggccctacacggtagccgtcaagtatgctgaccaggaggtgccacgcagccccttcaagatcaaggtcctcccagctcatgatgccagcaaggtgcgggccagcggcccaggcctcaacgcctctggcatccctgccagcctgcctgtggagttcaccatcgacgcacgggacgcgggcgaggggttgctcactgtccagatcttggaccccgagggtaagcccaagaaggccaacatccgggacaatggggatggcacgtacactgtgtcctacctgccggacatgagtggccggtacaccatcaccatcaagtatggcggtgatgagatcccctactcgcccttccgcatccatgctctgcccactggggatgccagcaagtgcctcgtcacagtgtccattggaggccatggcctgggtgcctgcctgggccctcgaatccagattgggcaggagacggtgatcacggtggatgccaaggcagccggtgaggggaaggtgacatgcacggtgtccacgccggatggggcagagctcgatgtggatgtggttgagaaccatgacggtacctttgacatctactacacagcgcccgagccgggcaagtacgtcatcaccatccgcttcgggggtgagcacatccccaacagccccttccacgtgctggccacagaggagccagtggtgcctgtggagccaatggagtccatgctgaggcccttcaacctggtcatccccttcgcggtgcagaaaggggagctcacaggagaggtgcggatgccctcggggaagacggcacggcccaacatcaccgacaacaaggacggcaccatcacggtgaggtatgcacccactgagaaaggcctgcaccagatggggatcaagtatgacggcaaccacatccctgggagccccttacagttctatgtggatgccatcaacagccgccatgtcagtgcctatgggccaggcctgagccatggcatggtcaacaagccagccaccttcactattgtcaccaaagatgctggagaagggggtctgtcactggccgtggagggcccatccaaggcagagatcacctgtaaggacaacaaggatggcacctgcaccgtgtcctatctgccgactgcgcctggagactacagcatcatcgtgcgcttcgatgacaagcacatcccggggagccccttcacagccaagatcacaggtgatgactccatgaggacctcacagctgaatgtgggcacctccacggacgtgtcactgaagatcaccgagagtgatctgagccagctgaccgccagcatccgtgccccctcgggcaacgaggagccctgcctgctgaagcgcctgcccaaccggcacattgggatctccttcacccccaaggaggtcggggagcacgtggtgagcgtgcgcaagagtggcaagcatgtcaccaacagccccttcaagatcctggtggggccatctgagatcggggacgccagcaaggtgcgggtctggggcaaggggctttccgagggacacacattccaggtggcagagttcatcgtggacactcgcaatgcaggttatgggggcttggggctgagtattgaaggcccaagcaaggtggacatcaactgtgaggacatggaggacgggacatgcaaagtcacctactgccccaccgagcccggcacctacatcatcaacatcaagtttgctgacaagcacgtgcctggaagccccttcactgtgaaggtgaccggcgagggccgcatgaaggagagcatcacccggcggagacaggcaccttccatcgccaccatcggcagcacctgtgacctcaacctcaagatcccaggaaactggttccagatggtgtctgcccaggagcgcctgacacgcaccttcacacgcagcagccacacctacacccgcacggagcgcacggagatcagcaagacgcggggcggggagacaaagcgcgaggtgcgggtggaggagtccacccaggtcggcggggaccccttccctgctgtgtttggggacttcctgggccgggagcgcctgggatccttcggcagcatcacccggcagcaggagggtgaggccagctctcaggacatgactgcacaggtgaccagcccatcgggcaaggtggaagccgcagagatcgtcgagggcgaggacagcgcctacagcgtgcgctttgtgccccaggaaatggggccccatacggtcgctgtcaagtaccgtggccagcacgtgcccggcagcccctttcagttcactgtggggccgctgggtgaaggtggtgcccacaaggtgcgggccggaggcacagggctggagcgaggtgtggccggcgtgccagccgagttcagcatctggacccgggaggctggcgctgggggcctgtccattgctgtggagggtcctagcaaagcggagattgcatttgaggatcgcaaagatggctcctgcggcgtctcctatgtcgtccaggaaccaggtgactatgaggtctccatcaagttcaatgatgagcacatcccagacagcccctttgtggtgcctgtggcctccctctcggatgacgctcgccgtctcactgtcaccagcctccaggagacggggctcaaggtgaaccagccagcgtcctttgccgtgcagctgaacggtgcccggggcgtgattgatgcccgggtgcacacaccctcgggggctgtggaggagtgctacgtctctgagctggacagtgacaagcacaccatccgcttcatcccccacgagaatggcgtccactccatcgatgtcaagttcaacggtgcccacatccctggaagtcccccatggggggccttttttacacactgcgaggcccagctttctaggggacttttgcacatgtcatgcagctcagctgggagctgcttaggtggaaaactccaaataaagtgcggctgtcgca

SEQ ID NO: 458605 - DNA, 2024 bp, Homo sapiens
  misc_feature (3)..(3): n is a, c, g, or t
cgnccctggagggagagagagccagagagcggccgagcgcctaggaggcccgccgagcctcgccgagccccgccagccccggcgcgagagaagttggagaggagagcagcgcagcgcagcgagtcccgtggtcgcgccccaacagcgcccgacagcccccgatagcccaaaccgcggccctagccccggccgcacccccagcccgcgccagcatgatgaacaacagcggctactcagacgccggcctcggcctgggcgatgagacagacgagatgccgtccacggagaaggacctggcggaggacgcgccgtggaagaagatccagcagaacacattcacgcgctggtgcaatgagcacctcaagtgcgtgggcaagcgcctgaccgacctgcagcgcgacctcagcgacgggctccggctcatcgcgctgctcgaggtgctcagccagaagcgcatgtaccgcaagttccatccgcgccccaacttccgccaaatgaagctggagaacgtgtccgtggccctcgagttcctcgagcgcgagcacatcaagctcgtgtccatagacagcaaggccatcgtggatgggaacctgaagctgatcctgggcctgatctggacgctgatcctgcactactccatctccatgcccatgtgggaggatgaagatgatgaggatgcccgcaaacagacgcccaagcagcggctgcttggctggatccagaacaaggtgccccagctgcccatcaccaacttcaaccgtgactggcaggacggcaaagctctgggcgccctggtggacaactgcgcccccggtctctgccccgactgggaggcctgggaccccaaccagcccgtggagaacgcccgggaggccatgcagcaggccgacgactggcttggggtgccccaggtcattgcccctgaggagattgtggaccccaacgtggatgagcattctgttatgacctacctgtcccagttccccaaggccaagctcaaacctggtgcccctgttcgatccaagcagctgaaccccaagaaagccatcgcctatgggcctggcatcgagccacagggcaacaccgtgctgcagcctgcccacttcaccgtgcagacggtggacgcgggcgtgggcgaggtgctggtctacatcgaggaccctgaaggccacaccgaggaggctaaggtggttcccaacaatgacaaggatcgcacctatgctgtctcctatgtgcccaaggtcgctgggttacacaaggtgaccgtgctctttgctggccagaacattgaacgcagtccctttgaggtgaacgtgggcatggccctgggagatgccaacaaggtgtcagcccgtggccctggcctggaacctgtgggcaatgtggccaacaaacccacctactttgacatctacactgcgggggccggcactggcgatgttgctgtggtgatcgtggacccacagggccggcgggacacagtggaggtggccctggaggacaagggtgacagcacgttccgctgcacatacagacctgccatggaggggccacataccgtgcatgtggcctttgcgggtgcccccatcacccgcagtcccttccctgtccatgtgtcggaagcctgtaaccccaacgcctgccgcgcctctgggcgaggcctgcagcccaagggtgttcgcgtgaaagaggtggctgacttcaaggtgtttaccaagggtgccggcagcggggagctcaaggtcacggtcaaggggccaaagggcacagaggagcctgccctgctcaggccttgcccccaaacctgtactgtcccggaggaggttgggaggtggaggcccagcatcccgcgcagatgacaccatcaaccgccagagtcccagacaccggttttcctagaagcccctcacccccactggcccactggtggctaggtctccccttatccttctggtccagcgcaaggaggggctgcttctgaggtcggtggctgtctttccattaaagaaacaccgtgcaacgtg

SEQ ID NO: 458606 - DNA, 276 bp, Homo sapiens
gggctttccgagggacacacattccaggtggcagagttcatcgtggacactcgcaatgcaggtacctcctgccccagagagcccccattccagcgggtgcctcccacaggcacttgtcctcgtcctgcccagcacccccttggccgcactctctcctccctgaaacttcctgaccagtctgcgtcaggattcgcattctggggccccttgcgggaaagtgaatggccccgcatcagttctctcccttttaagagaaagctcagctgtcctgagttt

SEQ ID NO: 458607 - DNA, 9040 bp, Homo sapiens
  misc_feature (3)..(3): n is a, c, g, or t
cgnccctggagggagagagagccagagagcggccgagcgcctaggaggcccgccgagcctcgccgagccccgccagccccggcgcgagagaagttggagaggagagcagcgcagcgcagcgagtcccgtggtcgcgccccaacagcgcccgacagcccccgatagcccaaaccgcggccctagccccggccgcacccccagcccgcgccagcatgatgaacaacagcggctactcagacgccggcctcggcctgggcgatgagacagacgagatgccgtccacggagaaggacctggcggaggacgcgccgtggaagaagatccagcagaacacattcacgcgctggtgcaatgagcacctcaagtgcgtgggcaagcgcctgaccgacctgcagcgcgacctcagcgacgggctccggctcatcgcgctgctcgaggtgctcagccagaagcgcatgtaccgcaagttccatccgcgccccaacttccgccaaatgaagctggagaacgtgtccgtggccctcgagttcctcgagcgcgagcacatcaagctcgtgtccatagacagcaaggccatcgtggatgggaacctgaagctgatcctgggcctgatctggacgctgatcctgcactactccatctccatgcccatgtgggaggatgaagatgatgaggatgcccgcaaacagacgcccaagcagcggctgcttggctggatccagaacaaggtgccccagctgcccatcaccaacttcaaccgtgactggcaggacggcaaagctctgggcgccctggtggacaactgcgcccccggtctctgccccgactgggaggcctgggaccccaaccagcccgtggagaacgcccgggaggccatgcagcaggccgacgactggcttggggtgccccaggtcattgcccctgaggagattgtggaccccaacgtggatgagcattctgttatgacctacctgtcccagttccccaaggccaagctcaaacctggtgcccctgttcgatccaagcagctgaaccccaagaaagccatcgcctatgggcctggcatcgagccacagggcaacaccgtgctgcagcctgcccacttcaccgtgcagacggtggacgcgggcgtgggcgaggtgctggtctacatcgaggaccctgaaggccacaccgaggaggctaaggtggttcccaacaatgacaaggatcgcacctatgctgtctcctatgtgcccaaggtcgctgggttacacaaggtgaccgtgctctttgctggccagaacattgaacgcagtccctttgaggtgaacgtgggcatggccctgggagatgccaacaaggtgtcagcccgtggccctggcctggaacctgtgggcaatgtggccaacaaacccacctactttgacatctacactgcgggggccggcactggcgatgttgctgtggtgatcgtggacccacagggccggcgggacacagtggaggtggccctggaggacaagggtgacagcacgttccgctgcacatacagacctgccatggaggggccacataccgtgcatgtggcctttgcgggtgcccccatcacccgcagtcccttccctgtccatgtgtcggaagcctgtaaccccaacgcctgccgcgcctctgggcgaggcctgcagcccaagggtgttcgcgtgaaagaggtggctgacttcaaggtgtttaccaagggtgccggcagcggggagctcaaggtcacggtcaaggggccaaagggcacagaggagccagtgaaggtgcgggaggctggggatggtgtgttcgagtgcgagtactacccggtggtgcctgggaagtatgtggtgaccatcacgtggggcggctacgccatccctcgcagcccctttgaggtacaggtgagcccagaggcaggagtgcaaaaggtccgggcctggggtcctggtttggagactggccaggtgggcaagtcagccgattttgtggtggaagccattggcaccgaggtggggacactgggcttctccatcgaggggccctcacaagccaagatcgaatgtgacgacaagggggatggctcctgcgatgtgcggtactggcccacggagcctggggagtacgctgtgcacgtcatctgtgacgatgaggacatccgagactcacccttcattgcccacatcctgcccgccccacctgactgcttcccagataaggtgaaggcctttgggcctggcctggagcctaccggctgcatcgtggacaagcccgctgagttcaccattgatgctcgtgcagctggcaagggagacctgaagctctatgcccaggacgccgacggctgtcccatcgacatcaaggtgatccccaacggcgacggcaccttccgctgctcctacgtgcccaccaagcccattaagcacaccatcatcatctcctggggaggcgtaaacgtgcccaagagccccttccgggtgaacgtgggcgagggcagccaccccgagcgggtaaaggtgtacggccccggagtggagaagacaggcctcaaggccaatgagcccacctacttcacggtggactgcagcgaggcggggcaaggcgacgtgagcatcggcatcaagtgcgccccaggcgtggtgggccctgcagaggctgacattgacttcgacatcatcaagaatgacaacgacaccttcaccgtcaagtacacgccaccaggggcgggccgctacaccatcatggtgctgtttgccaaccaggagatccccgccagccccttccacatcaaggtggacccatcccacgatgccagcaaagtcaaggccgagggccctgggctgaatcgcacaggtgtggaagtcgggaagcccacccacttcacggtgctgaccaagggagccggcaaggccaagctggatgtgcagtttgcagggacagccaagggcgaggttgtgcgggactttgagatcatagacaaccatgactactcctacactgtcaagtacaccgctgtccagcagggcaacatggcagtgacagtgacttatggcggggaccctgtccccaagagcccctttgtggtgaatgtggcacccccgctggacctcagcaaaatcaaagttcagggccttaatagcaaggtggctgtgggacaggaacaagcattctctgtgaacacacgaggggctggcggtcagggccaactggatgtgcggatgacttcgccctctcgccggcccatcccctgcaagctggagccaggcggtggagcggaagcccaggctgtgcgctacatgcccccggaggaggggccctacaaggtggatatcacctacgatggtcacccggtgcctggcagcccgtttgctgtggagggtgtcctgccccctgatccctccaaggtctgtgcttatggcccgggtctcaagggtggactggtaggcacccccgcgccattctccatcgacaccaagggggctggcacaggtggcctggggctgaccgtagagggcccctgcgaggccaagatcgagtgccaggacaatggtgatggctcatgtgctgtcagctacctgcccacggagcctggcgagtacaccatcaacatcctgtttgctgaggcccacatccctggctcgcccttcaaagccaccattcggcctgtgtttgacccgagcaaggtgcgggccagtggaccgggcctggagcgcggcaaggtcggtgaggcagccaccttcactgtggactgctcagaggcaggcgaggcggagctgaccattgagatcctgtcggatgccggggtcaaggccgaggtgctgatccacaacaacgcggatggcacctaccacatcacctacagccctgccttccctggcacctacaccattaccatcaagtatggcgggcatcccgtgcccaaattccccacccgtgtccatgtgcagcctgcggtcgataccagtggcgtcaaggtctcagggcctggtgttgagccacacggtgtcctgcgggaggtgaccactgagttcactgtggatgcaagatccctaacagccacaggcggcaaccacgtgacggctcgtgtgctcaacccctcgggggccaagacagacacctatgtgacagacaatggggacggcacctaccgagtgcagtacaccgcctacgaggagggcgtgcatctggtggaggtcctgtatgatgaggtcgctgtgcccaagagccccttccgagtgggcgtgaccgagggctgtgatcccacccgcgtccgagccttcgggccaggcctggagggtggcttggtcaacaaggccaaccgattcactgtggagaccaggggagcgggcaccgggggccttggcctagccatcgagggtccctcggaagccaagatgtcctgcaaggacaacaaggatggtagctgcaccgtggagtacatccccttcactcctggagactatgacgtcaacatcaccttcggggggcggcccatcccagggagcccgttccgcgtgccagtgaaggatgtggtggaccctgggaaggtgaagtgctcagggccagggctgggggctggtgtcagggcccgggttcctcagaccttcacagtggactgcagtcaagctggccgggcgcccctgcaggtggctgtgctgggccccacaggtgtggccgagcctgtggaggtgcgggacaatggagatggcacccacactgtccactacaccccagccactgacgggccctacacggtagccgtcaagtatgctgaccaggaggtgccacgcagccccttcaagatcaaggtcctcccagctcatgatgccagcaaggtgcgggccagcggcccaggcctcaacgcctctggcatccctgccagcctgcctgtggagttcaccatcgacgcacgggacgcgggcgaggggttgctcactgtccagatcttggaccccgagggtaagcccaagaaggccaacatccgggacaatggggatggcacgtacactgtgtcctacctgccggacatgagtggccggtacaccatcaccatcaagtatggcggtgatgagatcccctactcgcccttccgcatccatgctctgcccactggggatgccagcaagtgcctcgtcacagtgtccattggaggccatggcctgggtgcctgcctgggccctcgaatccagattgggcaggagacggtgatcacggtggatgccaaggcagccggtgaggggaaggtgacatgcacggtgtccacgccggatggggcagagctcgatgtggatgtggttgagaaccatgacggtacctttgacatctactacacagcgcccgagccgggcaagtacgtcatcaccatccgcttcgggggtgagcacatccccaacagccccttccacgtgctggccacagaggagccagtggtgcctgtggagccaatggagtccatgctgaggcccttcaacctggtcatccccttcgcggtgcagaaaggggagctcacaggagaggtgcggatgccctcggggaagacggcacggcccaacatcaccgacaacaaggacggcaccatcacggtgaggtatgcacccactgagaaaggcctgcaccagatggggatcaagtatgacggcaaccacatccctgggagccccttacagttctatgtggatgccatcaacagccgccatgtcagtgcctatgggccaggcctgagccatggcatggtcaacaagccagccaccttcactattgtcaccaaagatgctggagaagggggtctgtcactggccgtggagggcccatccaaggcagagatcacctgtaaggacaacaaggatggcacctgcaccgtgtcctatctgccgactgcgcctggagactacagcatcatcgtgcgcttcgatgacaagcacatcccggggagccccttcacagccaagatcacaggtgatgactccatgaggacctcacagctgaatgtgggcacctccacggacgtgtcactgaagatcaccgagagtgatctgagccagctgaccgccagcatccgtgccccctcgggcaacgaggagccctgcctgctgaagcgcctgcccaaccggcacattgggatctccttcacccccaaggaggtcggggagcacgtggtgagcgtgcgcaagagtggcaagcatgtcaccaacagccccttcaagatcctggtggggccatctgagatcggggacgccagcaaggtgcgggtctggggcaaggggctttccgagggacacacattccaggtggcagagttcatcgtggacactcgcaatgcaggttatgggggcttggggctgagtattgaaggcccaagcaaggtggacatcaactgtgaggacatggaggacgggacatgcaaagtcacctactgccccaccgagcccggcacctacatcatcaacatcaagtttgctgacaagcacgtgcctggaagccccttcactgtgaaggtgaccggcgagggccgcatgaaggagagcatcacccggcggagacaggcaccttccatcgccaccatcggcagcacctgtgacctcaacctcaagatcccaggaaactggttccagatggtgtctgcccaggagcgcctgacacgcaccttcacacgcagcagccacacctacacccgcacggagcgcacggagatcagcaagacgcggggcggggagacaaagcgcgaggtgcgggtggaggagtccacccaggtcggcggggaccccttccctgctgtgtttggggacttcctgggccgggagcgcctgggatccttcggcagcatcacccggcagcaggagggtgaggccagctctcaggacatgactgcacaggtgaccagcccatcgggcaaggtggaagccgcagagatcgtcgagggcgaggacagcgcctacagcgtgcgctttgtgccccaggaaatggggccccatacggtcgctgtcaagtaccgtggccagcacgtgcccggcagcccctttcagttcactgtggggccgctgggtgaaggtggtgcccacaaggtgcgggccggaggcacagggctggagcgaggtgtggccggcgtgccagccgagttcagcatctggacccgggaggctggcgctgggggcctgtccattgctgtggagggtcctagcaaagcggagattgcatttgaggatcgcaaagatggctcctgcggcgtctcctatgtcgtccaggaaccaggtgactatgaggtctccatcaagttcaatgatgagcacatcccagacagcccctttgtggtgcctgtggcctccctctcggatgacgctcgccgtctcactgtcaccagcctccaggagacggggctcaaggtgaaccagccagcgtcctttgccgtgcagctgaacggtgcccggggcgtgattgatgcccgggtgcacacaccctcgggggctgtggaggagtgctacgtctctgagctggacagtgacaagcacaccatccgcttcatcccccacgagaatggcgtccactccatcgatgtcaagttcaacggtgcccacatccctggaagtcccttcaagatccgcgttggggagcagagccaggctggggacccaggcttggtgtcagcctacggtcctgggctcgagggaggcactaccggtgtgtcatcagagttcatcgtgaacaccctgaatgccggctcgggggccttgtctgtcaccattgatggcccctccaaggtgcagctggactgtcgggagtgtcctgagggccatgtggtcacttatactcccatggcccctggcaactacctcattgccatcaagtacggtggcccccagcacatcgtgggcagccccttcaaggccaaggtcactggtccgaggctgtccggaggccacagccttcacgaaacatccacggttctggtggagactgtgaccaagtcctcctcaagccggggctccagctacagctccatccccaagttctcctcagatgccagcaaggtggtgactcggggccctgggctgtcccaggccttcgtgggccagaagaactccttcaccgtggactgcagcaaagcaggcaccaacatgatgatggtgggcgtgcacggccccaagaccccctgtgaggaggtgtacgtgaagcacatggggaaccgggtgtacaatgtcacctacactgtcaaggagaaaggggactacatcctcattgtcaagtggggtgacgaaagtgtccctggaagccccttcaaagtcaaggtcccttgaatcccaaaagtgcctccccagcctcagcccccacctccagccacacacacattacacacacacacacacacacacaaatgtgccacacccagacacgcacagaatcagacactacaaacacctgccttgggggtgaagtgaaggcccagcctccccaccccaccgcgccccaggggttggaggaccttgtctgtgtcaggacagtgtccctccctgggaatgtgacatgagggccgactggggccaggctcaggggcagaggctgggacacaaggggctggcgagggctgcgaggccagggaagccctgagtttctggcggggctgagcagtgggggagcattgtgttgtgggtgtctgtgtgtgaggtcaccctcaaactgcaccgccggccagataccctcctgaccccgaggacttggtctggtctctctggtggctacaaccccagagttttaaggacttggaaaggaaagcacaatcagagaagaaaacagcccccgaaccagcaggagtggcctggcacatggaccggcctgagcgatgtgcactccacccaagccaggctcccagggggcctgatttctctctcactgtctctttttttaaaatggttgcacggctctgccccatggggggccttttttacacactgcgaggcccagctttctaggggacttttgcacatgtcatgcagctcagctgggagctgcttaggtggaaaactccaaataaagtgcggctgtcgca

SEQ ID NO: 458608 - DNA, 9130 bp, Homo sapiens
  misc_feature (3)..(3): n is a, c, g, or t
cgnccctggagggagagagagccagagagcggccgagcgcctaggaggcccgccgagcctcgccgagccccgccagccccggcgcgagagaagttggagaggagagcagcgcagcgcagcgagtcccgtggtcgcgccccaacagcgcccgacagcccccgatagcccaaaccgcggccctagccccggccgcacccccagcccgcgccagcatgatgaacaacagcggctactcagacgccggcctcggcctgggcgatgagacagacgagatgccgtccacggagaaggacctggcggaggacgcgccgtggaagaagatccagcagaacacattcacgcgctggtgcaatgagcacctcaagtgcgtgggcaagcgcctgaccgacctgcagcgcgacctcagcgacgggctccggctcatcgcgctgctcgaggtgctcagccagaagcgcatgtaccgcaagttccatccgcgccccaacttccgccaaatgaagctggagaacgtgtccgtggccctcgagttcctcgagcgcgagcacatcaagctcgtgtccatagacagcaaggccatcgtggatgggaacctgaagctgatcctgggcctgatctggacgctgatcctgcactactccatctccatgcccatgtgggaggatgaagatgatgaggatgcccgcaaacagacgcccaagcagcggctgcttggctggatccagaacaaggtgccccagctgcccatcaccaacttcaaccgtgactggcaggacggcaaagctctgggcgccctggtggacaactgcgcccccggtctctgccccgactgggaggcctgggaccccaaccagcccgtggagaacgcccgggaggccatgcagcaggccgacgactggcttggggtgccccaggtcattgcccctgaggagattgtggaccccaacgtggatgagcattctgttatgacctacctgtcccagttccccaaggccaagctcaaacctggtgcccctgttcgatccaagcagctgaaccccaagaaagccatcgcctatgggcctggcatcgagccacagggcaacaccgtgctgcagcctgcccacttcaccgtgcagacggtggacgcgggcgtgggcgaggtgctggtctacatcgaggaccctgaaggccacaccgaggaggctaaggtggttcccaacaatgacaaggatcgcacctatgctgtctcctatgtgcccaaggtcgctgggttacacaaggtgaccgtgctctttgctggccagaacattgaacgcagtccctttgaggtgaacgtgggcatggccctgggagatgccaacaaggtgtcagcccgtggccctggcctggaacctgtgggcaatgtggccaacaaacccacctactttgacatctacactgcgggggccggcactggcgatgttgctgtggtgatcgtggacccacagggccggcgggacacagtggaggtggccctggaggacaagggtgacagcacgttccgctgcacatacagacctgccatggaggggccacataccgtgcatgtggcctttgcgggtgcccccatcacccgcagtcccttccctgtccatgtgtcggaagcctgtaaccccaacgcctgccgcgcctctgggcgaggcctgcagcccaagggtgttcgcgtgaaagaggtggctgacttcaaggtgtttaccaagggtgccggcagcggggagctcaaggtcacggtcaaggggccaaagggcacagaggagccagtgaaggtgcgggaggctggggatggtgtgttcgagtgcgagtactacccggtggtgcctgggaagtatgtggtgaccatcacgtggggcggctacgccatccctcgcagcccctttgaggtacaggtgagcccagaggcaggagtgcaaaaggtccgggcctggggtcctggtttggagactggccaggtgggcaagtcagccgattttgtggtggaagccattggcaccgaggtggggacactgggcttctccatcgaggggccctcacaagccaagatcgaatgtgacgacaagggggatggctcctgcgatgtgcggtactggcccacggagcctggggagtacgctgtgcacgtcatctgtgacgatgaggacatccgagactcacccttcattgcccacatcctgcccgccccacctgactgcttcccagataaggtgtggtcccagctcacacacacctgccccgggggtggggcaagctggttctcctcccctccccaactcagccttcttccctccgcacaggtgaaggcctttgggcctggcctggagcctaccggctgcatcgtggacaagcccgctgagttcaccattgatgctcgtgcagctggcaagggagacctgaagctctatgcccaggacgccgacggctgtcccatcgacatcaaggtgatccccaacggcgacggcaccttccgctgctcctacgtgcccaccaagcccattaagcacaccatcatcatctcctggggaggcgtaaacgtgcccaagagccccttccgggtgaacgtgggcgagggcagccaccccgagcgggtaaaggtgtacggccccggagtggagaagacaggcctcaaggccaatgagcccacctacttcacggtggactgcagcgaggcggggcaaggcgacgtgagcatcggcatcaagtgcgccccaggcgtggtgggccctgcagaggctgacattgacttcgacatcatcaagaatgacaacgacaccttcaccgtcaagtacacgccaccaggggcgggccgctacaccatcatggtgctgtttgccaaccaggagatccccgccagccccttccacatcaaggtggacccatcccacgatgccagcaaagtcaaggccgagggccctgggctgaatcgcacaggtgtggaagtcgggaagcccacccacttcacggtgctgaccaagggagccggcaaggccaagctggatgtgcagtttgcagggacagccaagggcgaggttgtgcgggactttgagatcatagacaaccatgactactcctacactgtcaagtacaccgctgtccagcagggcaacatggcagtgacagtgacttatggcggggaccctgtccccaagagcccctttgtggtgaatgtggcacccccgctggacctcagcaaaatcaaagttcagggccttaatagcaaggtggctgtgggacaggaacaagcattctctgtgaacacacgaggggctggcggtcagggccaactggatgtgcggatgacttcgccctctcgccggcccatcccctgcaagctggagccaggcggtggagcggaagcccaggctgtgcgctacatgcccccggaggaggggccctacaaggtggatatcacctacgatggtcacccggtgcctggcagcccgtttgctgtggagggtgtcctgccccctgatccctccaaggtctgtgcttatggcccgggtctcaagggtggactggtaggcacccccgcgccattctccatcgacaccaagggggctggcacaggtggcctggggctgaccgtagagggcccctgcgaggccaagatcgagtgccaggacaatggtgatggctcatgtgctgtcagctacctgcccacggagcctggcgagtacaccatcaacatcctgtttgctgaggcccacatccctggctcgcccttcaaagccaccattcggcctgtgtttgacccgagcaaggtgcgggccagtggaccgggcctggagcgcggcaaggtcggtgaggcagccaccttcactgtggactgctcagaggcaggcgaggcggagctgaccattgagatcctgtcggatgccggggtcaaggccgaggtgctgatccacaacaacgcggatggcacctaccacatcacctacagccctgccttccctggcacctacaccattaccatcaagtatggcgggcatcccgtgcccaaattccccacccgtgtccatgtgcagcctgcggtcgataccagtggcgtcaaggtctcagggcctggtgttgagccacacggtgtcctgcgggaggtgaccactgagttcactgtggatgcaagatccctaacagccacaggcggcaaccacgtgacggctcgtgtgctcaacccctcgggggccaagacagacacctatgtgacagacaatggggacggcacctaccgagtgcagtacaccgcctacgaggagggcgtgcatctggtggaggtcctgtatgatgaggtcgctgtgcccaagagccccttccgagtgggcgtgaccgagggctgtgatcccacccgcgtccgagccttcgggccaggcctggagggtggcttggtcaacaaggccaaccgattcactgtggagaccaggggagcgggcaccgggggccttggcctagccatcgagggtccctcggaagccaagatgtcctgcaaggacaacaaggatggtagctgcaccgtggagtacatccccttcactcctggagactatgacgtcaacatcaccttcggggggcggcccatcccagggagcccgttccgcgtgccagtgaaggatgtggtggaccctgggaaggtgaagtgctcagggccagggctgggggctggtgtcagggcccgggttcctcagaccttcacagtggactgcagtcaagctggccgggcgcccctgcaggtggctgtgctgggccccacaggtgtggccgagcctgtggaggtgcgggacaatggagatggcacccacactgtccactacaccccagccactgacgggccctacacggtagccgtcaagtatgctgaccaggaggtgccacgcagccccttcaagatcaaggtcctcccagctcatgatgccagcaaggtgcgggccagcggcccaggcctcaacgcctctggcatccctgccagcctgcctgtggagttcaccatcgacgcacgggacgcgggcgaggggttgctcactgtccagatcttggaccccgagggtaagcccaagaaggccaacatccgggacaatggggatggcacgtacactgtgtcctacctgccggacatgagtggccggtacaccatcaccatcaagtatggcggtgatgagatcccctactcgcccttccgcatccatgctctgcccactggggatgccagcaagtgcctcgtcacagtgtccattggaggccatggcctgggtgcctgcctgggccctcgaatccagattgggcaggagacggtgatcacggtggatgccaaggcagccggtgaggggaaggtgacatgcacggtgtccacgccggatggggcagagctcgatgtggatgtggttgagaaccatgacggtacctttgacatctactacacagcgcccgagccgggcaagtacgtcatcaccatccgcttcgggggtgagcacatccccaacagccccttccacgtgctggccacagaggagccagtggtgcctgtggagccaatggagtccatgctgaggcccttcaacctggtcatccccttcgcggtgcagaaaggggagctcacaggagaggtgcggatgccctcggggaagacggcacggcccaacatcaccgacaacaaggacggcaccatcacggtgaggtatgcacccactgagaaaggcctgcaccagatggggatcaagtatgacggcaaccacatccctgggagccccttacagttctatgtggatgccatcaacagccgccatgtcagtgcctatgggccaggcctgagccatggcatggtcaacaagccagccaccttcactattgtcaccaaagatgctggagaagggggtctgtcactggccgtggagggcccatccaaggcagagatcacctgtaaggacaacaaggatggcacctgcaccgtgtcctatctgccgactgcgcctggagactacagcatcatcgtgcgcttcgatgacaagcacatcccggggagccccttcacagccaagatcacaggtgatgactccatgaggacctcacagctgaatgtgggcacctccacggacgtgtcactgaagatcaccgagagtgatctgagccagctgaccgccagcatccgtgccccctcgggcaacgaggagccctgcctgctgaagcgcctgcccaaccggcacattgggatctccttcacccccaaggaggtcggggagcacgtggtgagcgtgcgcaagagtggcaagcatgtcaccaacagccccttcaagatcctggtggggccatctgagatcggggacgccagcaaggtgcgggtctggggcaaggggctttccgagggacacacattccaggtggcagagttcatcgtggacactcgcaatgcaggttatgggggcttggggctgagtattgaaggcccaagcaaggtggacatcaactgtgaggacatggaggacgggacatgcaaagtcacctactgccccaccgagcccggcacctacatcatcaacatcaagtttgctgacaagcacgtgcctggaagccccttcactgtgaaggtgaccggcgagggccgcatgaaggagagcatcacccggcggagacaggcaccttccatcgccaccatcggcagcacctgtgacctcaacctcaagatcccaggaaactggttccagatggtgtctgcccaggagcgcctgacacgcaccttcacacgcagcagccacacctacacccgcacggagcgcacggagatcagcaagacgcggggcggggagacaaagcgcgaggtgcgggtggaggagtccacccaggtcggcggggaccccttccctgctgtgtttggggacttcctgggccgggagcgcctgggatccttcggcagcatcacccggcagcaggagggtgaggccagctctcaggacatgactgcacaggtgaccagcccatcgggcaaggtggaagccgcagagatcgtcgagggcgaggacagcgcctacagcgtgcgctttgtgccccaggaaatggggccccatacggtcgctgtcaagtaccgtggccagcacgtgcccggcagcccctttcagttcactgtggggccgctgggtgaaggtggtgcccacaaggtgcgggccggaggcacagggctggagcgaggtgtggccggcgtgccagccgagttcagcatctggacccgggaggctggcgctgggggcctgtccattgctgtggagggtcctagcaaagcggagattgcatttgaggatcgcaaagatggctcctgcggcgtctcctatgtcgtccaggaaccaggtgactatgaggtctccatcaagttcaatgatgagcacatcccagacagcccctttgtggtgcctgtggcctccctctcggatgacgctcgccgtctcactgtcaccagcctccaggagacggggctcaaggtgaaccagccagcgtcctttgccgtgcagctgaacggtgcccggggcgtgattgatgcccgggtgcacacaccctcgggggctgtggaggagtgctacgtctctgagctggacagtgacaagcacaccatccgcttcatcccccacgagaatggcgtccactccatcgatgtcaagttcaacggtgcccacatccctggaagtcccttcaagatccgcgttggggagcagagccaggctggggacccaggcttggtgtcagcctacggtcctgggctcgagggaggcactaccggtgtgtcatcagagttcatcgtgaacaccctgaatgccggctcgggggccttgtctgtcaccattgatggcccctccaaggtgcagctggactgtcgggagtgtcctgagggccatgtggtcacttatactcccatggcccctggcaactacctcattgccatcaagtacggtggcccccagcacatcgtgggcagccccttcaaggccaaggtcactggtccgaggctgtccggaggccacagccttcacgaaacatccacggttctggtggagactgtgaccaagtcctcctcaagccggggctccagctacagctccatccccaagttctcctcagatgccagcaaggtggtgactcggggccctgggctgtcccaggccttcgtgggccagaagaactccttcaccgtggactgcagcaaagcaggcaccaacatgatgatggtgggcgtgcacggccccaagaccccctgtgaggaggtgtacgtgaagcacatggggaaccgggtgtacaatgtcacctacactgtcaaggagaaaggggactacatcctcattgtcaagtggggtgacgaaagtgtccctggaagccccttcaaagtcaaggtcccttgaatcccaaaagtgcctccccagcctcagcccccacctccagccacacacacattacacacacacacacacacacacaaatgtgccacacccagacacgcacagaatcagacactacaaacacctgccttgggggtgaagtgaaggcccagcctccccaccccaccgcgccccaggggttggaggaccttgtctgtgtcaggacagtgtccctccctgggaatgtgacatgagggccgactggggccaggctcaggggcagaggctgggacacaaggggctggcgagggctgcgaggccagggaagccctgagtttctggcggggctgagcagtgggggagcattgtgttgtgggtgtctgtgtgtgaggtcaccctcaaactgcaccgccggccagataccctcctgaccccgaggacttggtctggtctctctggtggctacaaccccagagttttaaggacttggaaaggaaagcacaatcagagaagaaaacagcccccgaaccagcaggagtggcctggcacatggaccggcctgagcgatgtgcactccacccaagccaggctcccagggggcctgatttctctctcactgtctctttttttaaaatggttgcacggctctgccccatggggggccttttttacacactgcgaggcccagctttctaggggacttttgcacatgtcatgcagctcagctgggagctgcttaggtggaaaactccaaataaagtgcggctgtcgca

SEQ ID NO: 458609 - DNA, 3215 bp, Homo sapiens
ttaagttgaataaaacacctattcctcaaaccaagttttagacaactggccttgaagaaggtgttgaatatgaatttagagtcgctgcagagaacatcgtgggcattggcaagccgagtagccaagattagtgatgactccatgaggacctcacagctgaatgtgggcacctccacggacgtgtcactgaagatcaccgagagtgatctgagccagctgaccgccagcatccgtgccccctcgggcaacgaggagccctgcctgctgaagcgcctgcccaaccggcacattgggatctccttcacccccaaggaggtcggggagcacgtggtgagcgtgcgcaagagtggcaagcatgtcaccaacagccccttcaagatcctggtggggccatctgagatcggggacgccagcaaggtgcgggtctggggcaaggggctttccgagggacacacattccaggtggcagagttcatcgtggacactcgcaatgcaggttatgggggcttggggctgagtattgaaggcccaagcaaggtggacatcaactgtgaggacatggaggacgggacatgcaaagtcacctactgccccaccgagcccggcacctacatcatcaacatcaagtttgctgacaagcacgtgcctggaagccccttcactgtgaaggtgaccggcgagggccgcatgaaggagagcatcacccggcggagacaggcaccttccatcgccaccatcggcagcacctgtgacctcaacctcaagatcccaggaaactggttccagatggtgtctgcccaggagcgcctgacacgcaccttcacacgcagcagccacacctacacccgcacggagcgcacggagatcagcaagacgcggggcggggagacaaagcgcgaggtgcgggtggaggagtccacccaggtcggcggggaccccttccctgctgtgtttggggacttcctgggccgggagcgcctgggatccttcggcagcatcacccggcagcaggagggtgaggccagctctcaggacatgactgcacaggtgaccagcccatcgggcaaggtggaagccgcagagatcgtcgagggcgaggacagcgcctacagcgtgcgctttgtgccccaggaaatggggccccatacggtcgctgtcaagtaccgtggccagcacgtgcccggcagcccctttcagttcactgtggggccgctgggtgaaggtggtgcccacaaggtgcgggccggaggcacagggctggagcgaggtgtggccggcgtgccagccgagttcagcatctggacccgggaggctggcgctgggggcctgtccattgctgtggagggtcctagcaaagcggagattgcatttgaggatcgcaaagatggctcctgcggcgtctcctatgtcgtccaggaaccaggtgactatgaggtctccatcaagttcaatgatgagcacatcccagacagcccctttgtggtgcctgtggcctccctctcggatgacgctcgccgtctcactgtcaccagcctccaggagacggggctcaaggtgaaccagccagcgtcctttgccgtgcagctgaacggtgcccggggcgtgattgatgcccgggtgcacacaccctcgggggctgtggaggagtgctacgtctctgagctggacagtgacaagcacaccatccgcttcatcccccacgagaatggcgtccactccatcgatgtcaagttcaacggtgcccacatccctggaagtcccttcaagatccgcgttggggagcagagccaggctggggacccaggcttggtgtcagcctacggtcctgggctcgagggaggcactaccggtgtgtcatcagagttcatcgtgaacaccctgaatgccggctcgggggccttgtctgtcaccattgatggcccctccaaggtgcagctggactgtcgggagtgtcctgagggccatgtggtcacttatactcccatggcccctggcaactacctcattgccatcaagtacggtggcccccagcacatcgtgggcagccccttcaaggccaaggtcactggtccgaggctgtccggaggccacagccttcacgaaacatccacggttctggtggagactgtgaccaagtcctcctcaagccggggctccagctacagctccatccccaagttctcctcagatgccagcaaggtggtgactcggggccctgggctgtcccaggccttcgtgggccagaagaactccttcaccgtggactgcagcaaagcaggcaccaacatgatgatggtgggcgtgcacggccccaagaccccctgtgaggaggtgtacgtgaagcacatggggaaccgggtgtacaatgtcacctacactgtcaaggagaaaggggactacatcctcattgtcaagtggggtgacgaaagtgtccctggaagccccttcaaagtcaaggtcccttgaatcccaaaagtgcctccccagcctcagcccccacctccagccacacacacattacacacacacacacacacacacaaatgtgccacacccagacacgcacagaatcagacactacaaacacctgccttgggggtgaagtgaaggcccagcctccccaccccaccgcgccccaggggttggaggaccttgtctgtgtcaggacagtgtccctccctgggaatgtgacatgagggccgactggggccaggctcaggggcagaggctgggacacaaggggctggcgagggctgcgaggccagggaagccctgagtttctggcggggctgagcagtgggggagcattgtgttgtgggtgtctgtgtgtgaggtcaccctcaaactgcaccgccggccagataccctcctgaccccgaggacttggtctggtctctctggtggctacaaccccagagttttaaggacttggaaaggaaagcacaatcagagaagaaaacagcccccgaaccagcaggagtggcctggcacatggaccggcctgagcgatgtgcactccacccaagccaggctcccagggggcctgatttctctctcactgtctctttttttaaaatggttgcacggctctgccccatggggggccttttttacacactgcgaggcccagctttctaggggacttttgcacatgtcatgcagctcagctgggagctgcttaggtggaaaactccaaataaagtgcggctgtcgca

SEQ ID NO: 458610 - DNA, 1213 bp, Homo sapiens
cggacgcgtgggcgaccacgcgtccccagcacatcgtgggcagccccttcaaggccaaggtcactggtccgaggctgtccggaggccacagccttcacgaaacatccacggttctggtggagactgtgaccaagtcctcctcaagccggggctccagctacagctccatccccaagttctcctcagatgccagcaaggtggtgactcggggccctgggctgtcccaggccttcgtgggccagaagaactccttcaccgtggactgcagcaaagcaggcaccaacatgatgatggtgggcgtgcacggccccaagaccccctgtgaggaggtgtacgtgaagcacatggggaaccgggtgtacaatgtcacctacactgtcaaggagaaaggggactacatcctcattgtcaagtggggtgacgaaagtgtccctggaagccccttcaaagtcaaggtcccttgaatcccaaaagtgcctccccagcctcagcccccacctccagccacacacacattacacacacacacacacacacacaaatgtgccacacccagacacgcacagaatcagacactacaaacacctgccttgggggtgaagtgaaggcccagcctccccaccccaccgcgccccaggggttggaggaccttgtctgtgtcaggacagtgtccctccctgggaatgtgacatgagggccgactggggccaggctcaggggcagaggctgggacacaaggggctggcgagggctgcgaggccagggaagccctgagtttctggcggggctgagcagtgggggagcattgtgttgtgggtgtctgtgtgtgaggtcaccctcaaactgcaccgccggccagataccctcctgaccccgaggacttggtctggtctctctggtggctacaaccccagagttttaaggacttggaaaggaaagcacaatcagagaagaaaacagcccccgaaccagcaggagtggcctggcacatggaccggcctgagcgatgtgcactccacccaagccaggctcccagggggcctgatttctctctcactgtctctttttttaaaatggttgcacggctctgccccatggggggccttttttacacactgcgaggcccagctttctaggggacttttgcacatgtcatgcagctcagctgggagctgcttaggtggaaaactccaaataaagtgcggctgtcgca

SEQ ID NO: 458611 - DNA, 1049 bp, Homo sapiens
  misc_feature (25)..(26): n is a, c, g, or t
gtgaggtgatctagaggatcccttnngtgatgggtggtgactcggggccctgggctgtcccaggccttcgtgggccagaagaactccttcaccgtggactgcagcaaagcaggcaccaacatgatgatggtgggcgtgcacggccccaagaccccctgtgaggaggtgtacgtgaagcacatggggaaccgggtgtacaatgtcacctacactgtcaaggagaaaggggactacatcctcattgtcaagtggggtgacgaaagtgtccctggaagccccttcaaagtcaaggtcccttgaatcccaaaagtgcctccccagcctcagcccccacctccagccacacacacattacacacacacacacacacacacaaatgtgccacacccagacacgcacagaatcagacactacaaacacctgccttgggggtgaagtgaaggcccagcctccccaccccaccgcgccccaggggttggaggaccttgtctgtgtcaggacagtgtccctccctgggaatgtgacatgagggccgactggggccaggctcaggggcagaggctgggacacaaggggctggcgagggctgcgaggccagggaagccctgagtttctggcggggctgagcagtgggggagcattgtgttgtgggtgtctgtgtgtgaggtcaccctcaaactgcaccgccggccagataccctcctgaccccgaggacttggtctggtctctctggtggctacaaccccagagttttaaggacttggaaaggaaagcacaatcagagaagaaaacagcccccgaaccagcaggagtggcctggcacatggaccggcctgagcgatgtgcactccacccaagccaggctcccagggggcctgatttctctctcactgtctctttttttaaaatggttgcacggctctgccccatggggggccttttttacacactgcgaggcccagctttctaggggacttttgcacatgtcatgcagctcagctgggagctgcttaggtggaaaactccaaataaagtgcggctgtcgca

SEQ ID NO: 458612 - DNA, 7687 bp, Homo sapiens
  misc_feature (3)..(3): n is a, c, g, or t
cgnccctggagggagagagagccagagagcggccgagcgcctaggaggcccgccgagcctcgccgagccccgccagccccggcgcgagagaagttggagaggagagcagcgcagcgcagcgagtcccgtggtcgcgccccaacagcgcccgacagcccccgatagcccaaaccgcggccctagccccggccgcacccccagcccgcgccagcatgatgaacaacagcggctactcagacgccggcctcggcctgggcgatgagacagacgagatgccgtccacggagaaggacctggcggaggacgcgccgtggaagaagatccagcagaacacattcacgcgctggtgcaatgagcacctcaagtgcgtgggcaagcgcctgaccgacctgcagcgcgacctcagcgacgggctccggctcatcgcgctgctcgaggtgctcagccagaagcgcatgtaccgcaagttccatccgcgccccaacttccgccaaatgaagctggagaacgtgtccgtggccctcgagttcctcgagcgcgagcacatcaagctcgtgtccatagacagcaaggccatcgtggatgggaacctgaagctgatcctgggcctgatctggacgctgatcctgcactactccatctccatgcccatgtgggaggatgaagatgatgaggatgcccgcaaacagacgcccaagcagcggctgcttggctggatccagaacaaggtgccccagctgcccatcaccaacttcaaccgtgactggcaggacggcaaagctctgggcgccctggtggacaactgcgcccccggtctctgccccgactgggaggcctgggaccccaaccagcccgtggagaacgcccgggaggccatgcagcaggccgacgactggcttggggtgccccaggtcattgcccctgaggagattgtggaccccaacgtggatgagcattctgttatgacctacctgtcccagttccccaaggccaagctcaaacctggtgcccctgttcgatccaagcagctgaaccccaagaaagccatcgcctatgggcctggcatcgagccacagggcaacaccgtgctgcagcctgcccacttcaccgtgcagacggtggacgcgggcgtgggcgaggtgctggtctacatcgaggaccctgaaggccacaccgaggaggctaaggtggttcccaacaatgacaaggatcgcacctatgctgtctcctatgtgcccaaggtcgctgggttacacaaggtgaccgtgctctttgctggccagaacattgaacgcagtccctttgaggtgaacgtgggcatggccctgggagatgccaacaaggtgtcagcccgtggccctggcctggaacctgtgggcaatgtggccaacaaacccacctactttgacatctacactgcgggggccggcactggcgatgttgctgtggtgatcgtggacccacagggccggcgggacacagtggaggtggccctggaggacaagggtgacagcacgttccgctgcacatacagacctgccatggaggggccacataccgtgcatgtggcctttgcgggtgcccccatcacccgcagtcccttccctgtccatgtgtcggaagcctgtaaccccaacgcctgccgcgcctctgggcgaggcctgcagcccaagggtgttcgcgtgaaagaggtggctgacttcaaggtgtttaccaagggtgccggcagcggggagctcaaggtcacggtcaaggggccaaagggcacagaggagccagtgaaggtgcgggaggctggggatggtgtgttcgagtgcgagtactacccggtggtgcctgggaagtatgtggtgaccatcacgtggggcggctacgccatccctcgcagcccctttgaggtacaggtgagcccagaggcaggagtgcaaaaggtccgggcctggggtcctggtttggagactggccaggtgggcaagtcagccgattttgtggtggaagccattggcaccgaggtggggacactgggcttctccatcgaggggccctcacaagccaagatcgaatgtgacgacaagggggatggctcctgcgatgtgcggtactggcccacggagcctggggagtacgctgtgcacgtcatctgtgacgatgaggacatccgagactcacccttcattgcccacatcctgcccgccccacctgactgcttcccagataaggtgaaggcctttgggcctggcctggagcctaccggctgcatcgtggacaagcccgctgagttcaccattgatgctcgtgcagctggcaagggagacctgaagctctatgcccaggacgccgacggctgtcccatcgacatcaaggtgatccccaacggcgacggcaccttccgctgctcctacgtgcccaccaagcccattaagcacaccatcatcatctcctggggaggcgtaaacgtgcccaagagccccttccgggtgaacgtgggcgagggcagccaccccgagcgggtaaaggtgtacggccccggagtggagaagacaggcctcaaggccaatgagcccacctacttcacggtggactgcagcgaggcggggcaaggcgacgtgagcatcggcatcaagtgcgccccaggcgtggtgggccctgcagaggctgacattgacttcgacatcatcaagaatgacaacgacaccttcaccgtcaagtacacgccaccaggggcgggccgctacaccatcatggtgctgtttgccaaccaggagatccccgccagccccttccacatcaaggtggacccatcccacgatgccagcaaagtcaaggccgagggccctgggctgaatcgcacaggtgtggaagtcgggaagcccacccacttcacggtgctgaccaagggagccggcaaggccaagctggatgtgcagtttgcagggacagccaagggcgaggttgtgcgggactttgagatcatagacaaccatgactactcctacactgtcaagtacaccgctgtccagcagggcaacatggcagtgacagtgacttatggcggggaccctgtccccaagagcccctttgtggtgaatgtggcacccccgctggacctcagcaaaatcaaagttcagggccttaatagcaaggtggctgtgggacaggaacaagcattctctgtgaacacacgaggggctggcggtcagggccaactggatgtgcggatgacttcgccctctcgccggcccatcccctgcaagctggagccaggcggtggagcggaagcccaggctgtgcgctacatgcccccggaggaggggccctacaaggtggatatcacctacgatggtcacccggtgcctggcagcccgtttgctgtggagggtgtcctgccccctgatccctccaaggtctgtgcttatggcccgggtctcaagggtggactggtaggcacccccgcgccattctccatcgacaccaagggggctggcacaggtggcctggggctgaccgtagagggcccctgcgaggccaagatcgagtgccaggacaatggtgatggctcatgtgctgtcagctacctgcccacggagcctggcgagtacaccatcaacatcctgtttgctgaggcccacatccctggctcgcccttcaaagccaccattcggcctgtgtttgacccgagcaaggtgcgggccagtggaccgggcctggagcgcggcaaggtcggtgaggcagccaccttcactgtggactgctcagaggcaggcgaggcggagctgaccattgagatcctgtcggatgccggggtcaaggccgaggtgctgatccacaacaacgcggatggcacctaccacatcacctacagccctgccttccctggcacctacaccattaccatcaagtatggcgggcatcccgtgcccaaattccccacccgtgtccatgtgcagcctgcggtcgataccagtggcgtcaaggtctcagggcctggtgttgagccacacggtgtcctgcgggaggtgaccactgagttcactgtggatgcaagatccctaacagccacaggcggcaaccacgtgacggctcgtgtgctcaacccctcgggggccaagacagacacctatgtgacagacaatggggacggcacctaccgagtgcagtacaccgcctacgaggagggcgtgcatctggtggaggtcctgtatgatgaggtcgctgtgcccaagagccccttccgagtgggcgtgaccgagggctgtgatcccacccgcgtccgagccttcgggccaggcctggagggtggcttggtcaacaaggccaaccgattcactgtggagaccaggggagcgggcaccgggggccttggcctagccatcgagggtccctcggaagccaagatgtcctgcaaggacaacaaggatggtagctgcaccgtggagtacatccccttcactcctggagactatgacgtcaacatcaccttcggggggcggcccatcccagggagcccgttccgcgtgccagtgaaggatgtggtggaccctgggaaggtgaagtgctcagggccagggctgggggctggtgtcagggcccgggttcctcagaccttcacagtggactgcagtcaagctggccgggcgcccctgcaggtggctgtgctgggccccacaggtgtggccgagcctgtggaggtgcgggacaatggagatggcacccacactgtccactacaccccagccactgacgggccctacacggtagccgtcaagtatgctgaccaggaggtgccacgcagccccttcaagatcaaggtcctcccagctcatgatgccagcaaggtgcgggccagcggcccaggcctcaacgcctctggcatccctgccagcctgcctgtggagttcaccatcgacgcacgggacgcgggcgaggggttgctcactgtccagatcttggaccccgagggtaagcccaagaaggccaacatccgggacaatggggatggcacgtacactgtgtcctacctgccggacatgagtggccggtacaccatcaccatcaagtatggcggtgatgagatcccctactcgcccttccgcatccatgctctgcccactggggatgccagcaagtgcctcgtcacagtgtccattggaggccatggcctgggtgcctgcctgggccctcgaatccagattgggcaggagacggtgatcacggtggatgccaaggcagccggtgaggggaaggtgacatgcacggtgtccacgccggatggggcagagctcgatgtggatgtggttgagaaccatgacggtacctttgacatctactacacagcgcccgagccgggcaagtacgtcatcaccatccgcttcgggggtgagcacatccccaacagccccttccacgtgctggccacagaggagccagtggtgcctgtggagccaatggagtccatgctgaggcccttcaacctggtcatccccttcgcggtgcagaaaggggagctcacaggagaggtgcggatgccctcggggaagacggcacggcccaacatcaccgacaacaaggacggcaccatcacggtgaggtatgcacccactgagaaaggcctgcaccagatggggatcaagtatgacggcaaccacatccctgggagccccttacagttctatgtggatgccatcaacagccgccatgtcagtgcctatgggccaggcctgagccatggcatggtcaacaagccagccaccttcactattgtcaccaaagatgctggagaagggggtctgtcactggccgtggagggcccatccaaggcagagatcacctgtaaggacaacaaggatggcacctgcaccgtgtcctatctgccgactgcgcctggagactacagcatcatcgtgcgcttcgatgacaagcacatcccggggagccccttcacagccaagatcacaggtgatgactccatgaggacctcacagctgaatgtgggcacctccacggacgtgtcactgaagatcaccgagagtgatctgagccagctgaccgccagcatccgtgccccctcgggcaacgaggagccctgcctgctgaagcgcctgcccaaccggcacattgggatctccttcacccccaaggaggtcggggagcacgtggtgagcgtgcgcaagagtggcaagcatgtcaccaacagccccttcaagatcctggtggggccatctgagatcggggacgccagcaaggtgcgggtctggggcaaggggctttccgagggacacacattccaggtggcagagttcatcgtggacactcgcaatgcaggttatgggggcttggggctgagtattgaaggcccaagcaaggtggacatcaactgtgaggacatggaggacgggacatgcaaagtcacctactgccccaccgagcccggcacctacatcatcaacatcaagtttgctgacaagcacgtgcctggaagccccttcactgtgaaggtgaccggcgagggccgcatgaaggagagcatcacccggcggagacaggcaccttccatcgccaccatcggcagcacctgtgacctcaacctcaagatcccaggaaactggttccagatggtgtctgcccaggagcgcctgacacgcaccttcacacgcagcagccacacctacacccgcacggagcgcacggagatcagcaagacgcggggcggggagacaaagcgcgaggtgcgggtggaggagtccacccaggtcggcggggaccccttccctgctgtgtttggggacttcctgggccgggagcgcctgggatccttcggcagcatcacccggcagcaggagggtgaggccagctctcaggacatgactgcacaggtgaccagcccatcgggcaaggtggaagccgcagagatcgtcgagggcgaggacagcgcctacagcgtgcgctttgtgccccaggaaatggggccccatacggtcgctgtcaagtaccgtggccagcacgtgcccggcagcccctttcagttcactgtggggccgctgggtgaaggtggtgcccacaaggtgcgggccggaggcacagggctggagcgaggtgtggccggcgtgccagccgagttcagcatctggacccgggaggctggcgctgggggcctgtccattgctgtggagggtcctagcaaagcggagattgcatttgaggatcgcaaagatggctcctgcggcgtctcctatgtcgtccaggaaccaggtgactatgaggtctccatcaagttcaatgatgagcacatcccagacagcccctttgtggtgcctgtggcctccctctcggatgacgctcgccgtctcactgtcaccagcctccaggagacggggctcaaggtgaaccagccagcgtcctttgccgtgcagctgaacggtgcccggggcgtgattgatgcccgggtgcacacaccctcgggggctgtggaggagtgctacgtctctgagctggacagtgacaagcacaccatccgcttcatcccccacgagaatggcgtccactccatcgatgtcaagttcaacggtcccatggggggccttttttacacactgcgaggcccagctttctaggggacttttgcacatgtcatgcagctcagctgggagctgcttaggtggaaaactccaaataaagtgcggctgtcgca

SEQ ID NO: 458613 - DNA, 2317 bp, Homo sapiens
agcggaaggacctttctgtcctggttccctgaagcatcgagagggaaccgcggccggcaggccggaccgctccggagaggaggcagcggcagtttgagcccctgtaaatgttatatgtgtacttttttttactatgtggcgtcgaagcctgtggacattttcgcggtccgggtccctgcggcggacgggtcggatcgtgctcgtggccagggcgcagtcaggtgtcgcgtggtcctgatctaggaagagactgcggccttatcaccgtctcggtgtctgctttcaccttcaactgcccccctcctcacctggaccgctcaccctcctcctcccctctcaccccgccatccccaccagtccccacctgtctctgtagactgcaagactcatcaagtgacttgctgagcaaaccctgccgagaagagattttcttcaatcacatctgaataaatcacttgaagaaagcttatagcttcattgcaccatgtgtggcatttgggcgctgtttggcagtgatgattgcctttctgttcagtgtctgagtgctatgaagattgcacacagaggtccagatgcattccgttttgagaatgtcaatggatacaccaactgctgctttggatttcaccggttggcggtagttgacccgctgtttggaatgcagccaattcgagtgaagaaatatccgtatttgtggctctgttacaatggtgaaatctacaaccataagaagatgcaacagcattttgaatttgaataccagaccaaagtggatggtgagataatccttcatctttatgacaaaggaggaattgagcaaacaatttgtatgttggatggtgtgtttgcatttgttttactggatactgccaataagaaagtgttcctgggtagagatacatatggagtcagacctttgtttaaagcaatgacagaagatggatttttggctgtatgttcagaagctaaaggtcttgttacattgaagcactccgcgactccctttttaaaagtggagccttttcttcctggacactatgaagttttggatttaaagccaaatggcaaagttgcatccgtggaaatggttaaatatcatcactgtcgggatgaacccctgcacgccctctatgacaatgtggagaaactctttccaggttttgagatagaaactgtgaagaacaacctcaggatcctttttaataatgctgtaaagaaacgtttgatgacagacagaaggattggctgccttttatcagggggcttggactccagcttggttgctgccactctgttgaagcagctgaaagaagcccaagtacagtatcctctccagacatttgcaattggcatggaagacagccccgatttactggctgctagaaaggtggcagatcatattggaagtgaacattatgaagtcctttttaactctgaggaaggcattcaggctctggatgaagtcatattttccttggaaacttatgacattacaacagttcgtgcttcagtaggtatgtatttaatttccaagtatattcggaagaacacagatagcgtggtgatcttctctggagaaggatcagatgaacttacgcagggttacatatattttcacaaggctccttctcctgaaaaagccgaggaggagagtgagaggcttctgagggaactctatttgtttgatgttctccgcgcagatcgaactactgctgcccatggtcttgaactgagagtcccatttctagatcatcgattttcttcctattacttgtctctgccaccagaaatgagaattccaaagaatgggatagaaaaacatctcctgagagagacgtttgaggattccaatctgatacccaaagagattctctggcgaccaaaagaagccttcagtgatggaataacttcagttaagaattcctggtttaagattttacaggaatacgttgaacatcaggttgatgatgcaatgatggcaaatgcagcccagaaatttcccttcaatactcctaaaaccaaagaaggatattactaccgtcaagtctttgaacgccattacccaggccgggctgactggctgagccattactggatgcccaagtggatcaatgccactgacccttctgcccgcacgctgacccactacaagtcagctgtcaaagcttaggtggtctttatgctgtaatgtgaaagcaaatatttcttcgtgttggatggggactgtgggtagataggggaacaatgagagtcaactcaggctaacttgggtgtgaaaaaaataaaagtcctaaatctaaaacaaaaaagtaaacat

SEQ ID NO: 458614 - DNA, 831 bp, Homo sapiens
  misc_feature (28)..(30): n is a, c, g, or t
acttaggctaggtacgagggctgggggnnnttaagggcaaagttgcatccgtggaaatggttaaatatcatcactgtcgggatgaacccctgcacgccctctatgacaatgtggagaaactctttccaggttttgagatagaaactgtgaagaacaacctcaggatcctttttaataatgctgtaaagaaacgtttgatgacagacagaaggattggctgccttttatcagggggcttggactccagcttggttgctgccactctgttgaagcagctgaaagaagcccaagtacagtatcctctccagacatttgcaattggcatggaagacagccccgatttactggctgctagaaaggtggcagatcatattggaagtgaacattatgaagtcctttttaactctgaggaaggcattcaggctctggatgaagtcatattttccttggaaacttatgacattacaacagttcgtgcttcagtaggtatgtatttaatttccaagtatattcggaagaacacagatagcgtggtgatcttctctggagaaggatcagatgaacttacgcagggttacatatattttcacaaggctccttctcctgaaaaagccgaggaggagagtgagaggcttctgagggaactctatttgtttgatgttctccgcgcagatcgaactactgctgcccatggtcttgaactgagagtcccatttctagatcatcgattttcttcctattacttgtctctgccaccagaaatgagaattccaaagaggattgggattctccgatggggtgaacctctcgggggggcgtggggtgcgccgg

SEQ ID NO: 458615 - DNA, 457 bp, Homo sapiens
  misc_feature (18)..(18): n is a, c, g, or t
tcgtgccgaattcggcangacaaaagaagccttcagtgatggaataacttcagttaagaattcctggtttaagattttacaggaatacgttgaacatcaggttgatgatgcaatgatggcaaatgcagcccagaaatttcccttcaatactcctaaaaccaaagaaggatattactaccgtcaagtctttgaacgccattacccaggccgggctgactggctgagccattactggatgcccaagtggatcaatgccactgacccttctgcccgcacgctgacccactacaagtcagctgtcaaagcttaggtggtctttatgctgtaatgtgaaagcaaatatttcttcgtgttggatggggactgtgggtagataggggaacaatgagagtcaactcaggctaacttgggtgtgaaaaaaataaaagtcctaaatctaaaacaaaaaagtaaacat

SEQ ID NO: 458616 - DNA, 2332 bp, Homo sapiens
cccgcccctgtgcgcgctggttggtcctcgcaggcatgatgaaacttcccgcacgcgttacaggagccaggtcggtataagcgccagcggcctcgccgcccgtcaagctgtccacatccctggcctcagcccgccacatcaccctgacctgcttacgcccagcctgtggacattttcgcggtccgggtccctgcggcggacgggtcggatcgtgctcgtggccagggcgcagtcaggtgtcgcgtggtcctgatctaggaagagactgcggccttatcaccgtctcggtgtctgctttcaccttcaactgcccccctcctcacctggaccgctcaccctcctcctcccctctcaccccgccatccccaccagtccccacctgtctctgtagactgcaagactcatcaagtgacttgctgagcaaaccctgccgagaagagattttcttcaatcacatctgaataaatcacttgaagaaagcttatagcttcattgcaccatgtgtggcatttgggcgctgtttggcagtgatgattgcctttctgttcagtgtctgagtgctatgaagattgcacacagaggtccagatgcattccgttttgagaatgtcaatggatacaccaactgctgctttggatttcaccggttggcggtagttgacccgctgtttggaatgcagccaattcgagtgaagaaatatccgtatttgtggctctgttacaatggtgaaatctacaaccataagaagatgcaacagcattttgaatttgaataccagaccaaagtggatggtgagataatccttcatctttatgacaaaggaggaattgagcaaacaatttgtatgttggatggtgtgtttgcatttgttttactggatactgccaataagaaagtgttcctgggtagagatacatatggagtcagacctttgtttaaagcaatgacagaagatggatttttggctgtatgttcagaagctaaaggtcttgttacattgaagcactccgcgactccctttttaaaagtggagccttttcttcctggacactatgaagttttggatttaaagccaaatggcaaagttgcatccgtggaaatggttaaatatcatcactgtcgggatgaacccctgcacgccctctatgacaatgtggagaaactctttccaggttttgagatagaaactgtgaagaacaacctcaggatcctttttaataatgctgtaaagaaacgtttgatgacagacagaaggattggctgccttttatcagggggcttggactccagcttggttgctgccactctgttgaagcagctgaaagaagcccaagtacagtatcctctccagacatttgcaattggcatggaagacagccccgatttactggctgctagaaaggtggcagatcatattggaagtgaacattatgaagtcctttttaactctgaggaaggcattcaggctctggatgaagtcatattttccttggaaacttatgacattacaacagttcgtgcttcagtaggtatgtatttaatttccaagtatattcggaagaacacagatagcgtggtgatcttctctggagaaggatcagatgaacttacgcagggttacatatattttcacaaggctccttctcctgaaaaagccgaggaggagagtgagaggcttctgagggaactctatttgtttgatgttctccgcgcagatcgaactactgctgcccatggtcttgaactgagagtcccatttctagatcatcgattttcttcctattacttgtctctgccaccagaaatgagaattccaaagaatgggatagaaaaacatctcctgagagagacgtttgaggattccaatctgatacccaaagagattctctggcgaccaaaagaagccttcagtgatggaataacttcagttaagaattcctggtttaagattttacaggaatacgttgaacatcaggttgatgatgcaatgatggcaaatgcagcccagaaatttcccttcaatactcctaaaaccaaagaaggatattactaccgtcaagtctttgaacgccattacccaggccgggctgactggctgagccattactggatgcccaagtggatcaatgccactgacccttctgcccgcacgctgacccactacaagtcagctgtcaaagcttaggtggtctttatgctgtaatgtgaaagcaaatatttcttcgtgttggatggggactgtgggtagataggggaacaatgagagtcaactcaggctaacttgggtgtgaaaaaaataaaagtcctaaatctaaaacaaaaaagtaaacat

SEQ ID NO: 458617 - DNA, 1995 bp, Homo sapiens
agcggaaggacctttctgtcctggttccctgaagcatcgagagggaaccgcggccggcaggccggaccgctccggagaggaggcagcggcagtttgagcccctattttcttcaatcacatctgaataaatcacttgaagaaagcttatagcttcattgcaccatgtgtggcatttgggcgctgtttggcagtgatgattgcctttctgttcagtgtctgagtgctatgaagattgcacacagaggtccagatgcattccgttttgagaatgtcaatggatacaccaactgctgctttggatttcaccggttggcggtagttgacccgctgtttggaatgcagccaattcgagtgaagaaatatccgtatttgtggctctgttacaatggtgaaatctacaaccataagaagatgcaacagcattttgaatttgaataccagaccaaagtggatggtgagataatccttcatctttatgacaaaggaggaattgagcaaacaatttgtatgttggatggtgtgtttgcatttgttttactggatactgccaataagaaagtgttcctgggtagagatacatatggagtcagacctttgtttaaagcaatgacagaagatggatttttggctgtatgttcagaagctaaaggtcttgttacattgaagcactccgcgactccctttttaaaagtggagccttttcttcctggacactatgaagttttggatttaaagccaaatggcaaagttgcatccgtggaaatggttaaatatcatcactgtcgggatgaacccctgcacgccctctatgacaatgtggagaaactctttccaggttttgagatagaaactgtgaagaacaacctcaggatcctttttaataatgctgtaaagaaacgtttgatgacagacagaaggattggctgccttttatcagggggcttggactccagcttggttgctgccactctgttgaagcagctgaaagaagcccaagtacagtatcctctccagacatttgcaattggcatggaagacagccccgatttactggctgctagaaaggtggcagatcatattggaagtgaacattatgaagtcctttttaactctgaggaaggcattcaggctctggatgaagtcatattttccttggaaacttatgacattacaacagttcgtgcttcagtaggtatgtatttaatttccaagtatattcggaagaacacagatagcgtggtgatcttctctggagaaggatcagatgaacttacgcagggttacatatattttcacaaggctccttctcctgaaaaagccgaggaggagagtgagaggcttctgagggaactctatttgtttgatgttctccgcgcagatcgaactactgctgcccatggtcttgaactgagagtcccatttctagatcatcgattttcttcctattacttgtctctgccaccagaaatgagaattccaaagaatgggatagaaaaacatctcctgagagagacgtttgaggattccaatctgatacccaaagagattctctggcgaccaaaagaagccttcagtgatggaataacttcagttaagaattcctggtttaagattttacaggaatacgttgaacatcaggttgatgatgcaatgatggcaaatgcagcccagaaatttcccttcaatactcctaaaaccaaagaaggatattactaccgtcaagtctttgaacgccattacccaggccgggctgactggctgagccattactggatgcccaagtggatcaatgccactgacccttctgcccgcacgctgacccactacaagtcagctgtcaaagcttaggtggtctttatgctgtaatgtgaaagcaaatatttcttcgtgttggatggggactgtgggtagataggggaacaatgagagtcaactcaggctaacttgggtgtgaaaaaaataaaagtcctaaatctaaaacaaaaaagtaaacat

SEQ ID NO: 458618 - DNA, 2018 bp, Homo sapiens
cccgcccctgtgcgcgctggttggtcctcgcaggcatgatgaaacttcccgcacgcgttacaggagccaggtcggtataagcgccagcggcctcgccgcccgtcaagctgtccacatccctggcctcagcccgccacatcaccctgacctgcttacgcccagaaagcttatagcttcattgcaccatgtgtggcatttgggcgctgtttggcagtgatgattgcctttctgttcagtgtctgagtgctatgaagattgcacacagaggtccagatgcattccgttttgagaatgtcaatggatacaccaactgctgctttggatttcaccggttggcggtagttgacccgctgtttggaatgcagccaattcgagtgaagaaatatccgtatttgtggctctgttacaatggtgaaatctacaaccataagaagatgcaacagcattttgaatttgaataccagaccaaagtggatggtgagataatccttcatctttatgacaaaggaggaattgagcaaacaatttgtatgttggatggtgtgtttgcatttgttttactggatactgccaataagaaagtgttcctgggtagagatacatatggagtcagacctttgtttaaagcaatgacagaagatggatttttggctgtatgttcagaagctaaaggtcttgttacattgaagcactccgcgactccctttttaaaagtggagccttttcttcctggacactatgaagttttggatttaaagccaaatggcaaagttgcatccgtggaaatggttaaatatcatcactgtcgggatgaacccctgcacgccctctatgacaatgtggagaaactctttccaggttttgagatagaaactgtgaagaacaacctcaggatcctttttaataatgctgtaaagaaacgtttgatgacagacagaaggattggctgccttttatcagggggcttggactccagcttggttgctgccactctgttgaagcagctgaaagaagcccaagtacagtatcctctccagacatttgcaattggcatggaagacagccccgatttactggctgctagaaaggtggcagatcatattggaagtgaacattatgaagtcctttttaactctgaggaaggcattcaggctctggatgaagtcatattttccttggaaacttatgacattacaacagttcgtgcttcagtaggtatgtatttaatttccaagtatattcggaagaacacagatagcgtggtgatcttctctggagaaggatcagatgaacttacgcagggttacatatattttcacaaggctccttctcctgaaaaagccgaggaggagagtgagaggcttctgagggaactctatttgtttgatgttctccgcgcagatcgaactactgctgcccatggtcttgaactgagagtcccatttctagatcatcgattttcttcctattacttgtctctgccaccagaaatgagaattccaaagaatgggatagaaaaacatctcctgagagagacgtttgaggattccaatctgatacccaaagagattctctggcgaccaaaagaagccttcagtgatggaataacttcagttaagaattcctggtttaagattttacaggaatacgttgaacatcaggttgatgatgcaatgatggcaaatgcagcccagaaatttcccttcaatactcctaaaaccaaagaaggatattactaccgtcaagtctttgaacgccattacccaggccgggctgactggctgagccattactggatgcccaagtggatcaatgccactgacccttctgcccgcacgctgacccactacaagtcagctgtcaaagcttaggtggtctttatgctgtaatgtgaaagcaaatatttcttcgtgttggatggggactgtgggtagataggggaacaatgagagtcaactcaggctaacttgggtgtgaaaaaaataaaagtcctaaatctaaaacaaaaaagtaaacat

SEQ ID NO: 458619 - DNA, 1944 bp, Homo sapiens
cccgcccctgtgcgcgctggttggtcctcgcaggcatgatgaaacttcccgcacgcgttacaggagccaggtcggtataagcgccagcggcctcgccgcccgtcaagctgtccacatccctggcctcagcccgccacatcaccctgacctgcttacgcccagtgtctgagtgctatgaagattgcacacagaggtccagatgcattccgttttgagaatgtcaatggatacaccaactgctgctttggatttcaccggttggcggtagttgacccgctgtttggaatgcagccaattcgagtgaagaaatatccgtatttgtggctctgttacaatggtgaaatctacaaccataagaagatgcaacagcattttgaatttgaataccagaccaaagtggatggtgagataatccttcatctttatgacaaaggaggaattgagcaaacaatttgtatgttggatggtgtgtttgcatttgttttactggatactgccaataagaaagtgttcctgggtagagatacatatggagtcagacctttgtttaaagcaatgacagaagatggatttttggctgtatgttcagaagctaaaggtcttgttacattgaagcactccgcgactccctttttaaaagtggagccttttcttcctggacactatgaagttttggatttaaagccaaatggcaaagttgcatccgtggaaatggttaaatatcatcactgtcgggatgaacccctgcacgccctctatgacaatgtggagaaactctttccaggttttgagatagaaactgtgaagaacaacctcaggatcctttttaataatgctgtaaagaaacgtttgatgacagacagaaggattggctgccttttatcagggggcttggactccagcttggttgctgccactctgttgaagcagctgaaagaagcccaagtacagtatcctctccagacatttgcaattggcatggaagacagccccgatttactggctgctagaaaggtggcagatcatattggaagtgaacattatgaagtcctttttaactctgaggaaggcattcaggctctggatgaagtcatattttccttggaaacttatgacattacaacagttcgtgcttcagtaggtatgtatttaatttccaagtatattcggaagaacacagatagcgtggtgatcttctctggagaaggatcagatgaacttacgcagggttacatatattttcacaaggctccttctcctgaaaaagccgaggaggagagtgagaggcttctgagggaactctatttgtttgatgttctccgcgcagatcgaactactgctgcccatggtcttgaactgagagtcccatttctagatcatcgattttcttcctattacttgtctctgccaccagaaatgagaattccaaagaatgggatagaaaaacatctcctgagagagacgtttgaggattccaatctgatacccaaagagattctctggcgaccaaaagaagccttcagtgatggaataacttcagttaagaattcctggtttaagattttacaggaatacgttgaacatcaggttgatgatgcaatgatggcaaatgcagcccagaaatttcccttcaatactcctaaaaccaaagaaggatattactaccgtcaagtctttgaacgccattacccaggccgggctgactggctgagccattactggatgcccaagtggatcaatgccactgacccttctgcccgcacgctgacccactacaagtcagctgtcaaagcttaggtggtctttatgctgtaatgtgaaagcaaatatttcttcgtgttggatggggactgtgggtagataggggaacaatgagagtcaactcaggctaacttgggtgtgaaaaaaataaaagtcctaaatctaaaacaaaaaagtaaacat

SEQ ID NO: 458620 - DNA, 1596 bp, Homo sapiens
cccgcccctgtgcgcgctggttggtcctcgcaggcatgatgaaacttcccgcacgcgttacaggagccaggtcggtataagcgccagcggcctcgccgcccgtcaagctgtccacatccctggcctcagcccgccacatcaccctgacctgcttacgcccagattttcttcaatcacatctgaataaatcacttgaagaaagcttatagcttcattgcaccatgtgtggcatttgggcgctgtttggcagtgatgattgcctttctgttcagtgtctgagtgctatgaagattgcacacagaggtccagatgcattccgttttgagaatgtcaatggatacaccaactgctgctttggatttcaccggttggcggtagttgacccgctgtttggaatgcagccaattcgagtgaagaaatatccgtatttgtggctctgttacaatggtgaaatctacaaccataagaagatgcaacagcattttgaatttgaataccagaccaaagtggatggtgagataatccttcatctttatgacaaaggaggaattgagcaaacaatttgtatgttggatggtgtgtttgcatttgttttactggatactgccaataagaaagtgttcctgggtagagatacatatggagtcagacctttgtttaaagcaatgacagaagatggatttttggctgtatgttcagaagctaaaggtcttgttacattgaagcactccgcgactccctttttaaaagtggagccttttcttcctggacactatgaagttttggatttaaagccaaatggcaaagttgcatccgtggaaatggttaaatatcatcactgtcgggatgaacccctgcacgccctctatgacaatgtggagaaactctttccaggttttgagatagaaactgtgaagaacaacctcaggatcctttttaataatgctgtaaagaaacgtttgatgacagacagaaggattggctgccttttatcagggggcttggactccagcttggttgctgccactctgttgaagcagctgaaagaagcccaagtacagtatcctctccagacatttgcaattggcatggaagacagccccgatttactggctgctagaaaggtggcagatcatattggaagtgaacattatgaagtcctttttaactctgaggaaggcattcaggctctggatgaagtcatattttccttggaaacttatgacattacaacagttcgtgcttcagtaggtatgtatttaatttccaagtatattcggaagaacacagatagcgtggtgatcttctctggagaaggatcagatgaacttacgcagggttacatatattttcacaaggctccttctcctgaaaaagccgaggaggagagtgagaggcttctgagggaactctatttgtttgatgttctccgcgcagatcgaactactgctgcccatggtcttgaactgagagtcccatttctagatcatcgattttcttcctattacttgtctctgccaccagaaatgagaattccaaagaggattgggattctccgatggggtgaacctctcgggggggcgtggggtgcgccgg

SEQ ID NO: 458621 - DNA, 1656 bp, Homo sapiens
agagtaaaacgagtcagagatatcgtatgcgtgggtatgaagaagtggtgagttatacagaccgataagaatatgcaacagcattttgaatttgaataccagaccaaagtggatggtgagataatccttcatctttatgacaaaggaggaattgagcaaacaatttgtatgttggatggtgtgtttgcatttgttttactggatactgccaataagaaagtgttcctgggtagagatacatatggagtcagacctttgtttaaagcaatgacagaagatggatttttggctgtatgttcagaagctaaaggtcttgttacattgaagcactccgcgactccctttttaaaagtggagccttttcttcctggacactatgaagttttggatttaaagccaaatggcaaagttgcatccgtggaaatggttaaatatcatcactgtcgggatgaacccctgcacgccctctatgacaatgtggagaaactctttccaggttttgagatagaaactgtgaagaacaacctcaggatcctttttaataatgctgtaaagaaacgtttgatgacagacagaaggattggctgccttttatcagggggcttggactccagcttggttgctgccactctgttgaagcagctgaaagaagcccaagtacagtatcctctccagacatttgcaattggcatggaagacagccccgatttactggctgctagaaaggtggcagatcatattggaagtgaacattatgaagtcctttttaactctgaggaaggcattcaggctctggatgaagtcatattttccttggaaacttatgacattacaacagttcgtgcttcagtaggtatgtatttaatttccaagtatattcggaagaacacagatagcgtggtgatcttctctggagaaggatcagatgaacttacgcagggttacatatattttcacaaggctccttctcctgaaaaagccgaggaggagagtgagaggcttctgagggaactctatttgtttgatgttctccgcgcagatcgaactactgctgcccatggtcttgaactgagagtcccatttctagatcatcgattttcttcctattacttgtctctgccaccagaaatgagaattccaaagaatgggatagaaaaacatctcctgagagagacgtttgaggattccaatctgatacccaaagagattctctggcgaccaaaagaagccttcagtgatggaataacttcagttaagaattcctggtttaagattttacaggaatacgttgaacatcaggttgatgatgcaatgatggcaaatgcagcccagaaatttcccttcaatactcctaaaaccaaagaaggatattactaccgtcaagtctttgaacgccattacccaggccgggctgactggctgagccattactggatgcccaagtggatcaatgccactgacccttctgcccgcacgctgacccactacaagtcagctgtcaaagcttaggtggtctttatgctgtaatgtgaaagcaaatatttcttcgtgttggatggggactgtgggtagataggggaacaatgagagtcaactcaggctaacttgggtgtgaaaaaaataaaagtcctaaatctaaaacaaaaaagtaaacat

SEQ ID NO: 458622 - DNA, 1290 bp, Homo sapiens
aaacttacggctaggtacgaggcgggtgttgttaagggcaaagttgcatccgtggaaatggttaaatatcatcactgtcgggatgaacccctgcacgccctctatgacaatgtggagaaactctttccaggttttgagatagaaactgtgaagaacaacctcaggatcctttttaataatgctgtaaagaaacgtttgatgacagacagaaggattggctgccttttatcagggggcttggactccagcttggttgctgccactctgttgaagcagctgaaagaagcccaagtacagtatcctctccagacatttgcaattggcatggaagacagccccgatttactggctgctagaaaggtggcagatcatattggaagtgaacattatgaagtcctttttaactctgaggaaggcattcaggctctggatgaagtcatattttccttggaaacttatgacattacaacagttcgtgcttcagtaggtatgtatttaatttccaagtatattcggaagaacacagatagcgtggtgatcttctctggagaaggatcagatgaacttacgcagggttacatatattttcacaaggctccttctcctgaaaaagccgaggaggagagtgagaggcttctgagggaactctatttgtttgatgttctccgcgcagatcgaactactgctgcccatggtcttgaactgagagtcccatttctagatcatcgattttcttcctattacttgtctctgccaccagaaatgagaattccaaagaatgggatagaaaaacatctcctgagagagacgtttgaggattccaatctgatacccaaagagattctctggcgaccaaaagaagccttcagtgatggaataacttcagttaagaattcctggtttaagattttacaggaatacgttgaacatcaggttgatgatgcaatgatggcaaatgcagcccagaaatttcccttcaatactcctaaaaccaaagaaggatattactaccgtcaagtctttgaacgccattacccaggccgggctgactggctgagccattactggatgcccaagtggatcaatgccactgacccttctgcccgcacgctgacccactacaagtcagctgtcaaagcttaggtggtctttatgctgtaatgtgaaagcaaatatttcttcgtgttggatggggactgtgggtagataggggaacaatgagagtcaactcaggctaacttgggtgtgaaaaaaataaaagtcctaaatctaaaacaaaaaagtaaacat

SEQ ID NO: 458623 - DNA, 1289 bp, Homo sapiens
  misc_feature (28)..(30): n is a, c, g, or t
acttaggctaggtacgagggctgggggnnnttaagggcaaagttgcatccgtggaaatggttaaatatcatcactgtcgggatgaacccctgcacgccctctatgacaatgtggagaaactctttccaggttttgagatagaaactgtgaagaacaacctcaggatcctttttaataatgctgtaaagaaacgtttgatgacagacagaaggattggctgccttttatcagggggcttggactccagcttggttgctgccactctgttgaagcagctgaaagaagcccaagtacagtatcctctccagacatttgcaattggcatggaagacagccccgatttactggctgctagaaaggtggcagatcatattggaagtgaacattatgaagtcctttttaactctgaggaaggcattcaggctctggatgaagtcatattttccttggaaacttatgacattacaacagttcgtgcttcagtaggtatgtatttaatttccaagtatattcggaagaacacagatagcgtggtgatcttctctggagaaggatcagatgaacttacgcagggttacatatattttcacaaggctccttctcctgaaaaagccgaggaggagagtgagaggcttctgagggaactctatttgtttgatgttctccgcgcagatcgaactactgctgcccatggtcttgaactgagagtcccatttctagatcatcgattttcttcctattacttgtctctgccaccagaaatgagaattccaaagaatgggatagaaaaacatctcctgagagagacgtttgaggattccaatctgatacccaaagagattctctggcgaccaaaagaagccttcagtgatggaataacttcagttaagaattcctggtttaagattttacaggaatacgttgaacatcaggttgatgatgcaatgatggcaaatgcagcccagaaatttcccttcaatactcctaaaaccaaagaaggatattactaccgtcaagtctttgaacgccattacccaggccgggctgactggctgagccattactggatgcccaagtggatcaatgccactgacccttctgcccgcacgctgacccactacaagtcagctgtcaaagcttaggtggtctttatgctgtaatgtgaaagcaaatatttcttcgtgttggatggggactgtgggtagataggggaacaatgagagtcaactcaggctaacttgggtgtgaaaaaaataaaagtcctaaatctaaaacaaaaaagtaaacat

SEQ ID NO: 458624 - DNA, 1092 bp, Homo sapiens
cccgcccctgtgcgcgctggttggtcctcgcaggcatgatgaaacttcccgcacgcgttacaggagccaggtcggtataagcgccagcggcctcgccgcccgtcaagctgtccacatccctggcctcagcccgccacatcaccctgacctgcttacgcccagattttcttcaatcacatctgaataaatcacttgaagaaagcttatagcttcattgcaccatgtgtggcatttgggcgctgtttggcagtgatgattgcctttctgttcagtgtctgagtgctatgaagattgcacacagaggtccagatgcattccgttttgagaatgtcaatggatacaccaactgctgctttggatttcaccggttggcggtagttgacccgctgtttggaatgcagccaattcgagtgaagaaatatccgtatttgtggctctgttacaatggtgaaatctacaaccataagaagatgcaacagcattttgaatttgaataccagaccaaagtggatggtgagataatccttcatctttatgacaaaggaggaattgagcaaacaatttgtatgttggatggtgtgtttgcatttgttttactggatactgccaataagaaagtgttcctgggtagagatacatatggagtcagacctttgtttaaagcaatgacagaagatggatttttggctgtatgttcagaagctaaaggtcttgttacattgaagcactccgcgactccctttttaaaagtggagccttttcttcctggacactatgaagttttggatttaaagccaaatggcaaagttgcatccgtggaaatggttaaatatcatcactgtcgggatgaacccctgcacgccctctatgacaatgtggagaaactctttccaggttttgagatagaaactgtgaagaacaacctcaggatcctttttaataatgctgtaaagaaacgtttgatgacagacagaaggattggctgccttttatcagggggcttggactccagcttggttgctgccactctgttgaagcagctgaaagaagcccaagaaagaagttaaaaagaagaggtgggtcagacataag

SEQ ID NO: 458625 - DNA, 722 bp, Homo sapiens
ggatccagtcgaacggagactctcacgctccttctcctgaaaaagccgaggaggagagtgagaggcttctgagggaactctatttgtttgatgttctccgcgcagatcgaactactgctgcccatggtcttgaactgagagtcccatttctagatcatcgattttcttcctattacttgtctctgccaccagaaatgagaattccaaagaatgggatagaaaaacatctcctgagagagacgtttgaggattccaatctgatacccaaagagattctctggcgaccaaaagaagccttcagtgatggaataacttcagttaagaattcctggtttaagattttacaggaatacgttgaacatcaggttgatgatgcaatgatggcaaatgcagcccagaaatttcccttcaatactcctaaaaccaaagaaggatattactaccgtcaagtctttgaacgccattacccaggccgggctgactggctgagccattactggatgcccaagtggatcaatgccactgacccttctgcccgcacgctgacccactacaagtcagctgtcaaagcttaggtggtctttatgctgtaatgtgaaagcaaatatttcttcgtgttggatggggactgtgggtagataggggaacaatgagagtcaactcaggctaacttgggtgtgaaaaaaataaaagtcctaaatctaaaacaaaaaagtaaacat

SEQ ID NO: 458626 - DNA, 637 bp, Homo sapiens
  misc_feature (25)..(25): n is a, c, g, or t
agtgcgacggagactctctcagganatgttttctgcccatggtcttgaactgagagtcccatttctagatcatcgattttcttcctattacttgtctctgccaccagaaatgagaattccaaagaatgggatagaaaaacatctcctgagagagacgtttgaggattccaatctgatacccaaagagattctctggcgaccaaaagaagccttcagtgatggaataacttcagttaagaattcctggtttaagattttacaggaatacgttgaacatcaggttgatgatgcaatgatggcaaatgcagcccagaaatttcccttcaatactcctaaaaccaaagaaggatattactaccgtcaagtctttgaacgccattacccaggccgggctgactggctgagccattactggatgcccaagtggatcaatgccactgacccttctgcccgcacgctgacccactacaagtcagctgtcaaagcttaggtggtctttatgctgtaatgtgaaagcaaatatttcttcgtgttggatggggactgtgggtagataggggaacaatgagagtcaactcaggctaacttgggtgtgaaaaaaataaaagtcctaaatctaaaacaaaaaagtaaacat

SEQ ID NO: 458627 - DNA, 1228 bp, Homo sapiens
  misc_feature (1158)..(1158): n is a, c, g, or t
  misc_feature (1162)..(1162): n is a, c, g, or t
  misc_feature (1218)..(1218): n is a, c, g, or t
cccgcccctgtgcgcgctggttggtcctcgcaggcatgatgaaacttcccgcacgcgttacaggagccaggtcggtataagcgccagcggcctcgccgcccgtcaagctgtccacatccctggcctcagcccgccacatcaccctgacctgcttacgcccagatgcaacagcattttgaatttgaataccagaccaaagtggatggtgagataatccttcatctttatgacaaaggaggaattgagcaaacaatttgtatgttggatggtgtgtttgcatttgttttactggatactgccaataagaaagtgttcctgggtagagatacatatggagtcagacctttgtttaaagcaatgacagaagatggatttttggctgtatgttcagaagctaaaggtcttgttacattgaagcactccgcgactccctttttaaaagtggagccttttcttcctggacactatgaagttttggatttaaagccaaatggcaaagttgcatccgtggaaatggttaaatatcatcactgtcgggatgaacccctgcacgccctctatgacaatgtggagaaactctttccaggttttgagatagaaactgtgaagaacaacctcaggatcctttttaataatgctgtaaagaaacgtttgatgacagacagaaggattggctgccttttatcagggggcttggactccagcttggttgctgccactctgttgaagcagctgaaagaagcccaagtacagtatcctctccagacatttgcaattggcatggaagacagccccgatttactggctgctagaaaggtggcagatcatattggaagtgaacattatgaagtcctttttaactctgaggaaggcattcaggctctggatgaagtcatattttccttggaaacttatgacattacaacagttcgtgcttcagtaggtatgtatttaatttccaagtatattcggaagaacacagatagcgtggtgatcttctctggagaaggatcagatgaacttacgcagggttacatatattttcacaaggctccttctcctgaaaaagccgaggaggagagtgagaggcttctgagggaactctatttgtttgatgttctccgcgcagatcgaactactgctgcccatggtcttgantganataccattctagatatcgatttcttctatactgttttccacagaatgagatccaanatgggaaaaa

SEQ ID NO: 458628 - DNA, 287 bp, Homo sapiens
ccgcgactccctttttaaaagtggagccttttcttcctggacactatgaagttttggatttaaagccaaatggcaaagttgcatccgtggaaatggttaaatatcatcactgtcgggatgaacccctgcacgccctctatgacaatgtggagaaactctttccaggtagcagacacccacccacctattccccatccttctccaagggaaaaaaattttaagttgtattctcccatcatttgaatgattttagtttcaagacctacttcctattttgtttggaggga

SEQ ID NO: 458629 - DNA, 654 bp, Homo sapiens
aaactgaatcagaacctaacctggcaggcactaaatacccattttaatttagattttcttcttttctcctttaagtcttgaactgagagtcccatttctagatcatcgattttcttcctattacttgtctctgccaccagaaatgagaattccaaagaaaggtaggtaaatcaactcaaggtaaaactgtccattgccatcagattatatttgtaatttttacctgatgctcctttttttgtcacgtcagaatgggatagaaaaacatctcctgagagagacgtttgaggattccaatctgatacccaaagagattctctggcgaccaaaagaagccttcagtgatggaataacttcagttaagaattcctggtttaagattttacaggaatacgttgaacatcaggtataatgtctttaaaaacattttcaggaataagacagtttggatgcagagctgtcattgctgttcattttgtatttagtttgaatgatacatgtatttagtttgaatgatacatgtatttagtttgaatgatacatacatcagatatctctctgataggatgtccctatcagagagattcagagtctctgtaaacaattatctcttttgtaagaattacgtaagaattaagtagcatgaaggattat

SEQ ID NO: 458630 - DNA, 665 bp, Homo sapiens
ttttcttcttttctcctttaagtcttgaactgagagtcccatttctagatcatcgattttcttcctattacttgtctctgccaccagaaatgagaattccaaagaaaggtaggtaaatcaactcaaggtaaaactgtccattgccatcagattatatttgtaatttttacctgatgctcctttttttgtcacgtcagaatgggatagaaaaacatctcctgagagagacgtttgaggattccaatctgatacccaaagagattctctggcgaccaaaagaagccttcagtgatggaataacttcagttaagaattcctggtttaagattttacaggaatacgttgaacatcaggtataatgtctttaaaaacattttcaggaataagacagtttggatgcagagctgtcattgctgttcattttgtatttagtttgaatgatacatgtatttagtttgaatgatacatgtatttagtttgaatgatacatacatcagatatctctctgataggatgtccctatcagagagattcagagtctctgtaaacaattatctcttttgtaagaattacgtaagaattaagtagcatgaaggattataaagtagcatctagaatcgagagagagaggagacttactactaatcatcactgattttcattta

SEQ ID NO: 458631 - DNA, 2054 bp, Homo sapiens
cccgcccctgtgcgcgctggttggtcctcgcaggcatgatgaaacttcccgcacgcgttacaggagccaggtcggtataagcgccagcggcctcgccgcccgtcaagctgtccacatccctggcctcagcccgccacatcaccctgacctgcttacgcccagattttcttcaatcacatctgaataaatcacttgaagaaagcttatagcttcattgcaccatgtgtggcatttgggcgctgtttggcagtgatgattgcctttctgttcagtgtctgagtgctatgaagattgcacacagaggtccagatgcattccgttttgagaatgtcaatggatacaccaactgctgctttggatttcaccggttggcggtagttgacccgctgtttggaatgcagccaattcgagtgaagaaatatccgtatttgtggctctgttacaatggtgaaatctacaaccataagaagatgcaacagcattttgaatttgaataccagaccaaagtggatggtgagataatccttcatctttatgacaaaggaggaattgagcaaacaatttgtatgttggatggtgtgtttgcatttgttttactggatactgccaataagaaagtgttcctgggtagagatacatatggagtcagacctttgtttaaagcaatgacagaagatggatttttggctgtatgttcagaagctaaaggtcttgttacattgaagcactccgcgactccctttttaaaagtggagccttttcttcctggacactatgaagttttggatttaaagccaaatggcaaagttgcatccgtggaaatggttaaatatcatcactgtcgggatgaacccctgcacgccctctatgacaatgtggagaaactctttccaggttttgagatagaaactgtgaagaacaacctcaggatcctttttaataatgctgtaaagaaacgtttgatgacagacagaaggattggctgccttttatcagggggcttggactccagcttggttgctgccactctgttgaagcagctgaaagaagcccaagtacagtatcctctccagacatttgcaattggcatggaagacagccccgatttactggctgctagaaaggtggcagatcatattggaagtgaacattatgaagtcctttttaactctgaggaaggcattcaggctctggatgaagtcatattttccttggaaacttatgacattacaacagttcgtgcttcagtaggtatgtatttaatttccaagtatattcggaagaacacagatagcgtggtgatcttctctggagaaggatcagatgaacttacgcagggttacatatattttcacaaggctccttctcctgaaaaagccgaggaggagagtgagaggcttctgagggaactctatttgtttgatgttctccgcgcagatcgaactactgctgcccatggtcttgaactgagagtcccatttctagatcatcgattttcttcctattacttgtctctgccaccagaaatgagaattccaaagaatgggatagaaaaacatctcctgagagagacgtttgaggattccaatctgatacccaaagagattctctggcgaccaaaagaagccttcagtgatggaataacttcagttaagaattcctggtttaagattttacaggaatacgttgaacatcaggttgatgatgcaatgatggcaaatgcagcccagaaatttcccttcaatactcctaaaaccaaagaaggatattactaccgtcaagtctttgaacgccattacccaggccgggctgactggctgagccattactggatgcccaagtggatcaatgccactgacccttctgcccgcacgctgacccactacaagtcagctgtcaaagcttaggtggtctttatgctgtaatgtgaaagcaaatatttcttcgtgttggatggggactgtgggtagataggggaacaatgagagtcaactcaggctaacttgggtgtgaaaaaaataaaagtcctaaatctaaaacaaaaaagtaaacat

SEQ ID NO: 458632 - DNA, 663 bp, Homo sapiens
atgcaatgatggcaaatgcagcccagaaaatctctttgggtatcagatcgaactactgctgcccatggtcttgaactgagagtcccatttctagatcatcgattttcttcctattacttgtctctgccaccagaaatgagaattccaaagaatgggatagaaaaacatctcctgagagagacgtttgaggattccaatctgatacccaaagagattctctggcgaccaaaagaagccttcagtgatggaataacttcagttaagaattcctggtttaagattttacaggaatacgttgaacatcaggttgatgatgcaatgatggcaaatgcagcccagaaatttcccttcaatactcctaaaaccaaagaaggatattactaccgtcaagtctttgaacgccattacccaggccgggctgactggctgagccattactggatgcccaagtggatcaatgccactgacccttctgcccgcacgctgacccactacaagtcagctgtcaaagcttaggtggtctttatgctgtaatgtgaaagcaaatatttcttcgtgttggatggggactgtgggtagataggggaacaatgagagtcaactcaggctaacttgggtgtgaaaaaaataaaagtcctaaatctaaaacaaaaaagtaaacat

SEQ ID NO: 458633 - DNA, 1211 bp, Homo sapiens
tgggaggccggaaggcgggcgcgcacggcggagaggcgggcgggaggccggagcatataaatgaaaagtgccataaactgaaaaaccaaacatgagggtagcagattttcttcaatcacatctgaataaatcacttgaagaaagcttatagcttcattgcaccatgtgtggcatttgggcgctgtttggcagtgatgattgcctttctgttcagtgtctgagtgctatgaagattgcacacagaggtccagatgcattccgttttgagaatgtcaatggatacaccaactgctgctttggatttcaccggttggcggtagttgacccgctgtttggaatgcagccaattcgagtgaagaaatatccgtatttgtggctctgttacaatggtgaaatctacaaccataagaagatgcaacagcattttgaatttgaataccagaccaaagtggatggtgagataatccttcatctttatgacaaaggaggaattgagcaaacaatttgtatgttggatggtgtgtttgcatttgttttactggatactgccaataagaaagtgttcctgggtagagatacatatggagtcagacctttgtttaaagcaatgacagaagatggatttttggctgtatgttcagaagctaaaggtcttgttacattgaagcactccgcgactccctttttaaaagtggagccttttcttcctggacactatgaagttttggatttaaagccaaatggcaaagttgcatccgtggaaatggttaaatatcatcactgtcgggatgaacccctgcacgccctctatgacaatgtggagaaactctttccaggtttgagatagaaactgtgaagaacaactcaggatcctttgaaagcgtaaaaaacttgtgtaccacacaggtgtgggcaaaaagaggggagaccccagggtgtgggccatgtgtgaagctaataaaccgaggaattctccgaaatgtgtgggtaaaaccacatagtggcagaaagagggaacatcgagagcgaagcagacgtacttcacaggcgagcgacgatctctataataacaggagcggatgatgatagcagacaagagactgtgatctctgtttctctctgtgttgttctgttatctatcttctttctctctcgttctgtgcttcagcagatgagggagagcacagcagaggggaaaacagaagagacag

SEQ ID NO: 458634 - DNA, 2128 bp, Homo sapiens
cccgcccctgtgcgcgctggttggtcctcgcaggcatgatgaaacttcccgcacgcgttacaggagccaggtcggtataagcgccagcggcctcgccgcccgtcaagctgtccacatccctggcctcagcccgccacatcaccctgacctgcttacgcccagattttcttcaatcacatctgaataaatcacttgaagaaagcttatagcttcattgcaccatgtgtggcatttgggcgctgtttggcagtgatgattgcctttctgttcagtgtctgagtgctatgaagattgcacacagaggtccagatgcattccgttttgagaatgtcaatggatacaccaactgctgctttggatttcaccggttggcggtagttgacccgctgtttggaatgcagccaattcgagtgaagaaatatccgtatttgtggctctgttacaatggtgaaatctacaaccataagaagatgcaacagcattttgaatttgaataccagaccaaagtggatggtgagataatccttcatctttatgacaaaggaggaattgagcaaacaatttgtatgttggatggtgtgtttgcatttgttttactggatactgccaataagaaagtgttcctgggtagagatacatatggagtcagacctttgtttaaagcaatgacagaagatggatttttggctgtatgttcagaagctaaaggtcttgttacattgaagcactccgcgactccctttttaaaagtggagccttttcttcctggacactatgaagttttggatttaaagccaaatggcaaagttgcatccgtggaaatggttaaatatcatcactgtcgggatgaacccctgcacgccctctatgacaatgtggagaaactctttccaggttttgagatagaaactgtgaagaacaacctcaggatcctttttaataatgctgtaaagaaacgtttgatgacagacagaaggattggctgccttttatcagggggcttggactccagcttggttgctgccactctgttgaagcagctgaaagaagcccaagtacagtatcctctccagacatttgcaattggcatggaagacagccccgatttactggctgctagaaaggtggcagatcatattggaagtgaacattatgaagtcctttttaactctgaggaaggcattcaggctctggatgaagtcatattttccttggaaacttatgacattacaacagttcgtgcttcagtaggtatgtatttaatttccaagtatattcggaagaacacagatagcgtggtgatcttctctggagaaggatcagatgaacttacgcagggttacatatattttcacaaggattggagagggagaaagaaaaactgctttgtgtgccaaaagcaaaactcttggtgtttttgtttgtgaaataggctccttctcctgaaaaagccgaggaggagagtgagaggcttctgagggaactctatttgtttgatgttctccgcgcagatcgaactactgctgcccatggtcttgaactgagagtcccatttctagatcatcgattttcttcctattacttgtctctgccaccagaaatgagaattccaaagaatgggatagaaaaacatctcctgagagagacgtttgaggattccaatctgatacccaaagagattctctggcgaccaaaagaagccttcagtgatggaataacttcagttaagaattcctggtttaagattttacaggaatacgttgaacatcaggttgatgatgcaatgatggcaaatgcagcccagaaatttcccttcaatactcctaaaaccaaagaaggatattactaccgtcaagtctttgaacgccattacccaggccgggctgactggctgagccattactggatgcccaagtggatcaatgccactgacccttctgcccgcacgctgacccactacaagtcagctgtcaaagcttaggtggtctttatgctgtaatgtgaaagcaaatatttcttcgtgttggatggggactgtgggtagataggggaacaatgagagtcaactcaggctaacttgggtgtgaaaaaaataaaagtcctaaatctaaaacaaaaaagtaaacat

SEQ ID NO: 458635 - DNA, 2645 bp, Homo sapiens
cccgcccctgtgcgcgctggttggtcctcgcaggcatgatgaaacttcccgcacgcgttacaggagccaggtcggtataagcgccagcggcctcgccgcccgtcaagctgtccacatccctggcctcagcccgccacatcaccctgacctgcttacgcccagattttcttcaatcacatctgaataaatcacttgaagaaagcttatagcttcattgcaccatgtgtggcatttgggcgctgtttggcagtgatgattgcctttctgttcagtgtctgagtgctatgaagattgcacacagaggtccagatgcattccgttttgagaatgtcaatggatacaccaactgctgctttggatttcaccggttggcggtagttgacccgctgtttggaatgcagccaattcgagtgaagaaatatccgtatttgtggctctgttacaatggtgaaatctacaaccataagaagatgcaacagcattttgaatttgaataccagaccaaagtggatggtgagataatccttcatctttatgacaaaggaggaattgagcaaacaatttgtatgttggatggtgtgtttgcatttgttttactggatactgccaataagaaagtgttcctgggtagagatacatatggagtcagacctttgtttaaagcaatgacagaagatggatttttggctgtatgttcagaagctaaaggtcttgttacattgaagcactccgcgactccctttttaaaagtggagccttttcttcctggacactatgaagttttggatttaaagccaaatggcaaagttgcatccgtggaaatggttaaatatcatcactgtcgggatgaacccctgcacgccctctatgacaatgtggagaaactctttccaggttttgagatagaaactgtgaagaacaacctcaggatcctttttaataatgctgtaaagaaacgtttgatgacagacagaaggattggctgccttttatcagggggcttggactccagcttggttgctgccactctgttgaagcagctgaaagaagcccaagtacagtatcctctccagacatttgcaattggcatggaagacagccccgatttactggctgctagaaaggtggcagatcatattggaagtgaacattatgaagtcctttttaactctgaggaaggcattcaggctctggatgaagtcatattttccttggaaacttatgacattacaacagttcgtgcttcagtaggtatgtatttaatttccaagtatattcggaagaacacagatagcgtggtgatcttctctggagaaggatcagatgaacttacgcagggttacatatattttcacaaggctccttctcctgaaaaagccgaggaggagagtgagaggcttctgagggaactctatttgtttgatgttctccgcgcagatcgaactactgctgcccatggtcttgaactgagagtcccatttctagatcatcgattttcttcctattacttgtctctgccaccagaaatgagaattccaaagaatgggatagaaaaacatctcctgagagagacgtttgaggattccaatctgatacccaaagagattctctggcgaccaaaagaagccttcagtgatggaataacttcagttaagaattcctggtttaagattttacaggaatacgttgaacatcaggtataatgtctttaaaaacattttcaggaataagacagtttggatgcagagctgtcattgctgttcattttgtatttagtttgaatgatacatgtatttagtttgaatgatacatgtatttagtttgaatgatacatacatcagatatctctctgataggatgtccctatcagagagattcagagtctctgtaaacaattatctcttttgtaagaattacgtaagaattaagtagcatgaaggattataaagtagcatctagaatcgagagagagaggagacttactactaatcatcactgattttcatttatcagatttttgggcacctgctgggtgccagatcttgttaggcacaaatgactaaaacagagccaccaagtattaaaaatatgcatatgagtgttctttaaaaggcactgcagctatccatattatgaatactttagcattttctaagtgatgggtgattcaaagggtctcatacaagttacagtcacgtcttaacattttctgtttcgtgaaatgagactaaacacaagtatttcctgccattttaagccattttgctcttatatgcttattcttacaggttgatgatgcaatgatggcaaatgcagcccagaaatttcccttcaatactcctaaaaccaaagaaggatattactaccgtcaagtctttgaacgccattacccaggccgggctgactggctgagccattactggatgcccaagtggatcaatgccactgacccttctgcccgcacgctgacccactacaagtcagctgtcaaagcttaggtggtctttatgctgtaatgtgaaagcaaatatttcttcgtgttggatggggactgtgggtagataggggaacaatgagagtcaactcaggctaacttgggtgtgaaaaaaataaaagtcctaaatctaaaacaaaaaagtaaacat

SEQ ID NO: 458636 - DNA, 1980 bp, Homo sapiens
cccgcccctgtgcgcgctggttggtcctcgcaggcatgatgaaacttcccgcacgcgttacaggagccaggtcggtataagcgccagcggcctcgccgcccgtcaagctgtccacatccctggcctcagcccgccacatcaccctgacctgcttacgcccagattttcttcaatcacatctgaataaatcacttgaagtgtctgagtgctatgaagattgcacacagaggtccagatgcattccgttttgagaatgtcaatggatacaccaactgctgctttggatttcaccggttggcggtagttgacccgctgtttggaatgcagccaattcgagtgaagaaatatccgtatttgtggctctgttacaatggtgaaatctacaaccataagaagatgcaacagcattttgaatttgaataccagaccaaagtggatggtgagataatccttcatctttatgacaaaggaggaattgagcaaacaatttgtatgttggatggtgtgtttgcatttgttttactggatactgccaataagaaagtgttcctgggtagagatacatatggagtcagacctttgtttaaagcaatgacagaagatggatttttggctgtatgttcagaagctaaaggtcttgttacattgaagcactccgcgactccctttttaaaagtggagccttttcttcctggacactatgaagttttggatttaaagccaaatggcaaagttgcatccgtggaaatggttaaatatcatcactgtcgggatgaacccctgcacgccctctatgacaatgtggagaaactctttccaggttttgagatagaaactgtgaagaacaacctcaggatcctttttaataatgctgtaaagaaacgtttgatgacagacagaaggattggctgccttttatcagggggcttggactccagcttggttgctgccactctgttgaagcagctgaaagaagcccaagtacagtatcctctccagacatttgcaattggcatggaagacagccccgatttactggctgctagaaaggtggcagatcatattggaagtgaacattatgaagtcctttttaactctgaggaaggcattcaggctctggatgaagtcatattttccttggaaacttatgacattacaacagttcgtgcttcagtaggtatgtatttaatttccaagtatattcggaagaacacagatagcgtggtgatcttctctggagaaggatcagatgaacttacgcagggttacatatattttcacaaggctccttctcctgaaaaagccgaggaggagagtgagaggcttctgagggaactctatttgtttgatgttctccgcgcagatcgaactactgctgcccatggtcttgaactgagagtcccatttctagatcatcgattttcttcctattacttgtctctgccaccagaaatgagaattccaaagaatgggatagaaaaacatctcctgagagagacgtttgaggattccaatctgatacccaaagagattctctggcgaccaaaagaagccttcagtgatggaataacttcagttaagaattcctggtttaagattttacaggaatacgttgaacatcaggttgatgatgcaatgatggcaaatgcagcccagaaatttcccttcaatactcctaaaaccaaagaaggatattactaccgtcaagtctttgaacgccattacccaggccgggctgactggctgagccattactggatgcccaagtggatcaatgccactgacccttctgcccgcacgctgacccactacaagtcagctgtcaaagcttaggtggtctttatgctgtaatgtgaaagcaaatatttcttcgtgttggatggggactgtgggtagataggggaacaatgagagtcaactcaggctaacttgggtgtgaaaaaaataaaagtcctaaatctaaaacaaaaaagtaaacat

SEQ ID NO: 458637 - DNA, 1578 bp, Homo sapiens
cccgcccctgtgcgcgctggttggtcctcgcaggcatgatgaaacttcccgcacgcgttacaggagccaggtcggtataagcgccagcggcctcgccgcccgtcaagctgtccacatccctggcctcagcccgccacatcaccctgacctgcttacgcccagattttcttcaatcacatctgaataaatcacttgaagaaagcttatagcttcattgcaccatgtgtggcatttgggcgctgtttggcagtgatgattgcctttctgttcagtgtctgagtgctatgaagattgcacacagaggtccagatgcattccgttttgagaatgtcaatggatacaccaactgctgctttggatttcaccggttggcggtagttgacccgctgtttggaatgcagccaattcgagtgaagaaatatccgtatttgtggctctgttacaatggtgaaatctacaaccataagaagatgcaacagcattttgaatttgaataccagaccaaagtggatggtgagataatccttcatctttatgacaaaggaggaattgagcaaacaatttgtatgttggatggtgtgtttgcatttgttttactggatactgccaataagaaagtgttcctgggtagagatacatatggagtcagacctttgtttaaagcaatgacagaagatggatttttggctgtatgttcagaagctaaaggtcttgttacattgaagcactccgcgactccctttttaaaagtggagccttttcttcctggacactatgaagttttggatttaaagccaaatggcaaagttgcatccgtggaaatggttaaatatcatcactgtcgggatgaacccctgcacgccctctatgacaatgtggagaaactctttccaggttttgagatagaaactgtgaagaacaacctcaggatcctttttaataatgctgtaaagaaacgtttgatgacagacagaaggattggctgccttttatcagggggcttggactccagcttggttgctgccactctgttgaagcagctgaaagaagcccaagtacagtatcctctccagacatttgcaattggcatggaagacagccccgatttactggctgctagaaaggtggcagatcatattggaagtgaacattatgaagtcctttttaactctgaggaaggcattcaggctctggatgaagtcatattttccttggaaacttatgacattacaacagttcgtgcttcagtaggtatgtatttaatttccaagtatattcggaagaacacagatagcgtggtgatcttctctggagaaggatcagatgaacttacgcagggttacatatattttcacaaggctccttctcctgaaaaagccgaggaggagagtgagaggcttctgagggaactctatttgtttgatgttctccgcgcagatcgaactactgctgcccatggtcttgaactgagagtcccatttctagatcatcgattttcttcctattacttgtctctgccaccagaaatgagaattccaaaggttatttccagtcaagaccctgtaagatgaccaccgt

SEQ ID NO: 458638 - DNA, 1721 bp, Homo sapiens
cccgcccctgtgcgcgctggttggtcctcgcaggcatgatgaaacttcccgcacgcgttacaggagccaggtcggtataagcgccagcggcctcgccgcccgtcaagctgtccacatccctggcctcagcccgccacatcaccctgacctgcttacgcccagattttcttcaatcacatctgaataaatcacttgaagaaagcttatagcttcattgcaccatgtgtggcatttgggcgctgtttggcagtgatgattgcctttctgttcagtgtctgagtgctatgaagattgcacacagaggtccagatgcattccgttttgagaatgtcaatggatacaccaactgctgctttggatttcaccggttggcggtagttgacccgctgtttggaatgcagccaattcgagtgaagaaatatccgtatttgtggctctgttacaatggtgaaatctacaaccataagaagatgcaacagcattttgaatttgaataccagaccaaagtggatggtgagataatccttcatctttatgacaaaggaggaattgagcaaacaatttgtatgttggatggtgtgtttgcatttgttttactggatactgccaataagaaagtgttcctgggtagagatacatatggagtcagacctttgtttaaagcaatgacagaagatggatttttggctgtatgttcagaagctaaaggtcttgttacattgaagcactccgcgactccctttttaaaagtggagccttttcttcctggacactatgaagttttggatttaaagccaaatggcaaagttgcatccgtggaaatggttaaatatcatcactgtcgggatgaacccctgcacgccctctatgacaatgtggagaaactctttccaggttttgagatagaaactgtgaagaacaacctcaggatcctttttaataatgctgtaaagaaacgtttgatgacagacagaaggattggctgccttttatcagggggcttggactccagcttggttgctgccactctgttgaagcagctgaaagaagcccaagtacagtatcctctccagacatttgcaattggcatggaagacagccccgatttactggctgctagaaaggtggcagatcatattggaagtgaacattatgaagtcctttttaactctgaggaaggcattcaggctctggatgaagtcatattttccttggaaacttatgacattacaacagttcgtgcttcagtaggtatgtatttaatttccaagtatattcggaagaacacagatagcgtggtgatcttctctggagaaggatcagatgaacttacgcagggttacatatattttcacaaggtaaccactctgaagtggagggatattcatgctatattaagaaaagtatgaattgtttgactattttctatcatctttcagtatgacagtgatatttttgagtatcttgtgaggttacaaaagggaatctgatagtgtttgctttctatctcttggggaagaaagaaattttaatgtgtcagataatttttattctttaaaactagttacagctgggtatgagggctcatgctcatacccccagctgctgaggaggctgaggtgggaggatcacctgaacccaggagattgaggctgcagtgagctgtgattgcaccactgcactcctgcctggttgacagagtaagaccccgtctcttaaaa

SEQ ID NO: 458639 - DNA, 1236 bp, Homo sapiens
agagtatataagcttctgtaccccacttcattcggacgcgtgggtcgacccacgcgtccgggagaaactctttccaggtttgagatagaaactgtgaagaacaacctcaggatcctttttaataatgctgtaaagaaacgtttgatgacagacagaaggattggctgccttttatcagggggcttggactccagcttggttgctgccactctgttgaagcagctgaaagaagcccaagtacagtatcctctccagacatttgcaattggcatggaagacagccccgatttactggctgctagaaaggtggcagatcatattggaagtgaacattatgaagtcctttttaactctgaggaaggcattcaggctctggatgaagtcatattttccttggaaacttatgacattacaacagttcgtgcttcagtaggtatgtatttaatttccaagtatattcggaagaacacagatagcgtggtgatcttctctggagaaggatcagatgaacttacgcagggttacatatattttcacaaggctccttctcctgaaaaagccgaggaggagagtgagaggcttctgagggaactctatttgtttgatgttctccgcgcagatcgaactactgctgcccatggtcttgaactgagagtcccatttctagatcatcgattttcttcctattacttgtctctgccaccagaaatgagaattccaaagaatgggatagaaaaacatctcctgagagagacgtttgaggattccaatctgatacccaaagagattctctggcgaccaaaagaagccttcagtgatggaataacttcagttaagaattcctggtttaagattttacaggaatacgttgaacatcaggttgatgatgcaatgatggcaaatgcagcccagaaatttcccttcaatactcctaaaaccaaagaaggatattactaccgtcaagtctttgaacgccattacccaggccgggctgactggctgagccattactggatgcccaagtggatcaatgccactgacccttctgcccgcacgctgacccactacaagtcagctgtcaaagcttaggtggtctttatgctgtaatgtgaaagcaaatatttcttcgtgttggatggggactgtgggtagataggggaacaatgagagtcaactcaggctaacttgggtgtgaaaaaaataaaagtcctaaatctaaaacaaaaaagtaaacat

SEQ ID NO: 458640 - DNA, 1044 bp, Homo sapiens
cccgcccctgtgcgcgctggttggtcctcgcaggcatgatgaaacttcccgcacgcgttacaggagccaggtcggtataagcgccagcggcctcgccgcccgtcaagctgtccacatccctggcctcagcccgccacatcaccctgacctgcttacgcccagattttcttcaatcacatctgaataaatcacttgaagaaagcttatagcttcattgcaccatgtgtggcatttgggcgctgtttggcagtgatgattgcctttctgttcagtgtctgagtgctatgaagattgcacacagaggtccagatgcattccgttttgagaatgtcaatggatacaccaactgctgctttggatttcaccggttggcggtagttgacccgctgtttggaatgcagccaattcgagtgaagaaatatccgtatttgtggctctgttacaatggtgaaatctacaaccataagaagatgcaacagcattttgaatttgaataccagaccaaagtggatggtgagataatccttcatctttatgacaaaggaggaattgagcaaacaatttgtatgttggatggtgtgtttgcatttgttttactggatactgccaataagaaagtgttcctgggtagagatacatatggagtcagacctttgtttaaagcaatgacagaagatggatttttggctgtatgttcagaagctaaaggtcttgttacattgaagcactccgcgactccctttttaaaagtggagccttttcttcctggacactatgaagttttggatttaaagccaaatggcaaagttgcatccgtggaaatggttaaatatcatcactgtcgggatgaacccctgcacgccctctatgacaatgtggagaaactctttccaggtttgggcttgcaccgtgcagaggccccccggggtcctttcctactgtgccgcacactttggtgccccacaggtgggcgctctccgggggggacccctcggtgtggccccgtgcctctaaccgctgttctcccttctgtggacgcccttt

SEQ ID NO: 458641 - DNA, 632 bp, Homo sapiens
  misc_feature (27)..(27): n is a, c, g, or t
atccgatactcgatagatcgaactacngctgccatggtcttgaactgagagtcccatttctagatcatcgattttcttcctattacttgtctctgccaccagaaatgagaattccaaagaatgggatagaaaaacatctcctgagagagacgtttgaggattccaatctgatacccaaagagattctctggcgaccaaaagaagccttcagtgatggaataacttcagttaagaattcctggtttaagattttacaggaatacgttgaacatcaggttgatgatgcaatgatggcaaatgcagcccagaaatttcccttcaatactcctaaaaccaaagaaggatattactaccgtcaagtctttgaacgccattacccaggccgggctgactggctgagccattactggatgcccaagtggatcaatgccactgacccttctgcccgcacgctgacccactacaagtcagctgtcaaagcttaggtggtctttatgctgtaatgtgaaagcaaatatttcttcgtgttggatggggactgtgggtagataggggaacaatgagagtcaactcaggctaacttgggtgtgaaaaaaataaaagtcctaaatctaaaacaaaaaagtaaacat

SEQ ID NO: 458642 - DNA, 577 bp, Homo sapiens
atcatcttgaagcccccgtctgaaagttgcccagagccagtgcctcacctgctgttccttgttcactttttcacgggaggccttgcagggctttatgacaagattttatgggtggctgcccagcatcattgtgactcgtgagacagagagaaaccagttgtaaccatgtagacagtggaagtgatagggagaaaagagacccaagaaactcgagagatcttacatttccactataccacatggcctgactttggagtccctgaatcaccagcctcattcttgaactttcttttcaaagtccgagagtcagggtcactcagcccggagcacgggcccgttgtggtgcactgcagtgcaggcatcggcaggtctggaaccttctgtctggctgatacctgcctcttgctggtaaggaggccctcgcgggtgccctggggagctcctctacctgctctgctgtgatgttttttcctaagtagaaactgaagcgctcctcttccaaaatacagagactcactgtgttagtctgtttttgcgttactaataaaggcgtacctgagactcggtaatttgtaaa

SEQ ID NO: 458643 - DNA, 542 bp, Homo sapiens
aggcgtgatgcgtagttccggctgccggttgacatgaagaagcagcagcggctagggcggcggtagctgcaggggtcggggattgcagcgggcctcggggctaagagcgcgacgcggcctagagcggcagacggcgcagtgggccgagaaggaggcgcagcagccgccctggcccgtcatggagatggaaaaggagttcgagcagatcgacaagtccgggagctgggcggccatttaccaggatatccgacatgaagccagtgacttcccatgtagagtggccaagcttcctaagaacaaaaaccgaaataggtacagagacgtcagtccctgtaagtatccacgtggccggtaccagtcttgctcttcctttgctgcaggcctttttagtcaagactcctttcgcctcagggtttagtataataataaatcaatgtagcagaggtttatgacgcgattgtttcctatagtaaaggcattagagacttatagtaatagctcatttttccaccattatagaagggctcaggtttcagtttctg

SEQ ID NO: 458644 - DNA, 3536 bp, Homo sapiens
aggcgtgatgcgtagttccggctgccggttgacatgaagaagcagcagcggctagggcggcggtagctgcaggggtcggggattgcagcgggcctcggggctaagagcgcgacgcggcctagagcggcagacggcgcagtgggccgagaaggaggcgcagcagccgccctggcccgtcatggagatggaaaaggagttcgagcagatcgacaagtccgggagctgggcggccatttaccaggatatccgacatgaagccagtgacttcccatgtagagtggccaagcttcctaagaacaaaaaccgaaataggtacagagacgtcagtccctttgaccatagtcggattaaactacatcaagaagataatgactatatcaacgctagtttgataaaaatggaagaagcccaaaggagttacattcttacccagggccctttgcctaacacatgcggtcacttttgggagatggtgtgggagcagaaaagcaggggtgtcgtcatgctcaacagagtgatggagaaaggttcgttaaaatgcgcacaatactggccacaaaaagaagaaaaagagatgatctttgaagacacaaatttgaaattaacattgatctctgaagatatcaagtcatattatacagtgcgacagctagaattggaaaaccttacaacccaagaaactcgagagatcttacatttccactataccacatggcctgactttggagtccctgaatcaccagcctcattcttgaactttcttttcaaagtccgagagtcagggtcactcagcccggagcacgggcccgttgtggtgcactgcagtgcaggcatcggcaggtctggaaccttctgtctggctgatacctgcctcttgctgatggacaagaggaaagacccttcttccgttgatatcaagaaagtgctgttagaaatgaggaagtttcggatggggctgatccagacagccgaccagctgcgcttctcctacctggctgtgatcgaaggtgccaaattcatcatgggggactcttccgtgcaggatcagtggaaggagctttcccacgaggacctggagcccccacccgagcatatccccccacctccccggccacccaaacgaatcctggagccacacaatgggaaatgcagggagttcttcccaaatcaccagtgggtgaaggaagagacccaggaggataaagactgccccatcaaggaagaaaaaggaagccccttaaatgccgcaccctacggcatcgaaagcatgagtcaagacactgaagttagaagtcgggtcgtggggggaagtcttcgaggtgcccaggctgcctccccagccaaaggggagccgtcactgcccgagaaggacgaggaccatgcactgagttactggaagcccttcctggtcaacatgtgcgtggctacggtcctcacggccggcgcttacctctgctacaggttcctgttcaacagcaacacatagcctgaccctcctccactccacctccacccactgtccgcctctgcccgcagagcccacgcccgactagcaggcatgccgcggtaggtaagggccgccggaccgcgtagagagccgggccccggacggacgttggttctgcactaaaacccatcttccccggatgtgtgtctcacccctcatccttttactttttgccccttccactttgagtaccaaatccacaagccattttttgaggagagtgaaagagagtaccatgctggcggcgcagagggaaggggcctacacccgtcttggggctcgccccacccagggctccctcctggagcatcccaggcgggcggcacgccaacagccccccccttgaatctgcagggagcaactctccactccatatttatttaaacaattttttccccaaaggcatccatagtgcactagcattttcttgaaccaataatgtattaaaattttttgatgtcagccttgcatcaagggctttatcaaaaagtacaataataaatcctcaggtagtactgggaatggaaggctttgccatgggcctgctgcgtcagaccagtactgggaaggaggacggttgtaagcagttgttatttagtgatattgtgggtaacgtgagaagatagaacaatgctataatatataatgaacacgtgggtatttaataagaaacatgatgtgagattactttgtcccgcttattctcctccctgttatctgctagatctagttctcaatcactgctcccccgtgtgtattagaatgcatgtaaggtcttcttgtgtcctgatgaaaaatatgtgcttgaaatgagaaactttgatctctgcttactaatgtgccccatgtccaagtccaacctgcctgtgcatgacctgatcattacatggctgtggttcctaagcctgttgctgaagtcattgtcgctcagcaatagggtgcagttttccaggaataggcatttgcctaattcctggcatgacactctagtgacttcctggtgaggcccagcctgtcctggtacagcagggtcttgctgtaactcagacattccaagggtatgggaagccatattcacacctcacgctctggacatgatttagggaagcagggacaccccccgccccccacctttgggatcagcctccgccattccaagtcaacactcttcttgagcagaccgtgatttggaagagaggcacctgctggaaaccacacttcttgaaacagcctgggtgacggtcctttaggcagcctgccgccgtctctgtcccggttcaccttgccgagagaggcgcgtctgccccaccctcaaaccctgtggggcctgatggtgctcacgactcttcctgcaaagggaactgaagacctccacattaagtggctttttaacatgaaaaacacggcagctgtagctcccgagctactctcttgccagcattttcacattttgcctttctcgtggtagaagccagtacagagaaattctgtggtgggaacattcgaggtgtcaccctgcagagctatggtgaggtgtggataaggcttaggtgccaggctgtaagcattctgagctgggcttgttgtttttaagtcctgtatatgtatgtagtagtttgggtgtgtatatatagtagcatttcaaaatggacgtactggtttaacctcctatccttggagagcagctggctctccaccttgttacacattatgttagagaggtagcgagctgctctgctatatgccttaagccaatatttactcatcaggtcattattttttacaatggccatggaataaaccatttttacaaaaataaaaacaaaaaaagcaaggtgttttggtataataccttttcaggtgtgtgtggatacgtggctgcatgaccgggtgggtgggggggagtgtctcagggtcttctgtgacctcacagaactgtcagactgtacagttttccaacttgccatattcatgatgggtttgcattttagctgcaacaataaaatttttttctaaagaacataaattt

SEQ ID NO: 458645 - DNA, 4684 bp, Homo sapiens
aggcgtgatgcgtagttccggctgccggttgacatgaagaagcagcagcggctagggcggcggtagctgcaggggtcggggattgcagcgggcctcggggctaagagcgcgacgcggcctagagcggcagacggcgcagtgggccgagaaggaggcgcagcagccgccctggcccgtcatggagatggaaaaggagttcgagcagatcgacaagtccgggagctgggcggccatttaccaggatatccgacatgaagccagtgacttcccatgtagagtggccaagcttcctaagaacaaaaaccgaaataggtacagagacgtcagtccctttgaccatagtcggattaaactacatcaagaagataatgactatatcaacgctagtttgataaaaatggaagaagcccaaaggagttacattcttacccagggccctttgcctaacacatgcggtcacttttgggagatggtgtgggagcagaaaagcaggggtgtcgtcatgctcaacagagtgatggagaaaggttcgttaaaatgcgcacaatactggccacaaaaagaagaaaaagagatgatctttgaagacacaaatttgaaattaacattgatctctgaagatatcaagtcatattatacagtgcgacagctagaattggaaaaccttacaacccaagaaactcgagagatcttacatttccactataccacatggcctgactttggagtccctgaatcaccagcctcattcttgaactttcttttcaaagtccgagagtcagggtcactcagcccggagcacgggcccgttgtggtgcactgcagtgcaggcatcggcaggtctggaaccttctgtctggctgatacctgcctcttgctgatggacaagaggaaagacccttcttccgttgatatcaagaaagtgctgttagaaatgaggaagtttcggatggggctgatccagacagccgaccagctgcgcttctcctacctggctgtgatcgaaggtgccaaattcatcatgggggactcttccgtgcaggatcagtggaaggagctttcccacgaggacctggagcccccacccgagcatatccccccacctccccggccacccaaacgaatcctggagccacacaatgggaaatgcagggagttcttcccaaatcaccagtgggtgaaggaagagacccaggaggataaagactgccccatcaaggaagaaaaaggaagccccttaaatgccgcaccctacggcatcgaaagcatgagtcaagacactgaagttagaagtcgggtcgtggggggaagtcttcgaggtgcccaggctgcctccccagccaaaggggagccgtcactgcccgagaaggacgaggaccatgcactgagttactggaagcccttcctggtcaacatgtgcgtggctacggtcctcacggccggcgcttacctctgctacagggtatgtttccactgacagacgcgctggcgagatgctcgtgtgcagagagcactggccgctagcccgatggtaggattcagttctgtggtgcatctgagccagtctcagaagaaacagatcaaaggtttttaaagtctggaactgtggaagggctaacaagagaattaaggatcgatgcactggggttttaaggagccctctggtcccaagaatataagagtctaatctcagggccttaacctattcaggagtaagtagagaaaatgccaaatacgtctgtttctctctctctttttttttttattcctttgtttttggaaaaaaatagaattacaacacattgttgtttttaacctttataaaaagcagctttttgttatttctggaacaaaaaaaaacaaagtaggcacttatgaaactttctcatacccttaggtgatgtaatcagccatataatttatatttgatttcccagggaaggaatcccaaacttttacgaatgtaaactcccttggagaagagggttaggacgctgttgcgctcaagcccccctcagctgtgtgcacactgagccaggacagggtctttgagctttcccactataagaagaacagcaacaaaaggccgtctagaaaaacagaacctgcctctgcttctgctcagggtgtccccgctgggtttccattgtcctttctccattgctccctcctgtggacagccatcttgctcatgtaccagccctcatcaccccatccccataaatgggtgtcctcgaggcctctgcctgggggtcagaggtcaccacagggtggccattggcatgtcaacccgctgttaattcagagaagtgggctccacctcattgggagaagtgccatttcagcagaaattcacacgttagacgtgtgttgctgttaagtaaggggaagagagaggactagcctcagagctctggccatggaaatgacctcctaagactttttcgtggttttaaatattttacctctttccaggtggcatctgagtacatcagatggttttgcaaaatgcaaacaattttttccttggggatgatttttggggagagggggctactgtaaaaaataaaaccaaaaccccctttgctccctcggaggttgaagttgccggggggtgtggccggggtcatgcatgaggcgacagctctgcaggtgcgggtctgggctcatctgaactgtttggtttcattccagttcctgttcaacagcaacacatagcctgaccctcctccactccacctccacccactgtccgcctctgcccgcagagcccacgcccgactagcaggcatgccgcggtaggtaagggccgccggaccgcgtagagagccgggccccggacggacgttggttctgcactaaaacccatcttccccggatgtgtgtctcacccctcatccttttactttttgccccttccactttgagtaccaaatccacaagccagggctccctcctggagcatcccaggcgggcggcacgccaacagccccccccttgaatctgcagggagcaactctccactccatatttatttaaacaattttttccccaaaggcatccatagtgcactagcattttcttgaaccaataatgtattaaaattttttgatgtcagccttgcatcaagggctttatcaaaaagtacaataataaatcctcaggtagtactgggaatggaaggctttgccatgggcctgctgcgtcagaccagtactgggaaggaggacggttgtaagcagttgttatttagtgatattgtgggtaacgtgagaagatagaacaatgctataatatataatgaacacgtgggtatttaataagaaacatgatgtgagattactttgtcccgcttattctcctccctgttatctgctagatctagttctcaatcactgctcccccgtgtgtattagaatgcatgtaaggtcttcttgtgtcctgatgaaaaatatgtgcttgaaatgagaaactttgatctctgcttactaatgtgccccatgtccaagtccaacctgcctgtgcatgacctgatcattacatggctgtggttcctaagcctgttgctgaagtcattgtcgctcagcaatagggtgcagttttccaggaataggcatttgcctaattcctggcatgacactctagtgacttcctggtgaggcccagcctgtcctggtacagcagggtcttgctgtaactcagacattccaagggtatgggaagccatattcacacctcacgctctggacatgatttagggaagcagggacaccccccgccccccacctttgggatcagcctccgccattccaagtcaacactcttcttgagcagaccgtgatttggaagagaggcacctgctggaaaccacacttcttgaaacagcctgggtgacggtcctttaggcagcctgccgccgtctctgtcccggttcaccttgccgagagaggcgcgtctgccccaccctcaaaccctgtggggcctgatggtgctcacgactcttcctgcaaagggaactgaagacctccacattaagtggctttttaacatgaaaaacacggcagctgtagctcccgagctactctcttgccagcattttcacattttgcctttctcgtggtagaagccagtacagagaaattctgtggtgggaacattcgaggtgtcaccctgcagagctatggtgaggtgtggataaggcttaggtgccaggctgtaagcattctgagctgggcttgttgtttttaagtcctgtatatgtatgtagtagtttgggtgtgtatatatagtagcatttcaaaatggacgtactggtttaacctcctatccttggagagcagctggctctccaccttgttacacattatgttagagaggtagcgagctgctctgctatatgccttaagccaatatttactcatcaggtcattattttttacaatggccatggaataaaccatttttacaaaaataaaaacaaaaaaagcaaggtgttttggtataataccttttcaggtgtgtgtggatacgtggctgcatgaccgggtgggtgggggggagtgtctcagggtcttctgtgacctcacagaactgtcagactgtacagttttccaacttgccatattcatgatgggtttgcattttagctgcaacaataaaatttttttctaaagaacataaattt

SEQ ID NO: 458646 - DNA, 2079 bp, Homo sapiens
aggcgtgatgcgtagttccggctgccggttgacatgaagaagcagcagcggctagggcggcggtagctgcaggggtcggggattgcagcgggcctcggggcatgccgcggtaggtaagggccgccggaccgcgtagagagccgggccccggacggacgttggttctgcactaaaacccatcttccccggatgtgtgtctcacccctcatccttttactttttgccccttccactttgagtaccaaatccacaagccattttttgaggagagtgaaagagagtaccatgctggcggcgcagagggaaggggcctacacccgtcttggggctcgccccacccagggctccctcctggagcatcccaggcgggcggcacgccaacagccccccccttgaatctgcagggagcaactctccactccatatttatttaaacaattttttccccaaaggcatccatagtgcactagcattttcttgaaccaataatgtattaaaattttttgatgtcagccttgcatcaagggctttatcaaaaagtacaataataaatcctcaggtagtactgggaatggaaggctttgccatgggcctgctgcgtcagaccagtactgggaaggaggacggttgtaagcagttgttatttagtgatattgtgggtaacgtgagaagatagaacaatgctataatatataatgaacacgtgggtatttaataagaaacatgatgtgagattactttgtcccgcttattctcctccctgttatctgctagatctagttctcaatcactgctcccccgtgtgtattagaatgcatgtaaggtcttcttgtgtcctgatgaaaaatatgtgcttgaaatgagaaactttgatctctgcttactaatgtgccccatgtccaagtccaacctgcctgtgcatgacctgatcattacatggctgtggttcctaagcctgttgctgaagtcattgtcgctcagcaatagggtgcagttttccaggaataggcatttgcctaattcctggcatgacactctagtgacttcctggtgaggcccagcctgtcctggtacagcagggtcttgctgtaactcagacattccaagggtatgggaagccatattcacacctcacgctctggacatgatttagggaagcagggacaccccccgccccccacctttgggatcagcctccgccattccaagtcaacactcttcttgagcagaccgtgatttggaagagaggcacctgctggaaaccacacttcttgaaacagcctgggtgacggtcctttaggcagcctgccgccgtctctgtcccggttcaccttgccgagagaggcgcgtctgccccaccctcaaaccctgtggggcctgatggtgctcacgactcttcctgcaaagggaactgaagacctccacattaagtggctttttaacatgaaaaacacggcagctgtagctcccgagctactctcttgccagcattttcacattttgcctttctcgtggtagaagccagtacagagaaattctgtggtgggaacattcgaggtgtcaccctgcagagctatggtgaggtgtggataaggcttaggtgccaggctgtaagcattctgagctgggcttgttgtttttaagtcctgtatatgtatgtagtagtttgggtgtgtatatatagtagcatttcaaaatggacgtactggtttaacctcctatccttggagagcagctggctctccaccttgttacacattatgttagagaggtagcgagctgctctgctatatgccttaagccaatatttactcatcaggtcattattttttacaatggccatggaataaaccatttttacaaaaataaaaacaaaaaaagcaaggtgttttggtataataccttttcaggtgtgtgtggatacgtggctgcatgaccgggtgggtgggggggagtgtctcagggtcttctgtgacctcacagaactgtcagactgtacagttttccaacttgccatattcatgatgggtttgcattttagctgcaacaataaaatttttttctaaagaacataaattt

SEQ ID NO: 458647 - DNA, 2346 bp, Homo sapiens
aggcgtgatgcgtagttccggctgccggttgacatgaagaagcagcagcggctagggcggcggtagctgcaggggtcggggattgcagcgggcctcggggctaagagcgcgacgcggcctagagcggcagacggcgcagtgggccgagaaggaggcgcagcagccgccctggcccgtcatggagatggaaaaggagttcgagcagatcgacaagtccgggagctgggcggccatttaccaggatatccgacatgaagccagtgacttcccatgtagagtggccaagcttcctaagaacaaaaaccgaaataggtacagagacgtcagtccctttgaccatagtcggattaaactacatcaagaagataatgactatatcaacgctagtttgataaaaatggaagaagcccaaaggagttacattcttacccagggccctttgcctaacacatgcggtcacttttgggagatggtgtgggagcagaaaagcaggggtgtcgtcatgctcaacagagtgatggagaaaggttcgttaaaatgcgcacaatactggccacaaaaagaagaaaaagagatgatctttgaagacacaaatttgaaattaacattgatctctgaagatatcaagtcatattatacagtgcgacagctagaattggaaaaccttacaacccaagaaactcgagagatcttacatttccactataccacatggcctgactttggagtccctgaatcaccagcctcattcttgaactttcttttcaaagtccgagagtcagggtcactcagcccggagcacgggcccgttgtggtgcactgcagtgcaggcatcggcaggtctggaaccttctgtctggctgatacctgcctcttgctgatggacaagaggaaagacccttcttccgttgatatcaagaaagtgctgttagaaatgaggaagtttcggatggggctgatccagacagccgaccagctgcgcttctcctacctggctgtgatcgaaggtgccaaattcatcatgggggactcttccgtgcaggatcagtggaaggagctttcccacgaggacctggagcccccacccgagcatatccccccacctccccggccacccaaacgaatcctggagccacacaatgggaaatgcagggagttcttcccaaatcaccagtgggtgaaggaagagacccaggaggataaagactgccccatcaaggaagaaaaaggaagccccttaaatgccgcaccctacggcatcgaaagcatgagtcaagacactgaagttagaagtcgggtcgtggggggaagtcttcgaggtgcccaggctgcctccccagccaaaggggagccgtcactgcccgagaaggacgaggaccatgcactgagttactggaagcccttcctggtcaacatgtgcgtggctacggtcctcacggccggcgcttacctctgctacagggtatgtttccactgacagacgcgctggcgagatgctcgtgtgcagagagcactggccgctagcccgatggtaggattcagttctgtggtgcatctgagccagtctcagaagaaacagatcaaaggtttttaaagtctggaactgtggaagggctaacaagagaattaaggatcgatgcactggggttttaaggagccctctggtcccaagaatataagagtctaatctcagggccttaacctattcaggagtaagtagagaaaatgccaaatacgtctgtttctctctctctttttttttttattcctttgtttttggaaaaaaatagaattacaacacattgttgtttttaacctttataaaaagcagctttttgttatttctggaacaaaaaaaaacaaagtaggcacttatgaaactttctcatacccttaggtgatgtaatcagccatataatttatatttgatttcccagggaaggaatcccaaacttttacgaatgtaaactcccttggagaagagggttaggacgctgttgcgctcaagcccccctcagctgtgtgcacactgagccaggacagggtctttgagctttcccactataagaagaacagcaacaaaaggccgtctagaaaaacagaacctgcctctgcttctgctcagggtgtccccgctgggtttccattgtcctttctccattgctccctcctgtggacagccatcttgctcatgtaccagccctcatcaccccatccccataaatgggtgtcctcgaggcctctgcctgggggtcagaggtcaccacagggtggccattggcatgtccccgtacatcgttagaagcttgaattcgagcagtagtagtagtagtagtaggcggccgc

SEQ ID NO: 458648 - DNA, 417 bp, Homo sapiens
cacctacattctatgccagcagcctgatcaggtcctgggtaatgtttgaaatggctacacagaggagtttcaaagccttttgttcaatctggcttcacctcgtagacggtgagaaagcgtcagagccctgcaggatcccgttgccacgtttgaccggggagccgatgggtttggaagtctgagccctgtctgcacaacctgccccggtcagcagcttcgtgcccccacccccatctccccatgaggcaggcatctgtgctgaccatggcttccatgttcagaaacccccaggcctttgagttatcatgaagcttgtgggatgtgctccaagcctcctgccatagaaaaactgccatattgctcacaataattcactattatttgtttccccagttaaaatgcgcacaatactggcca

SEQ ID NO: 458649 - DNA, 408 bp, Homo sapiens
agtgcctgcctggagcagctggtgggagagcgcagcgccagcacgtaggacacactcggttcatgggctgatgccgttcgcattgactgcctcttcagctgggtgttgagccacaccttggagtcaccagtctttggagaccaagtctgctacttttttctctaaagtgacaatcctctgaaacctccagatcatcttgaagcccccgtctgaaagttgcccagagccagtgcctcacctgctgttccttgttcactttttcacgggaggccttgcagggctttatgacaagattttatgggtggctgcccagcatcattgtgactcgtgagacagagagaaaccagttgtaaccatgtagacagtggaagtgatagggagaaaagaggtgaggggactcttcaatcc

SEQ ID NO: 458650 - DNA, 3319 bp, Homo sapiens
aggcgtgatgcgtagttccggctgccggttgacatgaagaagcagcagcggctagggcggcggtagctgcaggggtcggggattgcagcgggcctcggggctaagagcgcgacgcggcctagagcggcagacggcgcagtgggccgagaaggaggcgcagcagccgccctggcccgtcatggagatggaaaaggagttcgagcagatcgacaagtccgggagctgggcggccatttaccaggatatccgacatgaagccagtgacttcccatgtagagtggccaagcttcctaagaacaaaaaccgaaataggtacagagacgtcagtccctttgaccatagtcggattaaactacatcaagaagataatgactatatcaacgctagtttgataaaaatggaagaagcccaaaggagttacattcttacccagggccctttgcctaacacatgcggtcacttttgggagatggtgtgggagcagaaaagcaggggtgtcgtcatgctcaacagagtgatggagaaaggttcgttaaaatgcgcacaatactggccacaaaaagaagaaaaagagatgatctttgaagacacaaatttgaaattaacattgatctctgaagatatcaagtcatattatacagtgcgacagctagaattggaaaaccttacaacccaagaaactcgagagatcttacatttccactataccacatggcctgactttggagtccctgaatcaccagcctcattcttgaactttcttttcaaagtccgagagtcagggtcactcagcccggagcacgggcccgttgtggtgcactgcagtgcaggcatcggcaggtctggaaccttctgtctggctgatacctgcctcttgctgatggacaagaggaaagacccttcttccgttgatatcaagaaagtgctgttagaaatgaggaagtttcggatggggctgatccagacagccgaccagctgcgcttctcctacctggctgtgatcgaaggtgccaaattcatcatgggggactcttccgtgcaggatcagtggaaggagctttcccacgaggacctggagcccccacccgagcatatccccccacctccccggccacccaaacgaatcctggagccacacaatgggaaatgcagggagttcttcccaaatcaccagtgggtgaaggaagagacccaggaggataaagactgccccatcaaggaagaaaaaggaagccccttaaatgccgcaccctacggcatcgaaagcatgagtcaagacactgaagttagaagtcgggtcgtggggggaagtcttcgaggtgcccaggctgcctccccagccaaaggggagccgtcactgcccgagaaggacgaggaccatgcactgagttactggaagcccttcctggtcaacatgtgcgtggctacggtcctcacggccggcgcttacctctgctacaggttcctgttcaacagcaacacatagcctgaccctcctccactccacctccacccactgtccgcctctgcccgcagagcccacgcccgactagcaggcatgccgcggtaggtaagggccgccggaccgcgtagagagccgggccccggacggacgttggttctgcactaaaacccatcttccccggatgtgtgtctcacccctcatccttttactttttgccccttccactttgagtaccaaatccacaagccattttttgaggagagtgaaagagagtaccatgctggcggcgcagagggaaggggcctacacccgtcttggggctcgccccacccagggctccctcctggagcatcccaggcgggcggcacgccaacagccccccccttgaatctgcagggagcaactctccactccatatttatttaaacaattttttccccaaaggcatccatagtgcactagcattttcttgaaccaataatgtattaaaattttttgatgtcagccttgcatcaagggctttatcaaaaagtacaataataaatcctcaggtagtactgggaatggaaggctttgccatgggcctgctgcgtcagaccagtactgggaaggaggacggttgtaagcagttgttatttagtgatattgtgggtaacgtgagaagatagaacaatgctataatatataatgaacacgtgggtatttaataagaaacatgatgtgagattactttgtcccgcttattctcctccctgttatctgctagatctagttctcaatcactgctcccccgtgtgtattagaatgcatgtaaggtcttcttgtgtcctgatgaaaaatatgtgcttgaaatgagaaactttgatctctgcttactaatgtgccccatgtccaagtccaacctgcctgtgcatgacctgatcattacatggctgtggttcctaagcctgttgctgaagtcattgtcgctcagcaatagggtgcagttttccaggaataggcatttgcctaattcctggcatgacactctagtgacttcctggtgaggcccagcctgtcctggtacagcagggtcttgctgtaactcagacattccaagggtatgggaagccatattcacacctcacgctctggacatgatttagggaagcagggacaccccccgccccccacctttgggatcagcctccgccattccaagtcaacactcttcttgagcagaccgtgatttggaagagaggcacctgctggaaaccacacttcttgaaacagcctgggtgacggtcctttaggcagcctgccgccgtctctgtcccggttcaccttgccgagagaggcgcgtctgccccaccctcaaaccctgtggggcctgatggtgctcacgactcttcctgcaaagggaactgaagacctccacattaagtggctttttaacatgaaaaacacggcagctgtagctcccgagctactctcttgccagcattttcacattttgcctttctcgtggtagaagccagtacagagaaattctgtggtgggaacattcgaggtgtcaccctgcagagctatggtgaggtgtggataaggcttaggtgccaggctgtaagcattctgagctgggcttgttgtttttaagtcctgtatatgtatgtagtagtttgggtgtgtatatatagtagcatttcaaaatggacgtactggtttaacctcctatccttggagagcagctggctctccaccttgttacacattatgttagagaggtagcgagctgctctgctatatgccttaagccaatatttactcatcaggtcattattttttacaatggccatggaataaaccatttttaca

SEQ ID NO: 458651 - DNA, 4768 bp, Homo sapiens
aggcgtgatgcgtagttccggctgccggttgacatgaagaagcagcagcggctagggcggcggtagctgcaggggtcggggattgcagcgggcctcggggctaagagcgcgacgcggcctagagcggcagacggcgcagtgggccgagaaggaggcgcagcagccgccctggcccgtcatggagatggaaaaggagttcgagcagatcgacaagtccgggagctgggcggccatttaccaggatatccgacatgaagccagtgacttcccatgtagagtggccaagcttcctaagaacaaaaaccgaaataggtacagagacgtcagtccctttgaccatagtcggattaaactacatcaagaagataatgactatatcaacgctagtttgataaaaatggaagaagcccaaaggagttacattcttacccagggccctttgcctaacacatgcggtcacttttgggagatggtgtgggagcagaaaagcaggggtgtcgtcatgctcaacagagtgatggagaaaggttcgttaaaatgcgcacaatactggccacaaaaagaagaaaaagagatgatctttgaagacacaaatttgaaattaacattgatctctgaagatatcaagtcatattatacagtgcgacagctagaattggaaaaccttacaacccaagaaactcgagagatcttacatttccactataccacatggcctgactttggagtccctgaatcaccagcctcattcttgaactttcttttcaaagtccgagagtcagggtcactcagcccggagcacgggcccgttgtggtgcactgcagtgcaggcatcggcaggtctggaaccttctgtctggctgatacctgcctcttgctgatggacaagaggaaagacccttcttccgttgatatcaagaaagtgctgttagaaatgaggaagtttcggatggggctgatccagacagccgaccagctgcgcttctcctacctggctgtgatcgaaggtgccaaattcatcatgggggactcttccgtgcaggatcagtggaaggagctttcccacgaggacctggagcccccacccgagcatatccccccacctccccggccacccaaacgaatcctggagccacacaatgggaaatgcagggagttcttcccaaatcaccagtgggtgaaggaagagacccaggaggataaagactgccccatcaaggaagaaaaaggaagccccttaaatgccgcaccctacggcatcgaaagcatgagtcaagacactgaagttagaagtcgggtcgtggggggaagtcttcgaggtgcccaggctgcctccccagccaaaggggagccgtcactgcccgagaaggacgaggaccatgcactgagttactggaagcccttcctggtcaacatgtgcgtggctacggtcctcacggccggcgcttacctctgctacagggtatgtttccactgacagacgcgctggcgagatgctcgtgtgcagagagcactggccgctagcccgatggtaggattcagttctgtggtgcatctgagccagtctcagaagaaacagatcaaaggtttttaaagtctggaactgtggaagggctaacaagagaattaaggatcgatgcactggggttttaaggagccctctggtcccaagaatataagagtctaatctcagggccttaacctattcaggagtaagtagagaaaatgccaaatacgtctgtttctctctctctttttttttttattcctttgtttttggaaaaaaatagaattacaacacattgttgtttttaacctttataaaaagcagctttttgttatttctggaacaaaaaaaaacaaagtaggcacttatgaaactttctcatacccttaggtgatgtaatcagccatataatttatatttgatttcccagggaaggaatcccaaacttttacgaatgtaaactcccttggagaagagggttaggacgctgttgcgctcaagcccccctcagctgtgtgcacactgagccaggacagggtctttgagctttcccactataagaagaacagcaacaaaaggccgtctagaaaaacagaacctgcctctgcttctgctcagggtgtccccgctgggtttccattgtcctttctccattgctccctcctgtggacagccatcttgctcatgtaccagccctcatcaccccatccccataaatgggtgtcctcgaggcctctgcctgggggtcagaggtcaccacagggtggccattggcatgtcaacccgctgttaattcagagaagtgggctccacctcattgggagaagtgccatttcagcagaaattcacacgttagacgtgtgttgctgttaagtaaggggaagagagaggactagcctcagagctctggccatggaaatgacctcctaagactttttcgtggttttaaatattttacctctttccaggtggcatctgagtacatcagatggttttgcaaaatgcaaacaattttttccttggggatgatttttggggagagggggctactgtaaaaaataaaaccaaaaccccctttgctccctcggaggttgaagttgccggggggtgtggccggggtcatgcatgaggcgacagctctgcaggtgcgggtctgggctcatctgaactgtttggtttcattccagttcctgttcaacagcaacacatagcctgaccctcctccactccacctccacccactgtccgcctctgcccgcagagcccacgcccgactagcaggcatgccgcggtaggtaagggccgccggaccgcgtagagagccgggccccggacggacgttggttctgcactaaaacccatcttccccggatgtgtgtctcacccctcatccttttactttttgccccttccactttgagtaccaaatccacaagccattttttgaggagagtgaaagagagtaccatgctggcggcgcagagggaaggggcctacacccgtcttggggctcgccccacccagggctccctcctggagcatcccaggcgggcggcacgccaacagccccccccttgaatctgcagggagcaactctccactccatatttatttaaacaattttttccccaaaggcatccatagtgcactagcattttcttgaaccaataatgtattaaaattttttgatgtcagccttgcatcaagggctttatcaaaaagtacaataataaatcctcaggtagtactgggaatggaaggctttgccatgggcctgctgcgtcagaccagtactgggaaggaggacggttgtaagcagttgttatttagtgatattgtgggtaacgtgagaagatagaacaatgctataatatataatgaacacgtgggtatttaataagaaacatgatgtgagattactttgtcccgcttattctcctccctgttatctgctagatctagttctcaatcactgctcccccgtgtgtattagaatgcatgtaaggtcttcttgtgtcctgatgaaaaatatgtgcttgaaatgagaaactttgatctctgcttactaatgtgccccatgtccaagtccaacctgcctgtgcatgacctgatcattacatggctgtggttcctaagcctgttgctgaagtcattgtcgctcagcaatagggtgcagttttccaggaataggcatttgcctaattcctggcatgacactctagtgacttcctggtgaggcccagcctgtcctggtacagcagggtcttgctgtaactcagacattccaagggtatgggaagccatattcacacctcacgctctggacatgatttagggaagcagggacaccccccgccccccacctttgggatcagcctccgccattccaagtcaacactcttcttgagcagaccgtgatttggaagagaggcacctgctggaaaccacacttcttgaaacagcctgggtgacggtcctttaggcagcctgccgccgtctctgtcccggttcaccttgccgagagaggcgcgtctgccccaccctcaaaccctgtggggcctgatggtgctcacgactcttcctgcaaagggaactgaagacctccacattaagtggctttttaacatgaaaaacacggcagctgtagctcccgagctactctcttgccagcattttcacattttgcctttctcgtggtagaagccagtacagagaaattctgtggtgggaacattcgaggtgtcaccctgcagagctatggtgaggtgtggataaggcttaggtgccaggctgtaagcattctgagctgggcttgttgtttttaagtcctgtatatgtatgtagtagtttgggtgtgtatatatagtagcatttcaaaatggacgtactggtttaacctcctatccttggagagcagctggctctccaccttgttacacattatgttagagaggtagcgagctgctctgctatatgccttaagccaatatttactcatcaggtcattattttttacaatggccatggaataaaccatttttacaaaaataaaaacaaaaaaagcaaggtgttttggtataataccttttcaggtgtgtgtggatacgtggctgcatgaccgggtgggtgggggggagtgtctcagggtcttctgtgacctcacagaactgtcagactgtacagttttccaacttgccatattcatgatgggtttgcattttagctgcaacaataaaatttttttctaaagaacataaattt

SEQ ID NO: 458652 - DNA, 3330 bp, Homo sapiens
gttgactcagaggatcccagttcgacggagactctgatatccgacatgaagccagtgacttcccatgtagagtggccaagcttcctaagaacaaaaaccgaaataggtacagagacgtcagtccctttgaccatagtcggattaaactacatcaagaagataatgactatatcaacgctagtttgataaaaatggaagaagcccaaaggagttacattcttacccagggccctttgcctaacacatgcggtcacttttgggagatggtgtgggagcagaaaagcaggggtgtcgtcatgctcaacagagtgatggagaaaggttcgttaaaatgcgcacaatactggccacaaaaagaagaaaaagagatgatctttgaagacacaaatttgaaattaacattgatctctgaagatatcaagtcatattatacagtgcgacagctagaattggaaaaccttacaacccaagaaactcgagagatcttacatttccactataccacatggcctgactttggagtccctgaatcaccagcctcattcttgaactttcttttcaaagtccgagagtcagggtcactcagcccggagcacgggcccgttgtggtgcactgcagtgcaggcatcggcaggtctggaaccttctgtctggctgatacctgcctcttgctgatggacaagaggaaagacccttcttccgttgatatcaagaaagtgctgttagaaatgaggaagtttcggatggggctgatccagacagccgaccagctgcgcttctcctacctggctgtgatcgaaggtgccaaattcatcatgggggactcttccgtgcaggatcagtggaaggagctttcccacgaggacctggagcccccacccgagcatatccccccacctccccggccacccaaacgaatcctggagccacacaatgggaaatgcagggagttcttcccaaatcaccagtgggtgaaggaagagacccaggaggataaagactgccccatcaaggaagaaaaaggaagccccttaaatgccgcaccctacggcatcgaaagcatgagtcaagacactgaagttagaagtcgggtcgtggggggaagtcttcgaggtgcccaggctgcctccccagccaaaggggagccgtcactgcccgagaaggacgaggaccatgcactgagttactggaagcccttcctggtcaacatgtgcgtggctacggtcctcacggccggcgcttacctctgctacaggttcctgttcaacagcaacacatagcctgaccctcctccactccacctccacccactgtccgcctctgcccgcagagcccacgcccgactagcaggcatgccgcggtaggtaagggccgccggaccgcgtagagagccgggccccggacggacgttggttctgcactaaaacccatcttccccggatgtgtgtctcacccctcatccttttactttttgccccttccactttgagtaccaaatccacaagccattttttgaggagagtgaaagagagtaccatgctggcggcgcagagggaaggggcctacacccgtcttggggctcgccccacccagggctccctcctggagcatcccaggcgggcggcacgccaacagccccccccttgaatctgcagggagcaactctccactccatatttatttaaacaattttttccccaaaggcatccatagtgcactagcattttcttgaaccaataatgtattaaaattttttgatgtcagccttgcatcaagggctttatcaaaaagtacaataataaatcctcaggtagtactgggaatggaaggctttgccatgggcctgctgcgtcagaccagtactgggaaggaggacggttgtaagcagttgttatttagtgatattgtgggtaacgtgagaagatagaacaatgctataatatataatgaacacgtgggtatttaataagaaacatgatgtgagattactttgtcccgcttattctcctccctgttatctgctagatctagttctcaatcactgctcccccgtgtgtattagaatgcatgtaaggtcttcttgtgtcctgatgaaaaatatgtgcttgaaatgagaaactttgatctctgcttactaatgtgccccatgtccaagtccaacctgcctgtgcatgacctgatcattacatggctgtggttcctaagcctgttgctgaagtcattgtcgctcagcaatagggtgcagttttccaggaataggcatttgcctaattcctggcatgacactctagtgacttcctggtgaggcccagcctgtcctggtacagcagggtcttgctgtaactcagacattccaagggtatgggaagccatattcacacctcacgctctggacatgatttagggaagcagggacaccccccgccccccacctttgggatcagcctccgccattccaagtcaacactcttcttgagcagaccgtgatttggaagagaggcacctgctggaaaccacacttcttgaaacagcctgggtgacggtcctttaggcagcctgccgccgtctctgtcccggttcaccttgccgagagaggcgcgtctgccccaccctcaaaccctgtggggcctgatggtgctcacgactcttcctgcaaagggaactgaagacctccacattaagtggctttttaacatgaaaaacacggcagctgtagctcccgagctactctcttgccagcattttcacattttgcctttctcgtggtagaagccagtacagagaaattctgtggtgggaacattcgaggtgtcaccctgcagagctatggtgaggtgtggataaggcttaggtgccaggctgtaagcattctgagctgggcttgttgtttttaagtcctgtatatgtatgtagtagtttgggtgtgtatatatagtagcatttcaaaatggacgtactggtttaacctcctatccttggagagcagctggctctccaccttgttacacattatgttagagaggtagcgagctgctctgctatatgccttaagccaatatttactcatcaggtcattattttttacaatggccatggaataaaccatttttacaaaaataaaaacaaaaaaagcaaggtgttttggtataataccttttcaggtgtgtgtggatacgtggctgcatgaccgggtgggtgggggggagtgtctcagggtcttctgtgacctcacagaactgtcagactgtacagttttccaacttgccatattcatgatgggtttgcattttagctgcaacaataaaatttttttctaaagaacataaattt

SEQ ID NO: 458653 - DNA, 986 bp, Homo sapiens
ctcagaaaattaactgattcagagcgtgccttcctcccctctcgctccacaacaccacatagctctgcagcggtctcttcctaagtgtttggtggaacttgctggtgaagccatctagattgggcccagcggaagggctgagctgccaggatgaccccaaagggatgggatgttacagttgggtccttgggtccttgaaggcctttgctgccccagggctggatggggcagaaccagattgttggggcagggaaaagaggaaaaaaatggctgctggggtggaggaaccggcatgtccagcccctgctgcttttctcaggggtcacagaggaggtggttgggtgcaggacaggccagggcctgggcgttgctggcattgaccatccctgtgtgattgacagctgtagctggaaccactataacatgcagtacgcactagcagtttccaagcagcggggcacaaaacgctccctagacccgctgggaagtgaggaggaggcagaagcatctgaagatgacagcctgcatctgcttggaggaggaggcagagactcagaagaagagatgctggcctagagccagccggttgcagcgttggattgtgccggctaagacctgccagggagatgggacccttgtgccacctgggccagcaaagaggaggggtccagagaacagctgaaatactgtcactagtggtagtgacttgcttttcctgtgcacacatgtagcccatcaggacagcgagccgacgggtcacgccaggggccggcacgcactggcacctggccccaggagcggggccgtgtgaacggtgatgaatgttgaaaatgcgtctcagagaggtattcacatgaactttgtatgagacttatttatatttttaacataaaggtttgataaagaacttagggattaaaaaaaagatggagttttctaacgtgaggatgaagtctacacttcagattaaaaagggttatgttgta

SEQ ID NO: 458654 - DNA, 2462 bp, Homo sapiens
  misc_feature (1)..(1): n is a, c, g, or t
nccacccctacggctaggtagcgaggccgggtgttgaacgagggcgacagagagaccaccatccggggaaaagccactccggccgaggaggagaagacaggaaaagtgaagtactcacggctggccaagtacttcttcaataaagaaggggattttaacaacctgacagctgcagcatttcataagaagtctcacctcttggtcactggctttgcttctggaatcttccatcttcatgagctgccagagtttaacctcatccactccctgagcatctcagatcagagcatcgcctcagtggccatcaatagctcgggggactggattgcttttggctgttcaggcctgggccagctgctggtgtgggagtggcagagtgagtcctacgtgctcaagcagcagggccacttcaacagcatggtggccctggcctactcgcccgacggacagtacatcgtgactggcggggacgacggcaaggtcaaggtgtggaacaccctcagcggcttctgcttcgtcacttttacggagcactccagcggggtgaccggtgtgacctttactgccaccggctacgttgtggtgacctcatccatggacgggaccgtgcgagcctttgaccttcacaggtaccgaaacttccgcaccttcacctctccacgccccacccagttctcctgtgtggcggtggatgcgagcggtgagatcgtctctgcaggggcgcaggactcctttgagattttcgtgtggtccatgcagacaggcaggctccttgatgttttgtctggacacgaagggcccatcagtggtctgtgttttaacccaatgaagtccgtcctggccagtgcctcctgggacaagacggtgcgcctatgggacatgtttgacagctggaggaccaaggagacgctggccctgacctctgatgctctggctgtgacttttcgccctgatggtgcggagctggctgtggccacactgaactcacagatcaccttctgggaccctgagaacgcggtgcagacgggctccattgagggcaggcatgacctcaagactggcaggaaggagctggacaagattacagccaagcacgcggccaaggggaaggccttcaccgccctgtgctactctgcagacggccacagcatcctggcgggaggcatgtccaagttcgtgtgcatctaccacgtccgtgagcagattctcatgaagaggttcgagatctcttgcaacctgtctctggacgccatggaggaatttttgaaccgaagaaaaatgacagagtttggcaacctggcactaattgatcaggatgctgggcaggaggatggagtcgcgataccactgccaggcgtcaggaaaggtgacatgagttctcggcacttcaaacctgagatcagggtgacctcactccgcttctctcccactgggcgctgctgggcggccaccaccacggagggactcctcatctactccctggacacccgcgtgctctttgacccgtttgagctggacaccagcgtcacccccgggagggtgcgcgaggcactgcgccagcaggacttcaccagggccatcctcatggccctccggctcaacgagagcaaactggtgcaggaggccctggaggcggtgcccaggggcgagattgaagtggtcacctcctcccttcctgaactgtatgtggagaaagtgctggagtttttagcttcctcctttgaagtgtctcgccacctggaattctacctcctctggactcacaaactgctcatgttgcacggacagaagctgaagtccagagccgggacgctgctgcctgtcattcagttcctccagaagagcatccagcggcacctggacgacctgtcgaaactctgtagctggaaccactataacatgcagtacgcactagcagtttccaagcagcggggcacaaaacgctccctagacccgctgggaagtgaggaggaggcagaagcatctgaagatgacagcctgcatctgcttggaggaggaggcagagactcagaagaagagatgctggcctagagccagccggttgcagcgttggattgtgccggctaagacctgccagggagatgggacccttgtgccacctgggccagcaaagaggaggggtccagagaacagctgaaatactgtcactagtggtagtgacttgcttttcctgtgcacacatgtagcccatcaggacagcgagccgacgggtcacgccaggggccggcacgcactggcacctggccccaggagcggggccgtgtgaacggtgatgaatgttgaaaatgcgtctcagagaggtattcacatgaactttgtatgagacttatttatatttttaacataaaggtttgataaagaacttagggattaaaaaaaagatggagttttctaacgtgaggatgaagtctacacttcagattaaaaagggttatgttgta

SEQ ID NO: 458655 - DNA, 3043 bp, Homo sapiens
tgcgtgctgtgggcggtgccgcgcggacccccgggaagtgtctctgtgggcggccgccgggttgagctgcggcacacgtgcgacggccgtgatgaagttcgcttaccggttttcaaatttgctgggtacggtgtaccggcgtgggaacctaaattttacctgcaatggaaattcagttatcagtcccgtgggcaatagagtcactgtatttgaccttaaaaacaacaaatctgacacgctgcccctggccactcggtacaacgtcaagtgcgtggggctgtccccggatggccgcctcgctatcatcgtcgatgaagggggcgatgcgctgctggtcagcctggtctgcaggtctgtgctgcaccacttccacttcaagggctctgtgcacagtgtgtccttctcccctgatggcaggaagtttgttgtcacaaagggtaacattgcccagatgtatcatgcccctgggaagaagcgggagttcaacgccttcgttctggacaagacctattttgggccctacgatgagaccacctgcatcgactggacggatgactccaggtgctttgtggttgggagcaaagacatgtccacctgggtgttcggagccgagcgctgggacaacctcatctactatgcactggggggacataaggatgccatcgtggcctgcttctttgaatccaacagcctggacctgtactcactcagccaggacggagtgctgtgcatgtggcagtgtgacacgccccccgagggcttgcggctgaagccccctgcgggctggaaagcagacctgttgcagcgggaggaggaagaggaggaggaggaggaccaggagggcgacagagagaccaccatccggggaaaagccactccggccgaggaggagaagacaggaaaagtgaagtactcacggctggccaagtacttcttcaataaagaaggggattttaacaacctgacagctgcagcatttcataagaagtctcacctcttggtcactggctttgcttctggaatcttccatcttcatgagctgccagagtttaacctcatccactccctgagcatctcagatcagagcatcgcctcagtggccatcaatagctcgggggactggattgcttttggctgttcaggcctgggccagctgctggtgtgggagtggcagagtgagtcctacgtgctcaagcagcagggccacttcaacagcatggtggccctggcctactcgcccgacggacagtacatcgtgactggcggggacgacggcaaggtcaaggtgtggaacaccctcagcggcttctgcttcgtcacttttacggagcactccagcggggtgaccggtgtgacctttactgccaccggctacgttgtggtgacctcatccatggacgggaccgtgcgagcctttgaccttcacaggtaccgaaacttccgcaccttcacctctccacgccccacccagttctcctgtgtggcggtggatgcgagcggtgagatcgtctctgcaggggcgcaggactcctttgagattttcgtgtggtccatgcagacaggcaggctccttgatcttctgggaccctgagaacgcggtgcagacgggctccattgagggcaggcatgacctcaagactggcaggaaggagctggacaagattacagccaagcacgcggccaaggggaaggccttcaccgccctgtgctactctgcagacggccacagcatcctggcgggaggcatgtccaagttcgtgtgcatctaccacgtccgtgagcagattctcatgaagaggttcgagatctcttgcaacctgtctctggacgccatggaggaatttttgaaccgaagaaaaatgacagagtttggcaacctggcactaattgatcaggatgctgggcaggaggatggagtcgcgataccactgccaggcgtcaggaaaggtgacatgagttctcggcacttcaaacctgagatcagggtgacctcactccgcttctctcccactgggcgctgctgggcggccaccaccacggagggactcctcatctactccctggacacccgcgtgctctttgacccgtttgagctggacaccagcgtcacccccgggagggtgcgcgaggcactgcgccagcaggacttcaccagggccatcctcatggccctccggctcaacgagagcaaactggtgcaggaggccctggaggcggtgcccaggggcgagattgaagtggtcacctcctcccttcctgaactgtatgtggagaaagtgctggagtttttagcttcctcctttgaagtgtctcgccacctggaattctacctcctctggactcacaaactgctcatgttgcacggacagaagctgaagtccagagccgggacgctgctgcctgtcattcagttcctccagaagagcatccagcggcacctggacgacctgtcgaaactctgtagctggaaccactataacatgcagtacgcactagcagtttccaagcagcggggcacaaaacgctccctagacccgctgggaagtgaggaggaggcagaagcatctgaagatgacagcctgcatctgcttggaggaggaggcagagactcagaagaagagatgctggcctagagccagccggttgcagcgttggattgtgccggctaagacctgccagggagatgggacccttgtgccacctgggccagcaaagaggaggggtccagagaacagctgaaatactgtcactagtggtagtgacttgcttttcctgtgcacacatgtagcccatcaggacagcgagccgacgggtcacgccaggggccggcacgcactggcacctggccccaggagcggggccgtgtgaacggtgatgaatgttgaaaatgcgtctcagagaggtattcacatgaactttgtatgagacttatttatatttttaacataaaggtttgataaagaacttagggattaaaaaaaagatggagttttctaacgtgaggatgaagtctacacttcagattaaaaagggttatgttgta

SEQ ID NO: 458656 - DNA, 2290 bp, Homo sapiens
  misc_feature (32)..(32): n is a, c, g, or t
caaatgtaaggctaggtacgaggctgggtgtnactggctttgcttctggaatcttccatcttcatgagctgccagagtttaacctcatccactccctgagcatctcagatcagagcatcgcctcagtggccatcaatagctcgggggactggattgcttttggctgttcaggcctgggccagctgctggtgtgggagtggcagagtgagtcctacgtgctcaagcagcagggccacttcaacagcatggtggccctggcctactcgcccgacggacagtacatcgtgactggcggggacgacggcaaggtcaaggtgtggaacaccctcagcggcttctgcttcgtcacttttacggagcactccagcggggtgaccggtgtgacctttactgccaccggctacgttgtggtgacctcatccatggacgggaccgtgcgagcctttgaccttcacaggtaccgaaacttccgcaccttcacctctccacgccccacccagttctcctgtgtggcggtggatgcgagcggtgagatcgtctctgcaggggcgcaggactcctttgagattttcgtgtggtccatgcagacaggcaggctccttgatgttttgtctggacacgaagggcccatcagtggtctgtgttttaacccaatgaagtccgtcctggccagtgcctcctgggacaagacggtgcgcctatgggacatgtttgacagctggaggaccaaggagacgctggccctgacctctgatgctctggctgtgacttttcgccctgatggtgcggagctggctgtggccacactgaactcacagatcaccttctgggaccctgagaacgcggtgcagacgggctccattgagggcaggcatgacctcaagactggcaggaaggagctggacaagattacagccaagcacgcggccaaggggaaggccttcaccgccctgtgctactctgcagacggccacagcatcctggcgggaggcatgtccaagttcgtgtgcatctaccacgtccgtgagcagattctcatgaagaggttcgagatctcttgcaacctgtctctggacgccatggaggaatttttgaaccgaagaaaaatgacagagtttggcaacctggcactaattgatcaggatgctgggcaggaggatggagtcgcgataccactgccaggcgtcaggaaaggtgacatgagttctcggcacttcaaacctgagatcagggtgacctcactccgcttctctcccactgggcgctgctgggcggccaccaccacggagggactcctcatctactccctggacacccgcgtgctctttgacccgtttgagctggacaccagcgtcacccccgggagggtgcgcgaggcactgcgccagcaggacttcaccagggccatcctcatggccctccggctcaacgagagcaaactggtgcaggaggccctggaggcggtgcccaggggcgagattgaagtggtcacctcctcccttcctgaactgtatgtggagaaagtgctggagtttttagcttcctcctttgaagtgtctcgccacctggaattctacctcctctggactcacaaactgctcatgttgcacggacagaagctgaagtccagagccgggacgctgctgcctgtcattcagttcctccagaagagcatccagcggcacctggacgacctgtcgaaactctgtagctggaaccactataacatgcagtacgcactagcagtttccaagcagcggggcacaaaacgctccctagacccgctgggaagtgaggaggaggcagaagcatctgaagatgacagcctgcatctgcttggaggaggaggcagagactcagaagaagagatgctggcctagagccagccggttgcagcgttggattgtgccggctaagacctgccagggagatgggacccttgtgccacctgggccagcaaagaggaggggtccagagaacagctgaaatactgtcactagtggtagtgacttgcttttcctgtgcacacatgtagcccatcaggacagcgagccgacgggtcacgccaggggccggcacgcactggcacctggccccaggagcggggccgtgtgaacggtgatgaatgttgaaaatgcgtctcagagaggtattcacatgaactttgtatgagacttatttatatttttaacataaaggtttgataaagaacttagggattaaaaaaaagatggagttttctaacgtgaggatgaagtctacacttcagattaaaaagggttatgttgta

SEQ ID NO: 458657 - DNA, 2336 bp, Homo sapiens
tgcgtgctgtgggcggtgccgcgcggacccccgggaagtgtctctgtgggcggccgccgggttgagctgcggcacacgtgcgacggccgtgatgaagttcgcttaccggttttcaaatttgctgggtacggtgtaccggcgtgggaacctaaattttacctgcaatggaaattcagttatcagtcccgtgggcaatagagtcactgtatttgaccttaaaaacaacaaatctgacacgctgcccctggccactcggtacaacgtcaagtgcgtggggctgtccccggatggccgcctcgctatcatcgtcgatgaagggggcgatgcgctgctggtcagcctggtctgcaggtctgtgctgcaccacttccacttcaagggctctgtgcacagtgtgtccttctcccctgatggcaggaagtttgttgtcacaaagggtaacattgcccagatgtatcatgcccctgggaagaagcgggagttcaacgccttcgttctggacaagacctattttgggccctacgatgagaccacctgcatcgactggacggatgactccaggtgctttgtggttgggagcaaagacatgtccacctgggtgttcggagccgagcgctgggacaacctcatctactatgcactggggggacataaggatgccatcgtggcctgcttctttgaatccaacagcctggacctgtactcactcagccaggacggagtgctgtgcatgtggcagtgtgacacgccccccgagggcttgcggctgaagccccctgcgggctggaaagcagacctgttgcagcgggaggaggaagaggaggaggaggaggaccaggagggcgacagagagaccaccatccggggaaaagccactccggccgaggaggagaagacaggaaaagtgaagtactcacggctggccaagtacttcttcaataaagaaggggattttaacaacctgacagctgcagcatttcataagaagtctcacctcttggtcactggctttgcttctggaatcttccatcttcatgagctgccagagtttaacctcatccactccctgagcatctcagatcagagcatcgcctcagtggccatcaatagctcgggggactggattgcttttggctgttcaggcctgggccagctgctggtgtgggagtggcagagtgagtcctacgtgctcaagcagcagggccacttcaacagcatggtggccctggcctactcgcccgacggacagtacatcgtgactggcggggacgacggcaaggtcaaggtgtggaacaccctcagcggcttctgcttcgtcacttttacggagcactccagcggggtgaccggtgtgacctttactgccaccggctacgttgtggtgacctcatccatggacgggaccgtgcgagcctttgaccttcacaggtaccgaaacttccgcaccttcacctctccacgccccacccagttctcctgtgtggcggtggatgcgagcggtgagatcgtctctgcaggggcgcaggactcctttgagattttcgtgtggtccatgcagacaggcaggctccttgatgttttgtctggacacgaagggcccatcagtggtctgtgttttaacccaatgaagtccgtcctggccagtgcctcctgggacaagacggtgcgcctatgggacatgtttgacagctggaggaccaaggagacgctggccctgacctctgatgctctggctgtgacttttcgccctgatggtgcggagctggctgtggccacactgaactcacagatcaccttctgggaccctgagaacgcggtgcagacgggctccattgagggcaggcatgacctcaagactggcaggaaggagctggacaagattacagccaagcacgcggccaaggggaaggccttcaccgccctgtgctactctgcagacggccacagcatcctggcgggaggcatgtccaagttcgtgtgcatctaccacgtccgtgagcagattctcatgaagaggttcgagaacagctgaaatactgtcactagtggtagtgacttgcttttcctgtgcacacatgtagcccatcaggacagcgagccgacgggtcacgccaggggccggcacgcactggcacctggccccaggagcggggccgtgtgaacggtgatgaatgttgaaaatgcgtctcagagaggtattcacatgaactttgtatgagacttatttatatttttaacataaaggtttgataaagaacttagggattaaaaaaaagatggagttttctaacgtgaggatgaagtctacacttcagattaaaaagggttatgttgta

SEQ ID NO: 458658 - DNA, 362 bp, Homo sapiens
cacctgctttggtcactgatgttttactgggacattttactgggcgtttttttgttggcggatccttctggctgtctctagtgatccgtgcagcactgagtaggtgcagcagagaccacagggcctgcggagctgaagacgcctgagctagacagaagacttggctggctcccggcgtcaagagaggacgacgcatgcgtgtacatatttgcttatatgtgcatccctgggagagtaacttctgggatgatccattcattccttcccaggggagtagtggggtgggggctagaggcagacgtcccggttcctcctgatttttgcactttgtcccaggggaatgtacttaatactgtttcttt

SEQ ID NO: 458659 - DNA, 464 bp, Homo sapiens
tatgagacttatttatatttttaacataaaggtttgataaagaacttagggattaaaaaaaagatggagttttctaacgtgaggatgaagtctacacttcagattaaaaagggttatgttgtatcctgctgtcttgtgggggctcaagacctgcctgccttaccaccagggcctccgtcctggggaagcaggctgacagagcagggtgctcctgctgtctagcgggggctctgccttgtgacctgtgcatatccttggggtcaggggcacagagcctctccctgacctcttggggatgctttggagtctggggctgggattggcctgtcttggtgagctcactcagacctgcaccagctctgcgtgggccacacggaggaggagacagctcctcccctctgcagtgcccttgggaatagtcatcatgagagaggcttgggtctccatcatggtagggcatcctg

SEQ ID NO: 458660 - DNA, 3261 bp, Homo sapiens
tgcgtgctgtgggcggtgccgcgcggacccccgggaagtgtctctgtgggcggccgccgggttgagctgcggcacacgtgcgacggccgtgatgaagttcgcttaccggttttcaaatttgctgggtacggtgtaccggcgtgggaacctaaattttacctgcaatggaaattcagttatcagtcccgtgggcaatagagtcactgtatttgaccttaaaaacaacaaatctgacacgctgcccctggccactcggtacaacgtcaagtgcgtggggctgtccccggatggccgcctcgctatcatcgtcgatgaagggggcgatgcgctgctggtcagcctggtctgcaggtctgtgctgcaccacttccacttcaagggctctgtgcacagtgtgtccttctcccctgatggcaggaagtttgttgtcacaaagggtaacattgcccagatgtatcatgcccctgggaagaagcgggagttcaacgccttcgttctggacaagacctattttgggccctacgatgagaccacctgcatcgactggacggatgactccaggtgctttgtggttgggagcaaagacatgtccacctgggtgttcggagccgagcgctgggacaacctcatctactatgcactggggggacataaggatgccatcgtggcctgcttctttgaatccaacagcctggacctgtactcactcagccaggacggagtgctgtgcatgtggcagtgtgacacgccccccgagggcttgcggctgaagccccctgcgggctggaaagcagacctgttgcagcgggaggaggaagaggaggaggaggaggaccaggagggcgacagagagaccaccatccggggaaaagccactccggccgaggaggagaagacaggaaaagtgaagtactcacggctggccaagtacttcttcaataaagaaggggattttaacaacctgacagctgcagcatttcataagaagtctcacctcttggtcactggctttgcttctggaatcttccatcttcatgagctgccagagtttaacctcatccactccctgagcatctcagatcagagcatcgcctcagtggccatcaatagctcgggggactggattgcttttggctgttcaggcctgggccagctgctggtgtgggagtggcagagtgagtcctacgtgctcaagcagcagggccacttcaacagcatggtggccctggcctactcgcccgacggacagtacatcgtgactggcggggacgacggcaaggtcaaggtgtggaacaccctcagcggcttctgcttcgtcacttttacggagcactccagcggggtgaccggtgtgacctttactgccaccggctacgttgtggtgacctcatccatggacgggaccgtgcgagcctttgaccttcacaggtaccgaaacttccgcaccttcacctctccacgccccacccagttctcctgtgtggcggtggatgcgagcggtgagatcgtctctgcaggggcgcaggactcctttgagattttcgtgtggtccatgcagacaggcaggctccttgatgttttgtctggacacgaagggcccatcagtggtctgtgttttaacccaatgaagtccgtcctggccagtgcctcctgggacaagacggtgcgcctatgggacatgtttgacagctggaggaccaaggagacgctggccctgacctctgatgctctggctgtgacttttcgccctgatggtgcggagctggctgtggccacactgaactcacagatcaccttctgggaccctgagaacgcggtgcagacgggctccattgagggcaggcatgacctcaagactggcaggaaggagctggacaagattacagccaagcacgcggccaaggggaaggccttcaccgccctgtgctactctgcagacggccacagcatcctggcgggaggcatgtccaagttcgtgtgcatctaccacgtccgtgagcagattctcatgaagaggttcgagatctcttgcaacctgtctctggacgccatggaggaatttttgaaccgaagaaaaatgacagagtttggcaacctggcactaattgatcaggatgctgggcaggaggatggagtcgcgataccactgccaggcgtcaggaaaggtgacatgagttctcggcacttcaaacctgagatcagggtgacctcactccgcttctctcccactgggcgctgctgggcggccaccaccacggagggactcctcatctactccctggacacccgcgtgctctttgacccgtttgagctggacaccagcgtcacccccgggagggtgcgcgaggcactgcgccagcaggacttcaccagggccatcctcatggccctccggctcaacgagagcaaactggtgcaggaggccctggaggcggtgcccaggggcgagattgaagtggtcacctcctcccttcctgaactgtatgtggagaaagtgctggagtttttagcttcctcctttgaagtgtctcgccacctggaattctacctcctctggactcacaaactgctcatgttgcacggacagaagctgaagtccagagccgggacgctgctgcctgtcattcagttcctccagaagagcatccagcggcacctggacgacctgtcgaaactctgtagctggaaccactataacatgcagtacgcactagcagtttccaagcagcggggcacaaaacgctccctagacccgctgggaagtgaggaggaggcagaagcatctgaagatgacagcctgcatctgcttggaggaggaggcagagactcagaagaagagatgctggcctagagccagccggttgcagcgttggattgtgccggctaagacctgccagggagatgggacccttgtgccacctgggccagcaaagaggaggggtccagagaacagctgaaatactgtcactagtggtagtgacttgcttttcctgtgcacacatgtagcccatcaggacagcgagccgacgggtcacgccaggggccggcacgcactggcacctggccccaggagcggggccgtgtgaacggtgatgaatgttgaaaatgcgtctcagagaggtattcacatgaactttgtatgagacttatttatatttttaacataaaggtttgataaagaacttagggattaaaaaaaagatggagttttctaacgtgaggatgaagtctacacttcagattaaaaagggttatgttgta

SEQ ID NO: 458661 - DNA, 3380 bp, Homo sapiens
tgcgtgctgtgggcggtgccgcgcggacccccgggaagtgtctctgtgggcggccgccgggttgagctgcggcacacgtgcgacggccgtgatgaagttcgcttaccggttttcaaatttgctgggtacggtgtaccggcgtgggaacctaaattttacctgcaatggaaattcagttatcagtcccgtgggcaatagagtcactgtatttgaccttaaaaacaacaaatctgacacgctgcccctggccactcggtacaacgtcaagtgcgtggggctgtccccggatggccgcctcgctatcatcgtcgatgaagggggcgatgcgctgctggtcagcctggtctgcaggtctgtgctgcaccacttccacttcaagggctctgtgcacagtgtgtccttctcccctgatggcaggaagtttgttgtcacaaagggtaacattgcccagatgtatcatgcccctgggaagaagcgggagttcaacgccttcgttctggacaagacctattttgggccctacgatgagaccacctgcatcgactggacggatgactccaggtgctttgtggttgggagcaaagacatgtccacctgggtgttcggagccgagcgctgggacaacctcatctactatgcactggggggacataaggatgccatcgtggcctgcttctttgaatccaacagcctggacctgtactcactcagccaggacggagtgctgtgcatgtggcagtgtgacacgccccccgagggcttgcggctgaagccccctgcgggctggaaagcagacctgttgcagcgggaggaggaagaggaggaggaggaggaccaggagggcgacagagagaccaccatccggggaaaagccactccggccgaggaggagaagacaggaaaagtgaagtactcacggctggccaagtacttcttcaataaagaaggggattttaacaacctgacagctgcagcatttcataagaagtctcacctcttggtcactggctttgcttctggaatcttccatcttcatgagctgccagagtttaacctcatccactccctgagcatctcagatcagagcatcgcctcagtggccatcaatagctcgggggactggattgcttttggctgttcaggcctgggccagctgctggtgtgggagtggcagagtgagtcctacgtgctcaagcagcagggccacttcaacagcatggtggccctggcctactcgcccgacggacagtacatcgtgactggcggggacgacggcaaggtcaaggtgtggaacaccctcagcggcttctgcttcgtcacttttacggagcactccagcggggtgaccggtgtgacctttactgccaccggctacgttgtggtgacctcatccatggacgggaccgtgcgagcctttgaccttcacaggtaccgaaacttccgcaccttcacctctccacgccccacccagttctcctgtgtggcggtggatgcgagcggtgagatcgtctctgcaggggcgcaggactcctttgagattttcgtgtggtccatgcagacaggcaggctccttgatgttttgtctggacacgaagggcccatcagtggtctgtgttttaacccaatgaagtccgtcctggccagtgcctcctgggacaagacggtgcgcctatgggacatgtttgacagctggaggaccaaggagacgctggccctgacctctgatgctctggctgtgacttttcgccctgatggtgcggagctggctgtggccacactgaactcacagatcaccttctgggaccctgagaacgcggtgcagacgggctccattgagggcaggcatgacctcaagactggcaggaaggagctggacaagattacagccaagcacgcggccaaggggaaggccttcaccgccctgtgctactctgcagacggccacagcatcctggcgggaggcatgtccaagttcgtgtgcatctaccacgtccgtgagcagattctcatgaagaggttcgagatctcttgcaacctgtctctggacgccatggaggaatttttgaaccgaagaaaaatgacagagtttggcaacctggcactaattgatcaggatgctgggcaggaggatggagtcgcgataccactgccaggcgtcaggaaaggtgacatgagttctcggcacttcaaacctgagatcagggtgacctcactccgcttctctcccactgtgatccgtgcagcactgagtaggtgcagcagagaccacagggcctgcggagctgaagacgcctgagctagacagaagacttggctggctcccggcgtcaagagaggacgacgcatgcgtggcgctgctgggcggccaccaccacggagggactcctcatctactccctggacacccgcgtgctctttgacccgtttgagctggacaccagcgtcacccccgggagggtgcgcgaggcactgcgccagcaggacttcaccagggccatcctcatggccctccggctcaacgagagcaaactggtgcaggaggccctggaggcggtgcccaggggcgagattgaagtggtcacctcctcccttcctgaactgtatgtggagaaagtgctggagtttttagcttcctcctttgaagtgtctcgccacctggaattctacctcctctggactcacaaactgctcatgttgcacggacagaagctgaagtccagagccgggacgctgctgcctgtcattcagttcctccagaagagcatccagcggcacctggacgacctgtcgaaactctgtagctggaaccactataacatgcagtacgcactagcagtttccaagcagcggggcacaaaacgctccctagacccgctgggaagtgaggaggaggcagaagcatctgaagatgacagcctgcatctgcttggaggaggaggcagagactcagaagaagagatgctggcctagagccagccggttgcagcgttggattgtgccggctaagacctgccagggagatgggacccttgtgccacctgggccagcaaagaggaggggtccagagaacagctgaaatactgtcactagtggtagtgacttgcttttcctgtgcacacatgtagcccatcaggacagcgagccgacgggtcacgccaggggccggcacgcactggcacctggccccaggagcggggccgtgtgaacggtgatgaatgttgaaaatgcgtctcagagaggtattcacatgaactttgtatgagacttatttatatttttaacataaaggtttgataaagaacttagggattaaaaaaaagatggagttttctaacgtgaggatgaagtctacacttcagattaaaaagggttatgttgta

SEQ ID NO: 458662 - DNA, 2740 bp, Homo sapiens
tgcgtgctgtgggcggtgccgcgcggacccccgggaagtgtctctgtgggcggccgccgggttgagctgcggcacacgtgcgacggccgtgatgaagttcgcttaccggttttcaaatttgctgggtacggtgtaccggcgtgggaacctaaattttacctgcaatggaaattcagttatcagtcccgtgggcaatagagtcactgtatttgaccttaaaaacaacaaatctgacacgctgcccctggccactcggtacaacgtcaagtgcgtggggctgtccccggatggccgcctcgctatcatcgtcgatgaaggagggcgacagagagaccaccatccggggaaaagccactccggccgaggaggagaagacaggaaaagtgaagtactcacggctggccaagtacttcttcaataaagaaggggattttaacaacctgacagctgcagcatttcataagaagtctcacctcttggtcactggctttgcttctggaatcttccatcttcatgagctgccagagtttaacctcatccactccctgagcatctcagatcagagcatcgcctcagtggccatcaatagctcgggggactggattgcttttggctgttcaggcctgggccagctgctggtgtgggagtggcagagtgagtcctacgtgctcaagcagcagggccacttcaacagcatggtggccctggcctactcgcccgacggacagtacatcgtgactggcggggacgacggcaaggtcaaggtgtggaacaccctcagcggcttctgcttcgtcacttttacggagcactccagcggggtgaccggtgtgacctttactgccaccggctacgttgtggtgacctcatccatggacgggaccgtgcgagcctttgaccttcacaggtaccgaaacttccgcaccttcacctctccacgccccacccagttctcctgtgtggcggtggatgcgagcggtgagatcgtctctgcaggggcgcaggactcctttgagattttcgtgtggtccatgcagacaggcaggctccttgatgttttgtctggacacgaagggcccatcagtggtctgtgttttaacccaatgaagtccgtcctggccagtgcctcctgggacaagacggtgcgcctatgggacatgtttgacagctggaggaccaaggagacgctggccctgacctctgatgctctggctgtgacttttcgccctgatggtgcggagctggctgtggccacactgaactcacagatcaccttctgggaccctgagaacgcggtgcagacgggctccattgagggcaggcatgacctcaagactggcaggaaggagctggacaagattacagccaagcacgcggccaaggggaaggccttcaccgccctgtgctactctgcagacggccacagcatcctggcgggaggcatgtccaagttcgtgtgcatctaccacgtccgtgagcagattctcatgaagaggttcgagatctcttgcaacctgtctctggacgccatggaggaatttttgaaccgaagaaaaatgacagagtttggcaacctggcactaattgatcaggatgctgggcaggaggatggagtcgcgataccactgccaggcgtcaggaaaggtgacatgagttctcggcacttcaaacctgagatcagggtgacctcactccgcttctctcccactgggcgctgctgggcggccaccaccacggagggactcctcatctactccctggacacccgcgtgctctttgacccgtttgagctggacaccagcgtcacccccgggagggtgcgcgaggcactgcgccagcaggacttcaccagggccatcctcatggccctccggctcaacgagagcaaactggtgcaggaggccctggaggcggtgcccaggggcgagattgaagtggtcacctcctcccttcctgaactgtatgtggagaaagtgctggagtttttagcttcctcctttgaagtgtctcgccacctggaattctacctcctctggactcacaaactgctcatgttgcacggacagaagctgaagtccagagccgggacgctgctgcctgtcattcagttcctccagaagagcatccagcggcacctggacgacctgtcgaaactctgtagctggaaccactataacatgcagtacgcactagcagtttccaagcagcggggcacaaaacgctccctagacccgctgggaagtgaggaggaggcagaagcatctgaagatgacagcctgcatctgcttggaggaggaggcagagactcagaagaagagatgctggcctagagccagccggttgcagcgttggattgtgccggctaagacctgccagggagatgggacccttgtgccacctgggccagcaaagaggaggggtccagagaacagctgaaatactgtcactagtggtagtgacttgcttttcctgtgcacacatgtagcccatcaggacagcgagccgacgggtcacgccaggggccggcacgcactggcacctggccccaggagcggggccgtgtgaacggtgatgaatgttgaaaatgcgtctcagagaggtattcacatgaactttgtatgagacttatttatatttttaacataaaggtttgataaagaacttagggattaaaaaaaagatggagttttctaacgtgaggatgaagtctacacttcagattaaaaagggttatgttgta

SEQ ID NO: 458663 - DNA, 2072 bp, Homo sapiens
  misc_feature (32)..(32): n is a, c, g, or t
caaatgtaaggctaggtacgaggctgggtgtnactggctttgcttctggaatcttccatcttcatgagctgccagagtttaacctcatccactccctgagcatctcagatcagagcatcgcctcagtggccatcaatagctcgggggactggattgcttttggctgttcaggcctgggccagctgctggtgtgggagtggcagagtgagtcctacgtgctcaagcagcagggccacttcaacagcatggtggccctggcctactcgcccgacggacagtacatcgtgactggcggggacgacggcaaggtcaaggtgtggaacaccctcagcggcttctgcttcgtcacttttacggagcactccagcggggtgaccggtgtgacctttactgccaccggctacgttgtggtgacctcatccatggacgggaccgtgcgagcctttgaccttcacaggtaccgaaacttccgcaccttcacctctccacgccccacccagttctcctgtgtggcggtggatgcgagcggtgagatcgtctctgcaggggcgcaggactcctttgagattttcgtgtggtccatgcagacaggcaggctccttgatcttctgggaccctgagaacgcggtgcagacgggctccattgagggcaggcatgacctcaagactggcaggaaggagctggacaagattacagccaagcacgcggccaaggggaaggccttcaccgccctgtgctactctgcagacggccacagcatcctggcgggaggcatgtccaagttcgtgtgcatctaccacgtccgtgagcagattctcatgaagaggttcgagatctcttgcaacctgtctctggacgccatggaggaatttttgaaccgaagaaaaatgacagagtttggcaacctggcactaattgatcaggatgctgggcaggaggatggagtcgcgataccactgccaggcgtcaggaaaggtgacatgagttctcggcacttcaaacctgagatcagggtgacctcactccgcttctctcccactgggcgctgctgggcggccaccaccacggagggactcctcatctactccctggacacccgcgtgctctttgacccgtttgagctggacaccagcgtcacccccgggagggtgcgcgaggcactgcgccagcaggacttcaccagggccatcctcatggccctccggctcaacgagagcaaactggtgcaggaggccctggaggcggtgcccaggggcgagattgaagtggtcacctcctcccttcctgaactgtatgtggagaaagtgctggagtttttagcttcctcctttgaagtgtctcgccacctggaattctacctcctctggactcacaaactgctcatgttgcacggacagaagctgaagtccagagccgggacgctgctgcctgtcattcagttcctccagaagagcatccagcggcacctggacgacctgtcgaaactctgtagctggaaccactataacatgcagtacgcactagcagtttccaagcagcggggcacaaaacgctccctagacccgctgggaagtgaggaggaggcagaagcatctgaagatgacagcctgcatctgcttggaggaggaggcagagactcagaagaagagatgctggcctagagccagccggttgcagcgttggattgtgccggctaagacctgccagggagatgggacccttgtgccacctgggccagcaaagaggaggggtccagagaacagctgaaatactgtcactagtggtagtgacttgcttttcctgtgcacacatgtagcccatcaggacagcgagccgacgggtcacgccaggggccggcacgcactggcacctggccccaggagcggggccgtgtgaacggtgatgaatgttgaaaatgcgtctcagagaggtattcacatgaactttgtatgagacttatttatatttttaacataaaggtttgataaagaacttagggattaaaaaaaagatggagttttctaacgtgaggatgaagtctacacttcagattaaaaagggttatgttgta

SEQ ID NO: 458664 - DNA, 4303 bp, Homo sapiens
cagtgctgcgcgggaaggcaccaccaccacagccgccgccgctggccaggctgctggacaagacgggcccgtcggccacctcgccagctcaggcacccgctgcagccgtcgctgtctcctcccagaccggtccccatggaggagatggaagaggagttgaaatgccccgtgtgcggctccttctatcgggagcccatcatcctgccctgctctcacaatttgtgtcaggcgtgcgcccgcaacatcctggtgcagaccccagagtctgaatccccccagagccatcgggccgcgggctccggggtctccgactatgactatctggacctggacaagatgagcctatacagcgaggcggacagcggctatggctcctacggggggttcgccagcgcccccactaccccgtgccagaagtcccccaacggcgtccgcgtgtttcccccggctatgccgccaccggccacccacttgtcaccggccctggccccggtgccccgcaactcctgtatcacctgcccccagtgtcaccgcagcctcatcctggatgaccgggggctccgcggcttccccaagaatcgcgtactggaaggggtaattgaccgctaccagcagagcaaagccgcggccctcaagtgccagctctgcgagaaggcgcccaaggaagccaccgtcatgtgcgaacagtgcgatgtcttctactgcgatccgtgccgcctgcgctgccacccgccccgggggcccctagccaagcaccgcctggtgcccccggcccagggtcgtgtgagccggaggctgagcccacgcaaggtctccacctgcacagaccacgagctggagaaccacagcatgtactgcgtgcaatgcaagatgcccgtgtgctaccagtgcttggaggagggcaaacactccagccacgaagtcaaggctctgggggccatgtggaaactacataagagccagctctcccaggcgctgaacggactgtcagacagggccaaagaagccaaggagtttctggtacagctgcgcaacatggtccagcagatccaggagaacagtgtggagtttgaagcctgtctggtggcccaatgtgatgccctcatcgatgccctcaacagaagaaaagcccagctgctggcccgcgtcaacaaggagcatgagcacaagctgaaggtggttcgagatcagatctctcactgcacagtgaaattgcgccagaccacaggtctcatggagtactgcttggaggtgattaaggaaaatgatcctagtggttttttgcagatttctgacgccctcataagaagagtgcacctgactgaggatcagtggggtaaaggcacactcactccaaggatgaccacggactttgacttgagtctggacaacagccctctgctgcaatccatccaccagctggatttcgtgcaagtgaaagcttcctctccagtcccagcaacccctatcctacagctggaggaatgttgtacccacaacaacagcgctacgttgtcctggaaacagccacctctgtccacggtgcccgccgatggatacattctggagctggatgatggcaacggtggtcaattccgggaggtgtatgtggggaaggagacaatgtgcactgtggatggtcttcacttcaacagcacatacaacgctcgggtcaaggccttcaacaaaacaggagtcagcccgtacagcaagaccctggtcctccaaacgtctgaggtggcctggtttgctttcgaccctggctcggcgcactcggacatcatcctctccaatgacaacctgacagtgacctgtagtagctatgatgaccgggtggtgctagggaagactggcttctccaagggcatccactactgggagctcacggtagatcgctatgacaaccaccctgatcctgcctttggtgtggctcgcatggacgtgatgaaggatgtgatgttaggaaaagacgacaaagcttgggcaatgtatgtggacaataaccggagctggttcatgcacaacaactcgcacaccaacagaactgagggagggatcacaaaaggggccacaattggggtcctcctcgacttcaatagaaaaaacttgacattttttatcaacgatgaacaacaaggtcccatagcatttgataacgtggagggcctcttcttccctgcggtcagcctgaacaggaacgtgcaggtcacgctgcacaccgggctcccagtccccgacttctactccagcagagcatcaatagcctaaggatgtgccgtggaggcgccagctgcctgttcttacctccgcctgcgagagccacagcaaggagctcagccagccgtggtggggtgcagagttggcaggagtgggagaaggaggagagaaaagctggtcctctgcagtctttacacccacagctctgcccttttccctttcaacctctcctccgctgtcatgcctgcttccgcttccatgtccaacaattctaaccaacaaaggacctagacagcccaccaagtcacttggttcccactcccagattttgcttttatttaacttaattttttatgtaggtgagttatattttctttcttttctgatcaggttattggtgacttactggactggcaccgccaggagaaaattctcctgctaactttttttcttaagctttctgtcaaacaatgaggttgtagggggaggtagggaagaatgagctgaatttgtagcatacagcttacctgctagaatgttcttaccctcttacctctcctgtagcgttagctctgcagagctaagctttgggagaatgaatctatcactgagaagttttactactcattgaagcacaaaaatatccgctacacaggttcacatcagggtaggatcgttaggatggctctataattaggacaggccagaaccctggccactgtataaaattggaaagtctctaagacacaggcaaaccaggggacttaatgatttggttcgtttatttaataaaagcttttaattgagaacctactattgaccaggcactgttcaagacactagaacattatgttctagacactgtggggacacagtggtgaacagacaggcatggtctctgcccttcggagcttatattccagtaggagaaaaagcaaaaataaaataattataaatggtcatatgtactagaaaggaaatgggcaagggtcaaagagactcatgggcaagatctttcaggcttcctagaatgatgctaaaaatccacacattctggccatagcaccagaaatgtaccaactcaatgccttttcagctgcactatttaattatggtacctgctgccactcatcacagagcccttcttggtagaaatgatgtcagcattcttatttgctgatgctgctatgataccacgccttaaaaattgacagttgaaaaaaaaaagagtgaccagagggcaaaggacccattctcagtaatgggagatcttgagttgcagtccacagcattcacattctcaggataaacatgcttgtctccatatatactatctgtgcctgttatgaatgaaaaatccatccactctgctgccattcacagcctaattttctggagtagtccaaacaatgtttggaaaaacatgggactgtatgtcattactatgactgatagcagaataataatgcatcttacttctatatagagatagacttacataggttacccttgaaattcattagtttgtcataaagttttaggaaaggtaggacccggaaagaagttctaattagttgtctaaatatttttcagtgagccaagaaattcaccatgaaaaaacaagaataacaaatagaagggaagagataggatgggaaagctaacaaattaaagttttggcaaaaaggaatatatgtaaatagctaattatttacttttgtgcttactttatttagattatttctatcagttacaatctttttctagttaagtgtacctaatttatggaatgggtgctatcctgtttatgtgtgtcttggtttttcttggctacagaaaaactgttgcagggcaacactagtttgatatttgatttactctccaatgagactcaatggctgggccgtggtagactcatagttcctcttgttctttattaaattcatcctgctaattagatttctagtgacttgtaacatgtagtttacactgaattgcaattacagatgcatacaactactatactagaaaaaattgtcatttctgatgtgccaataaatgatttttatgagagaataaaaaaact

SEQ ID NO: 458665 - DNA, 391 bp, Homo sapiens
aatctccccggaatcctttaaaagaggcaggtgactaagaaccatataatcaaatgtcaccaggatttgagagcccaccatggtgagcagcctgttaccataggcaggattcttcttgaattccgtttaatgcctgctagcctagatgtttaaagcgaagcaaacagaacactttttgagttagggacacacccacggtacactgtgtaaagggacagggggatgcacgatgcctctcaggactcacagtctcattccccaggtcacgctgcacaccgggctcccagtccccgacttctactccagcagagcatcaatagcctaaggatgtgccgtggaggcgccagctgcctgttcttacctccgcctgcgagagccacagcaaggagct

SEQ ID NO: 458666 - DNA, 704 bp, Homo sapiens
ggctcacagagctagcgcctctctgggtgtccgtgccagtgctgcgcgggaaggcaccaccaccacagccgccgccgctggccaggctgctggacaagacgggcccgtcggccacctcgccagctcaggcacccgctgcagccgtcgctgtctcctcccagaccggtccccatggaggagatggaagaggagttgaaatgccccgtgtgcggctccttctatcgggagcccatcatcctgccctgctctcacaatttgtgtcaggcgtgcgcccgcaacatcctggtgcagaccccagagtctgaatccccccagagccatcgggccgcgggctccggggtctccgactatgactatctggacctggacaagatgagcctatacagcgaggcggacagcggctatggctcctacggggggttcgccagcgcccccactaccccgtgccagaagtcccccaacggcgtccgcgtgtttcccccggctatgccgccaccggccacccacttgtcaccggccctggccccggtgccccgcaactcctgtatcacctgcccccagtgtcaccgcagcctcatcctggatgaccgggggctccgcggcttccccaagaatcgcgtactggaaggggtaattgaccgctaccagcagagcaaagccgcggccctcaagtgccagctctgcgagaaggcgcccaaggaagc

SEQ ID NO: 458667 - DNA, 3724 bp, Homo sapiens
cagtgctgcgcgggaaggcaccaccaccacagccgccgccgctggccaggctgctggacaagacgggcccgtcggccacctcgccagctcaggcacccgctgcagccgtcgctgtctcctcccagaccggtccccatggaggagatggaagaggagttgaaatgccccgtgtgcggctccttctatcgggagcccatcatcctgccctgctctcacaatttgtgtcaggcgtgcgcccgcaacatcctggtgcagaccccagagtctgaatccccccagagccatcgggccgcgggctccggggtctccgactatgactatctggacctggacaagatgagcctatacagcgaggcggacagcggctatggctcctacggggggttcgccagcgcccccactaccccgtgccagaagtcccccaacggcgtccgcgtgtttcccccggctatgccgccaccggccacccacttgtcaccggccctggccccggtgccccgcaactcctgtatcacctgcccccagtgtcaccgcagcctcatcctggatgaccgggggctccgcggcttccccaagaatcgcgtactggaaggggtaattgaccgctaccagcagagcaaagccgcggccctcaagtgccagctctgcgagaaggcgcccaaggaagccaccgtcatgtgcgaacagtgcgatgtcttctactgcgatccgtgccgcctgcgctgccacccgccccgggggcccctagccaagcaccgcctggtgcccccggcccagggtcgtgtgagccggaggctgagcccacgcaaggtctccacctgcacagaccacgagctggagaaccacagcatgtactgcgtgcaatgcaagatgcccgtgtgctaccagtgcttggaggagggcaaacactccagccacgaagtcaaggctctgggggccatgtggaaactacataagagccagctctcccaggcgctgaacggactgtcagacagggccaaagaagccaaggagtttctggtacagctgcgcaacatggtccagcagatccaggagaacagtgtggagtttgaagcctgtctggtggcccaatgtgatgccctcatcgatgccctcaacagaagaaaagcccagctgctggcccgcgtcaacaaggagcatgagcacaagctgaaggtggttcgagatcagatctctcactgcacagtgaaattgcgccagaccacaggtctcatggagtactgcttggaggtgattaaggaaaatgatcctagtggttttttgcagatttctgacgccctcataagaagagtgcacctgactgaggatcagtggggtaaaggcacactcactccaaggatgaccacggactttgacttgagtctggacaacagccctctgctgcaatccatccaccagctggatttcgtgcaagtgaaagcttcctctccagtcccagcaacccctatcctacagctggaggaatgttgtacccacaacaacagcgctacgttgtcctggaaacagccacctctgtccacggtgcccgccgatggatacattctggagctggatgatggcaacggtggtcaattccgggaggtgtatgtggggaaggagacaatgtgcactgtggatggtcttcacttcaacagcacatacaacgctcgggtcaaggccttcaacaaaacaggagtcagcccgtacagcaagaccctggtcctccaaacgtctgagggtaaggcccttcagcagtatccctcagagcgagaactgcgtggcatctaaagtggctggcaagcccggaggtaaccccaccactgcccacattcctgaagtgtttccatgacttgctctgcattctgcacagagccgctgttcctctcctgcctttagagagcctatggtatgtggatgtgatcaaaccaaagattccacatcggcagttccaatggcttgggccggcggcttcctttgataacaatctaaataagctgcagttgaagaagctgaaaaatgaaggcctgaatgtgcccctggtgtgtaagacaaatgtatctaggctctagagcaggctcccattctccaccgatacacatcatgtgccagttttgcccagatgattctaaattactctgtagtacttgcttgttctgagggtgggacctaggttctttccagtcgtggatttgtatgactgaatgtgtttcaaatgggtggtggggtgctagagctgtttagagagggcctgttggctgctcctggcttacccacttagactgcctccgtttcatacccaaagcggaggccgtcagcaccaggattgagacttcctgtgggcaccaaacaggaagagaccagcaacttcgcattacccgccattttcatctttgccagtcccttcagtcttggctaggctaccgagagccaccatacaaggttcatctctagagaatttttgcttcttagctatactttaaatattttggtcatcaaagacaagtaatgtgtctcagatgagaggcttgaatttgatggccagatataacctctgaggcttttaacattttcattttaagagtaagcaagacacatgaaattaaacctacaaggaggtatttgtggctggtgccaaagcattctgacactttggggtgtcattttaatcaaagaaatcacccccccacctcaccgggattctccataacttccctctgcagaactaattatgttgattttgttcaagttcaagatgttagctaaaagaactatggtggtgttttttttcccacttcccacaaacctcaacatgtgccagtcaccctaaaatgcttcacatggttaaaaacaagcacaattttgaatcctacagcaaggatgaaaggcccctagccgtgaaaacagtgctttggggagcagttgtcagtctaagtgatgctattccaagagaaggatatgctgagggaaaatgcccacatgacctgttcccatttggagtacagtgatgtggtagctacagcttcccccagaattatcattttagcaccttctctcagggatgacctatcagtttgagagcagttgcctcttttctcaaaataccatactaactgctaaagccctccaagagtctttcctagatgcaacgcagaaggcccttgctggtgatggcctcatttcccatgtgtgtacaaggtggtttgattgaagagtgaagtgcatgcctgcagagcagagagaaatttgtagcaatgttgctaatatgtgttatcagatctgcgggaaaactatttctattcataatacatcatgggaatcatactattctggtaaaaatcagttattagcataacagcctgagcacttatgtctctcgtttcatcctgcaggaggatgtagcgcctcagtttattttaatgttcataagattatggtgtctaatttaataaattacaggattggaactgcgatccttggtaccacagtcacagaactgggggtcattttctagatgaaacaaacggaacaagttctcttccaacaaagaaactgtactgtagaaattaatttcctccatgaattttatatattgtgtacaaatataaggtatgtatctgaatacaaagaaaagcctatcatcatatagatatcagtattctctgttactgcacagaagtaattttctcatgatgaaataaagttcacacacatactttctccataa

SEQ ID NO: 458668 - DNA, 1267 bp, Homo sapiens
ggatgcacgtaggactggcccgcaccttgcagccacggaaagatccgcctggcccgcggcccctccacgcctccgaggtcgagacagtgacataagtcaactctcaagcccagggcgtctctccactctgcctagacgtccactccgtctgcctgcagctacggctctgtgcgtcccgcttcgactccctctgctttccttcccagcttctcgcctccagactgttccggctccgccgcctgaaattacctgctctgggggaggcgcggcgcgcggcctcatgacggaactacaactcccatgaggcgctgggcccacgcaggcgcggcgcggctgaagtcgccgcgccggaatcccattggcagggccggctctgaggcgggagccctgattggctgaggggtctgaggcgacagattccggaaaggggaagagcagccaacatggcggcggaacgcggcgcggggcagcaacagtcgcaggagatgatggaggaagaacatgagctgcctgtggacatggaaaccatcaacctggacagagatgcagaggatgttgatttgaatcactatcgcatagggaagattgaaggatttgaggtactgaagaaagtgaagactctctgcctccgccaaaatttaattaaatgcattgagaatctggaggagctacagagtcttcgagagctggatctttacgacaaccagatcaagaagattgagaatctggaggcgctaacagagctggagattctagatatttcttttaatctgctgagaaacatcgaaggggttgacaagttgacacgactgaaaaaactcttcttggtcaacaataaaatcagtaaaattgagaacttaagcaacttacatcaactacagatgctagagctgggatctaaccgcatccgggcaatcgaaaatatcgacaccttaaccaacctggagagtttgtttttggggaaaaacaaaattactaaacttcagaacctggatgcgctcaccaacctgacagtcctcagtatgcagagcaaccggctgaccaagatcgagggtctgcagaacctggtgaacctgcgggagctgtaccttagccacaatggcatcgaggtcatcgagggcctggagaacaataacaaactcacgatgttggacattgcatcaaatagaatcaaaaagattgaaaatatcagccatctaacagagctgcaagagttctggatgaacgacaatctccttgatggacgcgtcgcgcatggggatcctct

SEQ ID NO: 458669 - DNA, 911 bp, Homo sapiens
gcacacgcgaccccacacacacacccaaacacgagacaacgaaccaactggcacgtgagtgaggcagcgtgggctatggagcggggggaggaggacccagaagaagaacatgagctgcctgtggacatggaaaccatcaacctggacagagatgcagaggatgttgatttgaatcactatcgcatagggaagattgaaggatttgaggtactgaagaaagtgaagactctctgcctccgccaaaatttaattaaatgcattgagaatctggaggagctacagagtcttcgagagctggatctttacgacaaccagatcaagaagattgagaatctggaggcgctaacagagctggagattctagatatttcttttaatctgctgagaaacatcgaaggggttgacaagttgacacgactgaaaaaactcttcttggtcaacaataaaatcagtaaaattgagaacttaagcaacttacatcaactacagatgctagagctgggatctaaccgcatccgggcaatcgaaaatatcgacaccttaaccaacctggagagtttgtttttggggaaaaacaaaattactaaacttcagaacctggatgcgctcaccaacctgacagtcctcagtatgcagagcaaccggctgaccaagatcgagggtctgcagaacctggtgaacctgcgggagctgtaccttagccacaatggcatcgaggtcatcgagggcctggagaacaataacaaactccggatgtgggacatgggctcaaatagatccacagattgaaatttcaggcatttaaaagagtgcagaagtcctgggtgaacgaacattctctgaaaagggggggactcgaaaagctgaggggccggccgggaatgtccgggcggaccttggaagagccatag

SEQ ID NO: 458670 - DNA, 408 bp, Homo sapiens
ccccaccaccacatccccagttcttgtttaaatttttttcctcattcgcagcttccgcaatcgaaaatatcgacaccttaaccaacctggagagtttgtttttggggaaaaacaaaattactaaacttcagaacctggatgcgctcaccaacctgacagtcctcagtatgcagagcaaccggctgaccaagatcgagggtctgcagaacctggtgaacctgcgggagctgtaccttagccacaatggcatcgaggtcatcgagggcctggagaacaatgtgcaggacagcctcacgtactgaggggaagtgtgctcacagagcccccaccctcctcagctgcctccagctcaccctgctctgccccagtgcggtgttcaagacaaataaaagactttttctcattcaa

SEQ ID NO: 458671 - DNA, 457 bp, Homo sapiens
ttcctcaatggggcagcatccattgcacacccactgtgcactgcaggcattttgcaagatttgaaaaaaacaaacccaacctgctcgtaaagggccctgtatgagggtgactggcatccctttaggccactgacctgtccatgggtccactggcctcagcccctacttcccagcccacagagagcacaggaccagctctcagtcccagccccttcctcttcttacagtatgagcagcttcctcctcccccattcctccctgcctgctttccacacctgtcctcacctgttcatgctcctccctccctccccggcccttctcactcaggtgcaggacagcctcacgtactgaggggaagtgtgctcacagagcccccaccctcctcagctgcctccagctcaccctgctctgccccagtgcggtgttcaagacaaataaaagactttttctcattcaa

SEQ ID NO: 458672 - DNA, 2369 bp, Homo sapiens
ggatgcacgtaggactggcccgcaccttgcagccacggaaagatccgcctggcccgcggcccctccacgcctccgaggtcgagacagtgacataagtcaactctcaagcccagggcgtctctccactctgcctagacgtccactccgtctgcctgcagctacggctctgtgcgtcccgcttcgactccctctgctttccttcccagcttctcgcctccagactgttccggctccgccgcctgaaattacctgctctgggggaggcgcggcgcgcggcctcatgacggaactacaactcccatgaggcgctgggcccacgcaggcgcggcgcggctgaagtcgccgcgccggaatcccattggcagggccggctctgaggcgggagccctgattggctgaggggtctgaggcgacagattccggaaaggggaagagcagccaacatggcggcggaacgcggcgcggggcagcaacagtcgcaggagatgatggaggttgacaggcgggtcgagtctgaagaatccggcgatgaagaagggaagaaacacagcagtggcatcgtggccgacctcagtgaacagagcctgaaggatggggaggagcggggggaggaggacccagaagaagaacatgagctgcctgtggacatggaaaccatcaacctggacagagatgcagaggatgttgatttgaatcactatcgcatagggaagattgaaggatttgaggtactgaagaaagtgaagactctctgcctccgccaaaatttaattaaatgcattgagaatctggaggagctacagagtcttcgagagctggatctttacgacaaccagatcaagaagattgagaatctggaggcgctaacagagctggagattctagatatttcttttaatctgctgagaaacatcgaaggggttgacaagttgacacgactgaaaaaactcttcttggtcaacaataaaatcagtaaaattgagaacttaagcaacttacatcaactacagatgctagagctgggatctaaccgcatccgggcaatcgaaaatatcgacaccttaaccaacctggagagtttgtttttggggaaaaacaaaattactaaacttcagaacctggatgcgctcaccaacctgacagtcctcagtatgcagagcaaccggctgaccaagatcgagggtctgcagaacctggtgaacctgcgggagctgtaccttagccacaatggcatcgaggtcatcgagggcctggagaacaataacaaactcacgatgttggacattgcatcaaatagaatcaaaaagattgaaaatatcagccatctaacagagctgcaagagttctggatgaacgacaatctccttgagagctggagcgacctcgacgagctgaagggagccaggagcctggagacagtgtacctggagcggaaccccttgcagaaggacccccagtaccggcggaaggtcatgctcgccctcccctccgtgcggcagatcgatgccacgttcgtcaggttctgagtccttcttggctcctcatgtggtccctctcctcggaagaactgcccagccacgggtttttaacccacctgttgctcctgaggtcgtcactatatcaacagtcacaaacccaatggcaataaaggcactgacgatagctggcgcgcgcgacgccacacaccattttcagatgccgttgcaattaaatcttgccacactgtcctcctgggtgattgttgacagttattgtagccacagagagaacataagacacgttgcgttcattcgctagaaatccctgtttccttctctcagaaggcagtcacagtccctacctgagtcgtgtgaaacacagggcctgagagtgctttacaggcattcacgtgctgtccgagtggcattcgggggctggcctagctggccctagtcctggtgtgcagggttcaggcagtcttgacctgcaacaaccgaggttttttagtcttttaacccagccattttcaattttttaaaaattaggtaagttaaaaaagctgggtaaaagctgactcagccctgtgtgcttgtgttccttagagctctccttcaaagagcgccgggcagggctgactgttttcacgtgtgcccgtcagttctcgccacatcccttgcctgtgggtgaaagctcaggtgtggggagggtgtcctgtgtcccacacggtgctgtgctgctgccagaatacgagtcccattgagcctctccaaagacggcctccaaggatctgaactcttggccactggtatagtggcctcctgttctcaccccattgttattttggcttttttaatataaaatgtacattgacagacaaaaaaagtctggat

SEQ ID NO: 458673 - DNA, 1960 bp, Homo sapiens
agaataactcgaaggcaacgaggttggggatagggtgagggaaaagagcaagaatcactcaagacggagaaaactgctgtcaaaagttgacaggcgggtcgagtctgaagaatccggcgatgaagaagggaagaaacacagcagtggcatcgtggccgacctcagtgaacagagcctgaaggatggggaggagcggggggaggaggacccagaagaagaacatgagctgcctgtggacatggaaaccatcaacctggacagagatgcagaggatgttgatttgaatcactatcgcatagggaagattgaaggatttgaggtactgaagaaagtgaagactctctgcctccgccaaaatttaattaaatgcattgagaatctggaggagctacagagtcttcgagagctggatctttacgacaaccagatcaagaagattgagaatctggaggcgctaacagagctggagattctagatatttcttttaatctgctgagaaacatcgaaggggttgacaagttgacacgactgaaaaaactcttcttggtcaacaataaaatcagtaaaattgagaacttaagcaacttacatcaactacagatgctagagctgggatctaaccgcatccgggcaatcgaaaatatcgacaccttaaccaacctggagagtttgtttttggggaaaaacaaaattactaaacttcagaacctggatgcgctcaccaacctgacagtcctcagtatgcagagcaaccggctgaccaagatcgagggtctgcagaacctggtgaacctgcgggagctgtaccttagccacaatggcatcgaggtcatcgagggcctggagaacaataacaaactcacgatgttggacattgcatcaaatagaatcaaaaagattgaaaatatcagccatctaacagagctgcaagagttctggatgaacgacaatctccttgagagctggagcgacctcgacgagctgaagggagccaggagcctggagacagtgtacctggagcggaaccccttgcagaaggacccccagtaccggcggaaggtcatgctcgccctcccctccgtgcggcagatcgatgccacgttcgtcaggttctgagtccttcttggctcctcatgtggtccctctcctcggaagaactgcccagccacgggtttttaacccacctgttgctcctgaggtcgtcactatatcaacagtcacaaacccaatggcaataaaggcactgacgatagctggcgcgcgcgacgccacacaccattttcagatgccgttgcaattaaatcttgccacactgtcctcctgggtgattgttgacagttattgtagccacagagagaacataagacacgttgcgttcattcgctagaaatccctgtttccttctctcagaaggcagtcacagtccctacctgagtcgtgtgaaacacagggcctgagagtgctttacaggcattcacgtgctgtccgagtggcattcgggggctggcctagctggccctagtcctggtgtgcagggttcaggcagtcttgacctgcaacaaccgaggttttttagtcttttaacccagccattttcaattttttaaaaattaggtaagttaaaaaagctgggtaaaagctgactcagccctgtgtgcttgtgttccttagagctctccttcaaagagcgccgggcagggctgactgttttcacgtgtgcccgtcagttctcgccacatcccttgcctgtgggtgaaagctcaggtgtggggagggtgtcctgtgtcccacacggtgctgtgctgctgccagaatacgagtcccattgagcctctccaaagacggcctccaaggatctgaactcttggccactggtatagtggcctcctgttctcaccccattgttattttggcttttttaatataaaatgtacattgacagacaaaaaaagtctggat

SEQ ID NO: 458674 - DNA, 2240 bp, Homo sapiens
ggatgcacgtaggactggcccgcaccttgcagccacggaaagatccgcctggcccgcggcccctccacgcctccgaggtcgagacagtgacataagtcaactctcaagcccagggcgtctctccactctgcctagacgtccactccgtctgcctgcagctacggctctgtgcgtcccgcttcgactccctctgctttccttcccagcttctcgcctccagactgttccggctccgccgcctgaaattacctgctctgggggaggcgcggcgcgcggcctcatgacggaactacaactcccatgaggcgctgggcccacgcaggcgcggcgcggctgaagtcgccgcgccggaatcccattggcagggccggctctgaggcgggagccctgattggctgaggggtctgaggcgacagattccggaaaggggaagagcagccaacatggcggcggaacgcggcgcggggcagcaacagtcgcaggagatgatggaggaagaacatgagctgcctgtggacatggaaaccatcaacctggacagagatgcagaggatgttgatttgaatcactatcgcatagggaagattgaaggatttgaggtactgaagaaagtgaagactctctgcctccgccaaaatttaattaaatgcattgagaatctggaggagctacagagtcttcgagagctggatctttacgacaaccagatcaagaagattgagaatctggaggcgctaacagagctggagattctagatatttcttttaatctgctgagaaacatcgaaggggttgacaagttgacacgactgaaaaaactcttcttggtcaacaataaaatcagtaaaattgagaacttaagcaacttacatcaactacagatgctagagctgggatctaaccgcatccgggcaatcgaaaatatcgacaccttaaccaacctggagagtttgtttttggggaaaaacaaaattactaaacttcagaacctggatgcgctcaccaacctgacagtcctcagtatgcagagcaaccggctgaccaagatcgagggtctgcagaacctggtgaacctgcgggagctgtaccttagccacaatggcatcgaggtcatcgagggcctggagaacaataacaaactcacgatgttggacattgcatcaaatagaatcaaaaagattgaaaatatcagccatctaacagagctgcaagagttctggatgaacgacaatctccttgagagctggagcgacctcgacgagctgaagggagccaggagcctggagacagtgtacctggagcggaaccccttgcagaaggacccccagtaccggcggaaggtcatgctcgccctcccctccgtgcggcagatcgatgccacgttcgtcaggttctgagtccttcttggctcctcatgtggtccctctcctcggaagaactgcccagccacgggtttttaacccacctgttgctcctgaggtcgtcactatatcaacagtcacaaacccaatggcaataaaggcactgacgatagctggcgcgcgcgacgccacacaccattttcagatgccgttgcaattaaatcttgccacactgtcctcctgggtgattgttgacagttattgtagccacagagagaacataagacacgttgcgttcattcgctagaaatccctgtttccttctctcagaaggcagtcacagtccctacctgagtcgtgtgaaacacagggcctgagagtgctttacaggcattcacgtgctgtccgagtggcattcgggggctggcctagctggccctagtcctggtgtgcagggttcaggcagtcttgacctgcaacaaccgaggttttttagtcttttaacccagccattttcaattttttaaaaattaggtaagttaaaaaagctgggtaaaagctgactcagccctgtgtgcttgtgttccttagagctctccttcaaagagcgccgggcagggctgactgttttcacgtgtgcccgtcagttctcgccacatcccttgcctgtgggtgaaagctcaggtgtggggagggtgtcctgtgtcccacacggtgctgtgctgctgccagaatacgagtcccattgagcctctccaaagacggcctccaaggatctgaactcttggccactggtatagtggcctcctgttctcaccccattgttattttggcttttttaatataaaatgtacattgacagacaaaaaaagtctggat

SEQ ID NO: 458675 - DNA, 1942 bp, Homo sapiens
ggagtgatagatggaagcttccgtcatcgcctgacttagtcaccaacagtggagcggtaggagcccccgctatcctcagatgggtgctgctgagacattgggtgtttatggaggacttgagagttggcagagcaagccttgtgtgctttctttccctggctcactagcacaggctaatcatgttgtcatcatgttctaagaacatgagctgcctgtggacatggaaaccatcaacctggacagagatgcagaggatgttgatttgaatcactatcgcatagggaagattgaaggatttgaggtactgaagaaagtgaagactctctgcctccgccaaaatttaattaaatgcattgagaatctggaggagctacagagtcttcgagagctggatctttacgacaaccagatcaagaagattgagaatctggaggcgctaacagagctggagattctagatatttcttttaatctgctgagaaacatcgaaggggttgacaagttgacacgactgaaaaaactcttcttggtcaacaataaaatcagtaaaattgagaacttaagcaacttacatcaactacagatgctagagctgggatctaaccgcatccgggcaatcgaaaatatcgacaccttaaccaacctggagagtttgtttttggggaaaaacaaaattactaaacttcagaacctggatgcgctcaccaacctgacagtcctcagtatgcagagcaaccggctgaccaagatcgagggtctgcagaacctggtgaacctgcgggagctgtaccttagccacaatggcatcgaggtcatcgagggcctggagaacaataacaaactcacgatgttggacattgcatcaaatagaatcaaaaagattgaaaatatcagccatctaacagagctgcaagagttctggatgaacgacaatctccttgagagctggagcgacctcgacgagctgaagggagccaggagcctggagacagtgtacctggagcggaaccccttgcagaaggacccccagtaccggcggaaggtcatgctcgccctcccctccgtgcggcagatcgatgccacgttcgtcaggttctgagtccttcttggctcctcatgtggtccctctcctcggaagaactgcccagccacgggtttttaacccacctgttgctcctgaggtcgtcactatatcaacagtcacaaacccaatggcaataaaggcactgacgatagctggcgcgcgcgacgccacacaccattttcagatgccgttgcaattaaatcttgccacactgtcctcctgggtgattgttgacagttattgtagccacagagagaacataagacacgttgcgttcattcgctagaaatccctgtttccttctctcagaaggcagtcacagtccctacctgagtcgtgtgaaacacagggcctgagagtgctttacaggcattcacgtgctgtccgagtggcattcgggggctggcctagctggccctagtcctggtgtgcagggttcaggcagtcttgacctgcaacaaccgaggttttttagtcttttaacccagccattttcaattttttaaaaattaggtaagttaaaaaagctgggtaaaagctgactcagccctgtgtgcttgtgttccttagagctctccttcaaagagcgccgggcagggctgactgttttcacgtgtgcccgtcagttctcgccacatcccttgcctgtgggtgaaagctcaggtgtggggagggtgtcctgtgtcccacacggtgctgtgctgctgccagaatacgagtcccattgagcctctccaaagacggcctccaaggatctgaactcttggccactggtatagtggcctcctgttctcaccccattgttattttggcttttttaatataaaatgtacattgacagacaaaaaaagtctggat

SEQ ID NO: 458676 - DNA, 1680 bp, Homo sapiens
ggatgcacgtaggactggcccgcaccttgcagccacggaaagatccgcctggcccgcggcccctccacgcctccgaggtcgagacagtgacataagtcaactctcaagcccagggcgtctctccactctgcctagacgtccactccgtctgcctgcagctacggctctgtgcgtcccgcttcgactccctctgctttccttcccagcttctcgcctccagactgttccggctccgccgcctgaaattacctgctctgggggaggcgcggcgcgcggcctcatgacggaactacaactcccatgaggcgctgggcccacgcaggcgcggcgcggctgaagtcgccgcgccggaatcccattggcagggccggctctgaggcgggagccctgattggctgaggggtctgaggcgacagattccggaaaggggaagagcagccaacatggcggcggaacgcggcgcggggcagcaacagtcgcaggagatgatggaggttgacaggcgggtcgagtctgaagaatccggcgatgaagaagggaagaaacacagcagtggcatcgtggccgacctcagtgaacagagcctgaaggatggggaggagcggggggaggaggacccagaagaagaacatgagctgcctgtggacatggaaaccatcaacctggacagagatgcagaggatgttgatttgaatcactatcgcatagggaagattgaaggatttgaggtactgaagaaagtgaagactctctgcctccgccaaaatttaattaaatgcattgagaatctggaggagctacagagtcttcgagagctggatctttacgacaaccagatcaagaagattgagaatctggaggcgctaacagagctggagattctagatatttcttttaatctgctgagaaacatcgaaggggttgacaagttgacacgactgaaaaaactcttcttggtcaacaataaaatcagtaaaattgagaacttaagcaacttacatcaactacagatgctagagctgggatctaaccgcatccgggcaatcgaaaatatcgacaccttaaccaacctggagagtttgtttttggggaaaaacaaaattactaaacttcagaacctggatgcgctcaccaacctgacagtcctcagtatgcagagcaaccggctgaccaagatcgagggtctgcagaacctggtgaacctgcgggagctgtaccttagccacaatggcatcgaggtcatcgagggcctggagaacaataacaaactcacgatgttggacattgcatcaaatagaatcaaaaagattgaaaatatcagccatctaacagagctgcaagagttctggatgaacgacaatctccttgagagctggagcgacctcgacgagctgaagggagccaggagcctggagacagtgtacctggagcggaaccccttgcagaaggacccccagtaccggcggaaggtcatgctcgccctcccctccgtgcggcagatcgatgccacgttcgtcaggttctgagtccttcttggctcctcatgtggtccctctcctcggaagaactgcccagccacgggtttttaacccacctgttgctcctgaggtcgtcactatatcaacagtcacaaacccaatggcaataaaggcactgacgatagctggcgcgcgcgacgcc

SEQ ID NO: 458677 - DNA, 1685 bp, Homo sapiens
ggatgcacgtaggactggcccgcaccttgcagccacggaaagatccgcctggcccgcggcccctccacgcctccgaggtcgagacagtgacataagtcaactctcaagcccagggcgtctctccactctgcctagacgtccactccgtctgcctgcagctacggctctgtgcgtcccgcttcgactccctctgctttccttcccagcttctcgcctccagactgttccggctccgccgcctgaaattacctgctctgggggaggcgcggcgcgcggcctcatgacggaactacaactcccatgaggcgctgggcccacgcaggcgcggcgcggctgaagtcgccgcgccggaatcccattggcagggccggctctgaggcgggagccctgattggctgaggggtctgaggcgacagattccggaaaggggaagagcagccaacatggcggcggaacgcggcgcggggcagcaacagtcgcaggagatgatggaggttgacaggcgggtcgagtctgaagaatccggcgatgaagaagggaagaaacacagcagtggcatcgtggccgacctcagtgaacagagcctgaaggatggggaggagcggggggaggaggacccagaagaagaacatgagctgcctgtggacatggaaaccatcaacctggacagagatgcagaggatgttgatttgaatcactatcgcatagggaagattgaaggatttgaggtactgaagaaagtgaagactctctgcctccgccaaaatttaattaaatgcattgagaatctggaggagctacagagtcttcgagagctggatctttacgacaaccagatcaagaagattgagaatctggaggcgctaacagagctggagattctagatatttcttttaatctgctgagaaacatcgaaggggttgacaagttgacacgactgaaaaaactcttcttggtcaacaataaaatcagtaaaattgagaacttaagcaacttacatcaactacagatgctagagctgggatctaaccgcatccgggcaatcgaaaatatcgacaccttaaccaacctggagagtttgtttttggggaaaaacaaaattactaaacttcagaacctggatgcgctcaccaacctgacagtcctcagtatgcagagcaaccggctgaccaagatcgagggtctgcagaacctggtgaacctgcgggagctgtaccttagccacaatggcatcgaggtcatcgagggcctggagaacaatgtgcaggacagcctcacgtactgaggggaagtgtgctcacagagcccccaccctcctcagctgcctccagctcaccctgctctgccccagtgcggtgttcaagacaaataaaagactttttctcattcaaaaaaaaaaaaaaaaaaaaaaaaaaaaaaaaaaaaaaagacagatgagagaaaaaaagagaaggaaataaaacaggaaaagggaacgagatgtagatgaaattgaaaaaaaaaaaaaaaaaataaatgagaggtaaaaaggaatgaaagaagtgggggtgcggattgtcaaatagggagttggggcaagacagataggagtaggggggtagatgaggcagagggtgtgatgaagggacgagagcgcgtggaggaatgtaggagagcgtccacagatgaggggggggggggggta

SEQ ID NO: 458678 - DNA, 1372 bp, Homo sapiens
ggatgcacgtaggactggcccgcaccttgcagccacggaaagatccgcctggcccgcggcccctccacgcctccgaggtcgagacagtgacataagtcaactctcaagcccagggcgtctctccactctgcctagacgtccactccgtctgcctgcagctacggctctgtgcgtcccgcttcgactccctctgctttccttcccagcttctcgcctccagactgttccggctccgccgcctgaaattacctgctctgggggaggcgcggcgcgcggcctcatgacggaactacaactcccatgaggcgctgggcccacgcaggcgcggcgcggctgaagtcgccgcgccggaatcccattggcagggccggctctgaggcgggagccctgattggctgaggggtctgaggcgacagattccggaaaggggaagagcagccaacatggcggcggaacgcggcgcggggcagcaacagtcgcaggagatgatggaggttgacaggcgggtcgagtctgaagaatccggcgatgaagaagggaagaaacacagcagtggcatcgtggccgacctcagtgaacagagcctgaaggatggggaggagcggggggaggaggacccagaagaagaacatgagctgcctgtggacatggaaaccatcaacctggacagagatgcagaggatgttgatttgaatcactatcgcatagggaagattgaaggatttgaggtactgaagaaagtgaagactctctgcctccgccaaaatttaattaaatgcattgagaatctggaggagctacagagtcttcgagagctggatctttacgacaaccagatcaagaagattgagaatctggaggcgctaacagagctggagattctagatatttcttttaatctgctgagaaacatcgaaggggttgacaagttgacacgactgaaaaaactcttcttggtcaacaataaaatcagtaaaattgagaacttaagcaacttacatcaactacagatgctagagctgggatctaaccgcatccgggcaatcgaaaatatcgacaccttaaccaacctggagagtttgtttttggggaaaaacaaaattactaaacttcagaacctggatgcgctcaccaacctgacagtcctcagtatgcagagcaaccggctgaccaagatcgagggtctgcagaacctggtgaacctgcgggagctgtaccttagccacaatggcatcgaggtcatcgagggcctggagaacaataacaaactcacgatgttggacattgcatcaaatagaatcaaaaagattgaaaatatcagccatctaacagagctgcaagagttctgggtaagtgatacacgctggggttg

SEQ ID NO: 458679 - DNA, 1396 bp, Homo sapiens
ggatgcacgtaggactggcccgcaccttgcagccacggaaagatccgcctggcccgcggcccctccacgcctccgaggtcgagacagtgacataagtcaactctcaagcccagggcgtctctccactctgcctagacgtccactccgtctgcctgcagctacggctctgtgcgtcccgcttcgactccctctgctttccttcccagcttctcgcctccagactgttccggctccgccgcctgaaattacctgctctgggggaggcgcggcgcgcggcctcatgacggaactacaactcccatgaggcgctgggcccacgcaggcgcggcgcggctgaagtcgccgcgccggaatcccattggcagggccggctctgaggcgggagccctgattggctgaggggtctgaggcgacagattccggaaaggggaagagcagccaacatggcggcggaacgcggcgcggggcagcaacagtcgcaggagatgatggaggttgacaggcgggtcgagtctgaagaatccggcgatgaagaagggaagaaacacagcagtggcatcgtggccgacctcagtgaacagagcctgaaggatggggaggagcggggggaggaggacccagaagaagaacatgagctgcctgtggacatggaaaccatcaacctggacagagatgcagaggatgttgatttgaatcactatcgcatagggaagattgaaggatttgaggtactgaagaaagtgaagactctctgcctccgccaaaatttaattaaatgcattgagaatctggaggagctacagagtcttcgagagctggatctttacgacaaccagatcaagaagattgagaatctggaggcgctaacagagctggagattctagatatttcttttaatctgctgagaaacatcgaaggggttgacaagttgacacgactgaaaaaactcttcttggtcaacaataaaatcagtaaaattgagaacttaagcaacttacatcaactacagatgctagagctgggatctaaccgcatccgggcaatcgaaaatatcgacaccttaaccaacctggagagtttgtttttggggaaaaacaaaattactaaacttcagaacctggatgcgctcaccaacctgacagtcctcagtatgcagagcaaccggctgaccaagatcgagggtctgcagaacctggtgaacctgcgggagctgtaccttagccacaatggcatcgaggtcatcgagggcctggagaacaataacaaactcacgatgttggacattgcatcaaatagaatcaaaaagattgaaaatatcagccatctaacagagctgcaagagttctggatgaacgacaatctccttgatggacgcgtcgcgcatggggatcctct

SEQ ID NO: 458680 - DNA, 1794 bp, Homo sapiens
ggatgcacgtaggactggcccgcaccttgcagccacggaaagatccgcctggcccgcggcccctccacgcctccgaggtcgagacagtgacataagtcaactctcaagcccagggcgtctctccactctgcctagacgtccactccgtctgcctgcagctacggctctgtgcgtcccgcttcgactccctctgctttccttcccagcttctcgcctccagactgttccggctccgccgcctgaaattacctgctctgggggaggcgcggcgcgcggcctcatgacggaactacaactcccatgaggcgctgggcccacgcaggcgcggcgcggctgaagtcgccgcgccggaatcccattggcagggccggctctgaggcgggagccctgattggctgaggggtctgaggcgacagattccggaaaggggaagagcagccaacatggcggcggaacgcggcgcggggcagcaacagtcgcaggagatgatggaggttgacaggcgggtcgagtctgaagaatccggcgatgaagaagggaagaaacacagcagtggcatcgtggccgacctcagtgaacagaagcaaccggctgaccaagatcgagggtctgcagaacctggtgaacctgcgggagctgtaccttagccacaatggcatcgaggtcatcgagggcctggagaacaataacaaactcacgatgttggacattgcatcaaatagaatcaaaaagattgaaaatatcagccatctaacagagctgcaagagttctggatgaacgacaatctccttgagagctggagcgacctcgacgagctgaagggagccaggagcctggagacagtgtacctggagcggaaccccttgcagaaggacccccagtaccggcggaaggtcatgctcgccctcccctccgtgcggcagatcgatgccacgttcgtcaggttctgagtccttcttggctcctcatgtggtccctctcctcggaagaactgcccagccacgggtttttaacccacctgttgctcctgaggtcgtcactatatcaacagtcacaaacccaatggcaataaaggcactgacgatagctggcgcgcgcgacgccacacaccattttcagatgccgttgcaattaaatcttgccacactgtcctcctgggtgattgttgacagttattgtagccacagagagaacataagacacgttgcgttcattcgctagaaatccctgtttccttctctcagaaggcagtcacagtccctacctgagtcgtgtgaaacacagggcctgagagtgctttacaggcattcacgtgctgtccgagtggcattcgggggctggcctagctggccctagtcctggtgtgcagggttcaggcagtcttgacctgcaacaaccgaggttttttagtcttttaacccagccattttcaattttttaaaaattaggtaagttaaaaaagctgggtaaaagctgactcagccctgtgtgcttgtgttccttagagctctccttcaaagagcgccgggcagggctgactgttttcacgtgtgcccgtcagttctcgccacatcccttgcctgtgggtgaaagctcaggtgtggggagggtgtcctgtgtcccacacggtgctgtgctgctgccagaatacgagtcccattgagcctctccaaagacggcctccaaggatctgaactcttggccactggtatagtggcctcctgttctcaccccattgttattttggcttttttaatataaaatgtacattgacagacaaaaaaagtctggat

SEQ ID NO: 458681 - DNA, 1263 bp, Homo sapiens
ggatgcacgtaggactggcccgcaccttgcagccacggaaagatccgcctggcccgcggcccctccacgcctccgaggtcgagacagtgacataagtcaactctcaagcccagggcgtctctccactctgcctagacgtccactccgtctgcctgcagctacggctctgtgcgtcccgcttcgactccctctgctttccttcccagcttctcgcctccagactgttccggctccgccgcctgaaattacctgctctgggggaggcgcggcgcgcggcctcatgacggaactacaactcccatgaggcgctgggcccacgcaggcgcggcgcggctgaagtcgccgcgccggaatcccattggcagggccggctctgaggcgggagccctgattggctgaggggtctgaggcgacagattccggaaaggggaagagcagccaacatggcggcggaacgcggcgcggggcagcaacagtcgcaggagatgatggaggaagaacatgagctgcctgtggacatggaaaccatcaacctggacagagatgcagaggatgttgatttgaatcactatcgcatagggaagattgaaggatttgaggtactgaagaaagtgaagactctctgcctccgccaaaatttaattaaatgcattgagaatctggaggagctacagagtcttcgagagctggatctttacgacaaccagatcaagaagattgagaatctggaggcgctaacagagctggagattctagatatttcttttaatctgctgagaaacatcgaaggggttgacaagttgacacgactgaaaaaactcttcttggtcaacaataaaatcagtaaaattgagaacttaagcaacttacatcaactacagatgctagagctgggatctaaccgcatccgggcaatcgaaaatatcgacaccttaaccaacctggagagtttgtttttggggaaaaacaaaattactaaacttcagaacctggatgcgctcaccaacctgacagtcctcagtatgcagagcaaccggctgaccaagatcgagggtctgcagaacctggtgaacctgcgggagctgtaccttagccacaatggcatcgaggtcatcgagggcctggagaacaatgtgcaggacagcctcacgtactgaggggaagtgtgctcacagagcccccaccctcctcagctgcctccagctcaccctgctctgccccagtgcggtgttcaagacaaataaaagactttttctcattcaa

SEQ ID NO: 458682 - DNA, 755 bp, Homo sapiens
ggatgcacgtaggactggcccgcaccttgcagccacggaaagatccgcctggcccgcggcccctccacgcctccgaggtcgagacagtgacataagtcaactctcaagcccagggcgtctctccactctgcctagacgtccactccgtctgcctgcagctacggctctgtgcgtcccgcttcgactccctctgctttccttcccagcttctcgcctccagactgttccggctccgccgcctgaaattacctgctctgggggaggcgcggcgcgcggcctcatgacggaactacaactcccatgaggcgctgggcccacgcaggcgcggcgcggctgaagtcgccgcgccggaatcccattggcagggccggctctgaggcgggagccctgattggctgaggggtctgaggcgacagattccggaaaggggaagagcagccaacatggcggcggaacgcggcgcggggcagcaacagtcgcaggagatgatggaggttgacaggcgggtcgagtctgaagaatccggcgatgaagaagggaagaaacacagcagtggcatcgtggccgacctcagtgaacagagcctgaaggatggggaggagcggggggaggaggacccagaagaagaacatgagctgcctgtggacatggaaaagtcaggcggctgcgtaggctccatccacaggatcccaggcatctccgtccagccaccgttgaagccttccagcctcgtcttcatcaaccgatcacccgtt

SEQ ID NO: 458683 - DNA, 582 bp, Homo sapiens
gttcacgccattctcctgcctcagcctccggagtagctggaactacaggcacccgccgccacgcccagctaatttttttgtatttttaataaagacagggtttcaccgtgttagccaggatggtctctatctgaccttgtgatccacctgcctcagcttctcaaagtgctgggatttccacgcccgacagggggacattttaatgtgtcagctcacaaatttagaactggaagggacttgggaatctactggtccttgggttctgagactgttcctcagcaccccaggaaatctgagggttgggaatgagctcaagacagtcttggactcgccactattgtattctaccttcaagtaggatttccactggaagtcttagcagatacgtcactagccccacatcgcagagctgaagcccacatagctctgccccggtccaggcacctgctggctgcctggggcagcctgtcaactgcagtactcattgctgttctgtcctttccacaggcaatcgaaaatatcgacaccttaaccaacctggagagtttgtttttggggaaaaacaaaattactaaacttcag

SEQ ID NO: 458684 - DNA, 1392 bp, Homo sapiens
ggatgcacgtaggactggcccgcaccttgcagccacggaaagatccgcctggcccgcggcccctccacgcctccgaggtcgagacagtgacataagtcaactctcaagcccagggcgtctctccactctgcctagacgtccactccgtctgcctgcagctacggctctgtgcgtcccgcttcgactccctctgctttccttcccagcttctcgcctccagactgttccggctccgccgcctgaaattacctgctctgggggaggcgcggcgcgcggcctcatgacggaactacaactcccatgaggcgctgggcccacgcaggcgcggcgcggctgaagtcgccgcgccggaatcccattggcagggccggctctgaggcgggagccctgattggctgaggggtctgaggcgacagattccggaaaggggaagagcagccaacatggcggcggaacgcggcgcggggcagcaacagtcgcaggagatgatggaggttgacaggcgggtcgagtctgaagaatccggcgatgaagaagggaagaaacacagcagtggcatcgtggccgacctcagtgaacagagcctgaaggatggggaggagcggggggaggaggacccagaagaagaacatgagctgcctgtggacatggaaaccatcaacctggacagagatgcagaggatgttgatttgaatcactatcgcatagggaagattgaaggatttgaggtactgaagaaagtgaagactctctgcctccgccaaaatttaattaaatgcattgagaatctggaggagctacagagtcttcgagagctggatctttacgacaaccagatcaagaagattgagaatctggaggcgctaacagagctggagattctagatatttcttttaatctgctgagaaacatcgaaggggttgacaagttgacacgactgaaaaaactcttcttggtcaacaataaaatcagtaaaattgagaacttaagcaacttacatcaactacagatgctagagctgggatctaaccgcatccgggcaatcgaaaatatcgacaccttaaccaacctggagagtttgtttttggggaaaaacaaaattactaaacttcagaacctggatgcgctcaccaacctgacagtcctcagtatgcagagcaaccggctgaccaagatcgagggtctgcagaacctggtgaacctgcgggagctgtaccttagccacaatggcatcgaggtcatcgagggcctggagaacaatgtgcaggacagcctcacgtactgaggggaagtgtgctcacagagcccccaccctcctcagctgcctccagctcaccctgctctgccccagtgcggtgttcaagacaaataaaagactttttctcattcaa

SEQ ID NO: 458685 - DNA, 956 bp, Homo sapiens
tctacgaggcccgcgctaagggttgctagggacgcaccaaacacccctacggcgcttcggaggagccaaaggaataatgggcgcctccgcccccgggccgggcagatgcggtttcctcccgactcgcgatcaaaatggaagaacatgagctgcctgtggacatggaaaccatcaacctggacagagatgcagaggatgttgatttgaatcactatcgcatagggaagattgaaggatttgaggtactgaagaaagtgaagactctctgcctccgccaaaatttaattaaatgcattgagaatctggaggagctacagagtcttcgagagctggatctttacgacaaccagatcaagaagattgagaatctggaggcgctaacagagctggagattctagatatttcttttaatctgctgagaaacatcgaaggggttgacaagttgacacgactgaaaaaactcttcttggtcaacaataaaatcagtaaaattgagaacttaagcaacttacatcaactacagatgctagagctgggatctaaccgcatccgggcaatcgaaaatatcgacaccttaaccaacctggagagtttgtttttggggaaaaacaaaattactaaacttcagaacctggatgcgctcaccaacctgacagtcctcagtatgcagagcaaccggctgaccaagatcgagggtctgcagaacctggtgaacctgcgggagctgtaccttagccacaatggcatcgaggtcatcgagggcctggagaacaataacaaactcacgatgttggacattgcatcaaatagaatcaaaaagattgaaaatatcagccatctaacagagctgcaagagttctggataacaaaaactcttaaaggtgggcgaactcgacgagtgatggagcagaacctgacacaggcacgaaaggaaaccattagaaagccccaatac

SEQ ID NO: 458686 - DNA, 381 bp, Homo sapiens
tctacgaggcccgcgctaagggttgctagggacgcaccaaacacccctacggcgcttcggaggagccaaaggaataatgggcgcctccgcccccgggccgggcagatgcggtttcctcccgactcgcgatcaaaatgggtgagtagcgcagagctcgcctcttggaggcctctttctgaaggcggaggacgctggggcggctcgttcatgggccgggtggctccgcagggtagacgaaggctgcagcgtccgcactgggctgggaacgacttgcaaggggagcccagctggcgccccggagccagccagctggctagcggccccaccagcgcaagtgccccgcacctgcccgcctgctccgagcgtcaagagaaggcggca

SEQ ID NO: 458687 - DNA, 2015 bp, Homo sapiens
ggatgcacgtaggactggcccgcaccttgcagccacggaaagatccgcctggcccgcggcccctccacgcctccgaggtcgagacagtgacataagtcaactctcaagcccagggcgtctctccactctgcctagacgtccactccgtctgcctgcagctacggctctgtgcgtcccgcttcgactccctctgctttccttcccagcttctcgcctccagactgttccggctccgccgcctgaaattacctgctctgggggaggcgcggcgcgcggcctcatgacggaactacaactcccatgaggcgctgggcccacgcaggcgcggcgcggctgaagtcgccgcgccggaatcccattggcagggccggctctgaggcgggagccctgattggctgaggggtctgaggcgacagattccggaaaggggaagagcagccaacatggcggcggaacgcggcgcggggcagcaacagtcgcaggagatgatggaggttgacaggcgggtcgagtctgaagaatccggcgatgaagaagggaagaaacacagcagtggcatcgtggccgacctcagtgaacagagcctgaaggatggggaggagcggggggaggaggacccagaagaagaacatgagctgcctgtggacatggaaaccatcaacctggacagagatgcagaggatgttgatttgaatcactatcgcatagggaagattgaaggatttgaggtactgaagaaagtgaagactctctgcctccgccaaaatttaattaaatgcattgagaatctggaggagctacagagtcttcgagagctggatctttacgacaaccagatcaagaagattgagaatctggaggcgctaacagagctggagattctagatatttcttttaatctgctgagaaacatcgaaggggttgacaagttgacacgactgaaaaaactcttcttggtcaacaataaaatcagtaaaattgagaacttaagcaacttacatcaactacagatgctagagctgggatctaaccgcatccgggcaatcgaaaatatcgacaccttaaccaacctggagagtttgtttttggggaaaaacaaaattactaaacttcagaacctggatgcgctcaccaacctgacagtcctcagtatgcagagcaaccggctgaccaagatcgagggtctgcagaacctggtgaacctgcgggagctgtaccttagccacaatggcatcgaggtcatcgagggcctggagaacaataacaaactcacgatgttggacattgcatcaaatagaatcaaaaagattgaaaatatcagccatctaacagagctgcaagagttctggatgaacgacaatctccttgagagctggagcgacctcgacgagctgaagggagccaggagcctggagacagtgtacctggagcggaaccccttgcagaaggacccccagtaccggcggaaggtcatgctcgccctcccctccgtgcggcagatcgatgccacgttcgtcaggttctgagtccttcttggctcctcatgtggtccctctcctcggaagaactgcccagccacgggtttttaacccacctgttgctcctgaggtcgtcactatatcaacagtcacaaacccaatggcaataaaggcactgacgatagctggcgcgcgcgacgccacacaccattttcagatgccgttgcaattaaatcttgccacaaaaaaaaaaaaaaaaaaaaaaaaaaaaaaaaaaaaaagacagatgagagaaaaaaagagaaggaaataaaacaggaaaagggaacgagatgtagatgaaattgaaaaaaaaaaaaaaaaaataaatgagaggtaaaaaggaatgaaagaagtgggggtgcggattgtcaaatagggagttggggcaagacagataggagtaggggggtagatgaggcagagggtgtgatgaagggacgagagcgcgtggaggaatgtaggagagcgtccacagatgaggggggggggggggta

SEQ ID NO: 458688 - DNA, 2012 bp, Homo sapiens
tctacgaggcccgcgctaagggttgctagggacgcaccaaacacccctacggcgcttcggaggagccaaaggaataatgggcgcctccgcccccgggccgggcagatgcggtttcctcccgactcgcgatcaaaatggttgacaggcgggtcgagtctgaagaatccggcgatgaagaagggaagaaacacagcagtggcatcgtggccgacctcagtgaacagagcctgaaggatggggaggagcggggggaggaggacccagaagaagaacatgagctgcctgtggacatggaaaccatcaacctggacagagatgcagaggatgttgatttgaatcactatcgcatagggaagattgaaggatttgaggtactgaagaaagtgaagactctctgcctccgccaaaatttaattaaatgcattgagaatctggaggagctacagagtcttcgagagctggatctttacgacaaccagatcaagaagattgagaatctggaggcgctaacagagctggagattctagatatttcttttaatctgctgagaaacatcgaaggggttgacaagttgacacgactgaaaaaactcttcttggtcaacaataaaatcagtaaaattgagaacttaagcaacttacatcaactacagatgctagagctgggatctaaccgcatccgggcaatcgaaaatatcgacaccttaaccaacctggagagtttgtttttggggaaaaacaaaattactaaacttcagaacctggatgcgctcaccaacctgacagtcctcagtatgcagagcaaccggctgaccaagatcgagggtctgcagaacctggtgaacctgcgggagctgtaccttagccacaatggcatcgaggtcatcgagggcctggagaacaataacaaactcacgatgttggacattgcatcaaatagaatcaaaaagattgaaaatatcagccatctaacagagctgcaagagttctggatgaacgacaatctccttgagagctggagcgacctcgacgagctgaagggagccaggagcctggagacagtgtacctggagcggaaccccttgcagaaggacccccagtaccggcggaaggtcatgctcgccctcccctccgtgcggcagatcgatgccacgttcgtcaggttctgagtccttcttggctcctcatgtggtccctctcctcggaagaactgcccagccacgggtttttaacccacctgttgctcctgaggtcgtcactatatcaacagtcacaaacccaatggcaataaaggcactgacgatagctggcgcgcgcgacgccacacaccattttcagatgccgttgcaattaaatcttgccacactgtcctcctgggtgattgttgacagttattgtagccacagagagaacataagacacgttgcgttcattcgctagaaatccctgtttccttctctcagaaggcagtcacagtccctacctgagtcgtgtgaaacacagggcctgagagtgctttacaggcattcacgtgctgtccgagtggcattcgggggctggcctagctggccctagtcctggtgtgcagggttcaggcagtcttgacctgcaacaaccgaggttttttagtcttttaacccagccattttcaattttttaaaaattaggtaagttaaaaaagctgggtaaaagctgactcagccctgtgtgcttgtgttccttagagctctccttcaaagagcgccgggcagggctgactgttttcacgtgtgcccgtcagttctcgccacatcccttgcctgtgggtgaaagctcaggtgtggggagggtgtcctgtgtcccacacggtgctgtgctgctgccagaatacgagtcccattgagcctctccaaagacggcctccaaggatctgaactcttggccactggtatagtggcctcctgttctcaccccattgttattttggcttttttaatataaaatgtacattgacagacaaaaaaagtctggat

SEQ ID NO: 458689 - DNA, 1848 bp, Homo sapiens
gcacacgcgaccccacacacacacccaaacacgagacaacgaaccaactggcacgtgagtgaggcagcgtgggctatggagcggggggaggaggacccagaagaagaacatgagctgcctgtggacatggaaaccatcaacctggacagagatgcagaggatgttgatttgaatcactatcgcatagggaagattgaaggatttgaggtactgaagaaagtgaagactctctgcctccgccaaaatttaattaaatgcattgagaatctggaggagctacagagtcttcgagagctggatctttacgacaaccagatcaagaagattgagaatctggaggcgctaacagagctggagattctagatatttcttttaatctgctgagaaacatcgaaggggttgacaagttgacacgactgaaaaaactcttcttggtcaacaataaaatcagtaaaattgagaacttaagcaacttacatcaactacagatgctagagctgggatctaaccgcatccgggcaatcgaaaatatcgacaccttaaccaacctggagagtttgtttttggggaaaaacaaaattactaaacttcagaacctggatgcgctcaccaacctgacagtcctcagtatgcagagcaaccggctgaccaagatcgagggtctgcagaacctggtgaacctgcgggagctgtaccttagccacaatggcatcgaggtcatcgagggcctggagaacaataacaaactcacgatgttggacattgcatcaaatagaatcaaaaagattgaaaatatcagccatctaacagagctgcaagagttctggatgaacgacaatctccttgagagctggagcgacctcgacgagctgaagggagccaggagcctggagacagtgtacctggagcggaaccccttgcagaaggacccccagtaccggcggaaggtcatgctcgccctcccctccgtgcggcagatcgatgccacgttcgtcaggttctgagtccttcttggctcctcatgtggtccctctcctcggaagaactgcccagccacgggtttttaacccacctgttgctcctgaggtcgtcactatatcaacagtcacaaacccaatggcaataaaggcactgacgatagctggcgcgcgcgacgccacacaccattttcagatgccgttgcaattaaatcttgccacactgtcctcctgggtgattgttgacagttattgtagccacagagagaacataagacacgttgcgttcattcgctagaaatccctgtttccttctctcagaaggcagtcacagtccctacctgagtcgtgtgaaacacagggcctgagagtgctttacaggcattcacgtgctgtccgagtggcattcgggggctggcctagctggccctagtcctggtgtgcagggttcaggcagtcttgacctgcaacaaccgaggttttttagtcttttaacccagccattttcaattttttaaaaattaggtaagttaaaaaagctgggtaaaagctgactcagccctgtgtgcttgtgttccttagagctctccttcaaagagcgccgggcagggctgactgttttcacgtgtgcccgtcagttctcgccacatcccttgcctgtgggtgaaagctcaggtgtggggagggtgtcctgtgtcccacacggtgctgtgctgctgccagaatacgagtcccattgagcctctccaaagacggcctccaaggatctgaactcttggccactggtatagtggcctcctgttctcaccccattgttattttggcttttttaatataaaatgtacattgacagacaaaaaaagtctggat

SEQ ID NO: 458690 - DNA, 2351 bp, Homo sapiens
ggatgcacgtaggactggcccgcaccttgcagccacggaaagatccgcctggcccgcggcccctccacgcctccgaggtcgagacagtgacataagtcaactctcaagcccagggcgtctctccactctgcctagacgtccactccgtctgcctgcagctacggctctgtgcgtcccgcttcgactccctctgctttccttcccagcttctcgcctccagactgttccggctccgccgcctgaaattacctgctctgggggaggcgcggcgcgcggcctcatgacggaactacaactcccatgaggcgctgggcccacgcaggcgcggcgcggctgaagtcgccgcgccggaatcccattggcagggccggctctgaggcgggagccctgattggctgaggggtctgaggcgacagattccggaaaggggaagagcagccaacatggcggcggaacgcggcgcggggcagcaacagtcgcaggagatgatggaggttgacaggcgggtcgagtctgaagaatccggcgatgaagaagggaagaaacacagcagtggcatcgtggccgacctcagtgaacagagcctgaaggatggggaggagcggggggaggaggacccagaagaagaacatgagctgcctgtggacatggaaaccatcaacctggacagagatgcagaggatgttgatttgaatcactatcgcatagggaagattgaaggatttgagactctctgcctccgccaaaatttaattaaatgcattgagaatctggaggagctacagagtcttcgagagctggatctttacgacaaccagatcaagaagattgagaatctggaggcgctaacagagctggagattctagatatttcttttaatctgctgagaaacatcgaaggggttgacaagttgacacgactgaaaaaactcttcttggtcaacaataaaatcagtaaaattgagaacttaagcaacttacatcaactacagatgctagagctgggatctaaccgcatccgggcaatcgaaaatatcgacaccttaaccaacctggagagtttgtttttggggaaaaacaaaattactaaacttcagaacctggatgcgctcaccaacctgacagtcctcagtatgcagagcaaccggctgaccaagatcgagggtctgcagaacctggtgaacctgcgggagctgtaccttagccacaatggcatcgaggtcatcgagggcctggagaacaataacaaactcacgatgttggacattgcatcaaatagaatcaaaaagattgaaaatatcagccatctaacagagctgcaagagttctggatgaacgacaatctccttgagagctggagcgacctcgacgagctgaagggagccaggagcctggagacagtgtacctggagcggaaccccttgcagaaggacccccagtaccggcggaaggtcatgctcgccctcccctccgtgcggcagatcgatgccacgttcgtcaggttctgagtccttcttggctcctcatgtggtccctctcctcggaagaactgcccagccacgggtttttaacccacctgttgctcctgaggtcgtcactatatcaacagtcacaaacccaatggcaataaaggcactgacgatagctggcgcgcgcgacgccacacaccattttcagatgccgttgcaattaaatcttgccacactgtcctcctgggtgattgttgacagttattgtagccacagagagaacataagacacgttgcgttcattcgctagaaatccctgtttccttctctcagaaggcagtcacagtccctacctgagtcgtgtgaaacacagggcctgagagtgctttacaggcattcacgtgctgtccgagtggcattcgggggctggcctagctggccctagtcctggtgtgcagggttcaggcagtcttgacctgcaacaaccgaggttttttagtcttttaacccagccattttcaattttttaaaaattaggtaagttaaaaaagctgggtaaaagctgactcagccctgtgtgcttgtgttccttagagctctccttcaaagagcgccgggcagggctgactgttttcacgtgtgcccgtcagttctcgccacatcccttgcctgtgggtgaaagctcaggtgtggggagggtgtcctgtgtcccacacggtgctgtgctgctgccagaatacgagtcccattgagcctctccaaagacggcctccaaggatctgaactcttggccactggtatagtggcctcctgttctcaccccattgttattttggcttttttaatataaaatgtacattgacagacaaaaaaagtctggat

SEQ ID NO: 458691 - DNA, 2238 bp, Homo sapiens
ggatgcacgtaggactggcccgcaccttgcagccacggaaagatccgcctggcccgcggcccctccacgcctccgaggtcgagacagtgacataagtcaactctcaagcccagggcgtctctccactctgcctagacgtccactccgtctgcctgcagctacggctctgtgcgtcccgcttcgactccctctgctttccttcccagcttctcgcctccagactgttccggctccgccgcctgaaattacctgctctgggggaggcgcggcgcgcggcctcatgacggaactacaactcccatgaggcgctgggcccacgcaggcgcggcgcggctgaagtcgccgcgccggaatcccattggcagggccggctctgaggcgggagccctgattggctgaggggtctgaggcgacagattccggaaaggggaagagcagccaacatggcggcggaacgcggcgcggggcagcaacagtcgcaggagatgatggaggttgacaggcgggtcgagtctgaagaatccggcgatgaagaagggaagaaacacagcagtggcatcgtggccgacctcagtgaacagagcctgaaggatggggaggagcggggggaggaggacccagaagaagaacatgagctgcctgtggacatggaaaccatcaacctggacagagatgcagaggatgttgatttgaatcactatcgcatagggaagattgaaggatttgaggtactgaagaaagtgaaggattctagatatttcttttaatctgctgagaaacatcgaaggggttgacaagttgacacgactgaaaaaactcttcttggtcaacaataaaatcagtaaaattgagaacttaagcaacttacatcaactacagatgctagagctgggatctaaccgcatccgggcaatcgaaaatatcgacaccttaaccaacctggagagtttgtttttggggaaaaacaaaattactaaacttcagaacctggatgcgctcaccaacctgacagtcctcagtatgcagagcaaccggctgaccaagatcgagggtctgcagaacctggtgaacctgcgggagctgtaccttagccacaatggcatcgaggtcatcgagggcctggagaacaataacaaactcacgatgttggacattgcatcaaatagaatcaaaaagattgaaaatatcagccatctaacagagctgcaagagttctggatgaacgacaatctccttgagagctggagcgacctcgacgagctgaagggagccaggagcctggagacagtgtacctggagcggaaccccttgcagaaggacccccagtaccggcggaaggtcatgctcgccctcccctccgtgcggcagatcgatgccacgttcgtcaggttctgagtccttcttggctcctcatgtggtccctctcctcggaagaactgcccagccacgggtttttaacccacctgttgctcctgaggtcgtcactatatcaacagtcacaaacccaatggcaataaaggcactgacgatagctggcgcgcgcgacgccacacaccattttcagatgccgttgcaattaaatcttgccacactgtcctcctgggtgattgttgacagttattgtagccacagagagaacataagacacgttgcgttcattcgctagaaatccctgtttccttctctcagaaggcagtcacagtccctacctgagtcgtgtgaaacacagggcctgagagtgctttacaggcattcacgtgctgtccgagtggcattcgggggctggcctagctggccctagtcctggtgtgcagggttcaggcagtcttgacctgcaacaaccgaggttttttagtcttttaacccagccattttcaattttttaaaaattaggtaagttaaaaaagctgggtaaaagctgactcagccctgtgtgcttgtgttccttagagctctccttcaaagagcgccgggcagggctgactgttttcacgtgtgcccgtcagttctcgccacatcccttgcctgtgggtgaaagctcaggtgtggggagggtgtcctgtgtcccacacggtgctgtgctgctgccagaatacgagtcccattgagcctctccaaagacggcctccaaggatctgaactcttggccactggtatagtggcctcctgttctcaccccattgttattttggcttttttaatataaaatgtacattgacagacaaaaaaagtctggat

SEQ ID NO: 458692 - DNA, 1377 bp, Homo sapiens
atgcgcgacgcttccatcaagctgccattgactttcttcacagaattagaaaaaaactactttaaatttcatatggaaccaaaaaagaacccatatagccaagacagtcctaagcagagaacaaacctggatgcgctcaccaacctgacagtcctcagtatgcagagcaaccggctgaccaagatcgagggtctgcagaacctggtgaacctgcgggagctgtaccttagccacaatggcatcgaggtcatcgagggcctggagaacaataacaaactcacgatgttggacattgcatcaaatagaatcaaaaagattgaaaatatcagccatctaacagagctgcaagagttctggatgaacgacaatctccttgagagctggagcgacctcgacgagctgaagggagccaggagcctggagacagtgtacctggagcggaaccccttgcagaaggacccccagtaccggcggaaggtcatgctcgccctcccctccgtgcggcagatcgatgccacgttcgtcaggttctgagtccttcttggctcctcatgtggtccctctcctcggaagaactgcccagccacgggtttttaacccacctgttgctcctgaggtcgtcactatatcaacagtcacaaacccaatggcaataaaggcactgacgatagctggcgcgcgcgacgccacacaccattttcagatgccgttgcaattaaatcttgccacactgtcctcctgggtgattgttgacagttattgtagccacagagagaacataagacacgttgcgttcattcgctagaaatccctgtttccttctctcagaaggcagtcacagtccctacctgagtcgtgtgaaacacagggcctgagagtgctttacaggcattcacgtgctgtccgagtggcattcgggggctggcctagctggccctagtcctggtgtgcagggttcaggcagtcttgacctgcaacaaccgaggttttttagtcttttaacccagccattttcaattttttaaaaattaggtaagttaaaaaagctgggtaaaagctgactcagccctgtgtgcttgtgttccttagagctctccttcaaagagcgccgggcagggctgactgttttcacgtgtgcccgtcagttctcgccacatcccttgcctgtgggtgaaagctcaggtgtggggagggtgtcctgtgtcccacacggtgctgtgctgctgccagaatacgagtcccattgagcctctccaaagacggcctccaaggatctgaactcttggccactggtatagtggcctcctgttctcaccccattgttattttggcttttttaatataaaatgtacattgacagacaaaaaaagtctggat

SEQ ID NO: 458693 - DNA, 1570 bp, Homo sapiens
  misc_feature (1162)..(1162): n is a, c, g, or t
  misc_feature (1200)..(1200): n is a, c, g, or t
  misc_feature (1260)..(1260): n is a, c, g, or t
  misc_feature (1316)..(1317): n is a, c, g, or t
  misc_feature (1323)..(1323): n is a, c, g, or t
  misc_feature (1336)..(1336): n is a, c, g, or t
  misc_feature (1373)..(1373): n is a, c, g, or t
  misc_feature (1375)..(1375): n is a, c, g, or t
  misc_feature (1379)..(1379): n is a, c, g, or t
  misc_feature (1381)..(1381): n is a, c, g, or t
  misc_feature (1383)..(1383): n is a, c, g, or t
  misc_feature (1393)..(1393): n is a, c, g, or t
  misc_feature (1407)..(1407): n is a, c, g, or t
  misc_feature (1491)..(1491): n is a, c, g, or t
  misc_feature (1495)..(1495): n is a, c, g, or t
  misc_feature (1519)..(1519): n is a, c, g, or t
ggatgcacgtaggactggcccgcaccttgcagccacggaaagatccgcctggcccgcggcccctccacgcctccgaggtcgagacagtgacataagtcaactctcaagcccagggcgtctctccactctgcctagacgtccactccgtctgcctgcagctacggctctgtgcgtcccgcttcgactccctctgctttccttcccagcttctcgcctccagactgttccggctccgccgcctgaaattacctgctctgggggaggcgcggcgcgcggcctcatgacggaactacaactcccatgaggcgctgggcccacgcaggcgcggcgcggctgaagtcgccgcgccggaatcccattggcagggccggctctgaggcgggagccctgattggctgaggggtctgaggcgacagattccggaaaggggaagagcagccaacatggcggcggaacgcggcgcggggcagcaacagtcgcaggagatgatggaggttgacaggcgggtcgagtctgaagaatccggcgatgaagaagggaagaaacacagcagtggcatcgtggccgacctcagtgaacagagcctgaaggatggggaggagcggggggaggaggacccagaagaagaacatgagctgcctgtggacatggaaaccatcaacctggacagagatgcagaggatgttgatttgaatcactatcgcatagggaagattgaaggatttgaggtactgaagaaagtgaagactctctgcctccgccaaaatttaattaaatgcattgagaatctggaggagctacagagtcttcgagagctggatctttacgacaaccagatcaagaagattgagaatctggaggcgctaacagagctggagattctagatatttcttttaatctgctgagaaacatcgaaggggttgacaagttgacacgactgaaaaaactcttcttggtcaacaataaaatcagtaaaattgagaacttaagcaacttacatcaactacagatgctagagctgggatctaaccgcatccgggcaatcgaaaatatcgacaccttaaccaacctggagagtttgtttttggggaaaaacaaaattactaaacttcagaacctggatgcgctcaccaacctgacagtcctcagtatgcagccacnccaaccccctcaccaacatccaccctctccacaacctnctcaactcccccacctctaccttacccacaatcccatccacctcatccaccccctccacnacaatcacacactcaccatcttccacattccatcaaatacaatcaaaaacattcannatctcncccatctcacacncctccaacacttctccatcaaccacaatctccttcananctgnancnacctccaccncctcaacccacccnccaccctccacacactctacctccaccccaaccccttccacaaccacccccactacccccccaacctcatcctccccctccccncccncccccacatccatcccaccttccncaccttctcactccttcttgccctcctcatctcctccctctcctccccacc

SEQ ID NO: 458694 - DNA, 1374 bp, Homo sapiens
ggatgcacgtaggactggcccgcaccttgcagccacggaaagatccgcctggcccgcggcccctccacgcctccgaggtcgagacagtgacataagtcaactctcaagcccagggcgtctctccactctgcctagacgtccactccgtctgcctgcagctacggctctgtgcgtcccgcttcgactccctctgctttccttcccagcttctcgcctccagactgttccggctccgccgcctgaaattacctgctctgggggaggcgcggcgcgcggcctcatgacggaactacaactcccatgaggcgctgggcccacgcaggcgcggcgcggctgaagtcgccgcgccggaatcccattggcagggccggctctgaggcgggagccctgattggctgaggggtctgaggcgacagattccggaaaggggaagagcagccaacatggcggcggaacgcggcgcggggcagcaacagtcgcaggagatgatggaggttgacaggcgggtcgagtctgaagaatccggcgatgaagaagggaagaaacacagcagtggcatcgtggccgacctcagtgaacagagcctgaaggatggggaggagcggggggaggaggacccagaagaagaacatgagctgcctgtggacatggaaaccatcaacctggacagagatgcagaggatgttgatttgaatcactatcgcatagggaagattgaaggatttgagactctctgcctccgccaaaatttaattaaatgcattgagaatctggaggagctacagagtcttcgagagctggatctttacgacaaccagatcaagaagattgagaatctggaggcgctaacagagctggagattctagatatttcttttaatctgctgagaaacatcgaaggggttgacaagttgacacgactgaaaaaactcttcttggtcaacaataaaatcagtaaaattgagaacttaagcaacttacatcaactacagatgctagagctgggatctaaccgcatccgggcaatcgaaaatatcgacaccttaaccaacctggagagtttgtttttggggaaaaacaaaattactaaacttcagaacctggatgcgctcaccaacctgacagtcctcagtatgcagagcaaccggctgaccaagatcgagggtctgcagaacctggtgaacctgcgggagctgtaccttagccacaatggcatcgaggtcatcgagggcctggagaacaatgtgcaggacagcctcacgtactgaggggaagtgtgctcacagagcccccaccctcctcagctgcctccagctcaccctgctctgccccagtgcggtgttcaagacaaataaaagactttttctcattcaa

SEQ ID NO: 458695 - DNA, 532 bp, Homo sapiens
catgtccacctaatttttgtatttttagtagagacggggttttgccatgttggtcaggctggtcttgaactcctgacctcaggtgatccacccacctcggctcccaaagtgctgggattacaggcatgagccaccgtgcccggccaaggctgagacttttctggtccaagacctagatctttggtttcaaatgagagttatttctgatgtcatccattcaataaatatttattatgcgcctgttctgtacctggccttgtgccgagcagtgctgaggacaggcctggccctggggttccctacctagatgaggaggcagacacgtaaacaataagttaaatatgggattataaaatgtgataagggctatgaagaaaccttggggtcaatgatatttaataacagggtggggatacgagaactagtgagatagaatgggaaggaaaattccctttttgtttttggaggcagagtctcattctgtcgcctacactggagtgcagtggcgtgatctaggcttactgcaacctcc

SEQ ID NO: 458696 - DNA, 1369 bp, Homo sapiens
cacgaggagagacccacgcccctcccatcctcaggtgcctgcttcagaaaatgaagtagtaagtctgctggcctccgccatcttagtaaagtaacagtcccatgaaacaaagatgcagtcgggcactcactggagagttctgggcctctgcctcttatcagttggcgtttgggggcaagatggtaatgaagaaatgggtggtattacacagacaccatataaagtctccatctctggaaccacagtaatattgacatgccctcagtatcctggatctgaaatactatggcaacacaatgataaaaacataggcggtgatgaggatgataaaaacataggcagtgatgaggatcacctgtcactgaaggaattttcagaattggagcaaagtggttattatgtctgctaccccagaggaagcaaaccagaagatgcgaacttttatctctacctgagggcaagagtgtgtgagaactgcatggagatggatgtgatgtcggtggccacaattgtcatagtggacatctgcatcactgggggcttgctgctgctggtttactactggagcaagaatagaaaggccaaggccaagcctgtgacacgaggagcgggtgctggcggcaggcaaaggggacaaaacaaggagaggccaccacctgttcccaacccagactatgagcccatccggaaaggccagcgggacctgtattctggcctgaatcagagacgcatctgaccctctggagaacactgcctcccgctggcccaggtctcctctccagtccccctgcgactccctgtttcctgggctagtcttggaccccacgagagagaatcgttcctcagcctcatggtgaactcgcgccctccagcctgatcccccgctccctcctccctgccttctctgctggtacccagtcctaaaatattgctgcttcctcttcctttgaagcatcatcagtagtcacaccctcacagctggcctgccctcttgccaggatatttatttgtgctattcactcccttccctttggatgtaacttctccgttcagttccctccttttcttgcatgtaagttgtcccccatcccaaagtattccatctacttttctatcgccgtccccttttgcagccctctctggggatggactgggtaaatgttgacagaggccctgccccgttcacagatcctggccctgagccagccctgtgctcctccctcccccaacactccctaccaaccccctaatcccctactccctccaccccccctccactgtaggccactggatggtcatttgcatctccgtaaatgtgctctgctcctcagctgagagagaaaaaaataaactgtatttggctgcaaga

SEQ ID NO: 458697 - DNA, 231 bp, Homo sapiens
aggaggtaggaagagagggaggaggaaaggaagcatagatgcctcaggcttcaggccttacatgggttttcagggccaacataaatgtaaatactcctgattactcccctaatcccctactccctccaccccccctccactgtaggccactggatggtcatttgcatctccgtaaatgtgctctgctcctcagctgagagagaaaaaaataaactgtatttggctgcaaga

SEQ ID NO: 458698 - DNA, 1203 bp, Homo sapiens
agtaaatggggtgggtcattaacaacgagaacatccaaataattaaaaagctccttcccatttcttcctggtaacacagtaatattgacatgccctcagtatcctggatctgaaatactatggcaacacaatgataaaaacataggcggtgatgaggatgataaaaacataggcagtgatgaggatcacctgtcactgaaggaattttcagaattggagcaaagtggttattatgtctgctaccccagaggaagcaaaccagaagatgcgaacttttatctctacctgagggcaagagtgtgtgagaactgcatggagatggatgtgatgtcggtggccacaattgtcatagtggacatctgcatcactgggggcttgctgctgctggtttactactggagcaagaatagaaaggccaaggccaagcctgtgacacgaggagcgggtgctggcggcaggcaaaggggacaaaacaaggagaggccaccacctgttcccaacccagactatgagcccatccggaaaggccagcgggacctgtattctggcctgaatcagagacgcatctgaccctctggagaacactgcctcccgctggcccaggtctcctctccagtccccctgcgactccctgtttcctgggctagtcttggaccccacgagagagaatcgttcctcagcctcatggtgaactcgcgccctccagcctgatcccccgctccctcctccctgccttctctgctggtacccagtcctaaaatattgctgcttcctcttcctttgaagcatcatcagtagtcacaccctcacagctggcctgccctcttgccaggatatttatttgtgctattcactcccttccctttggatgtaacttctccgttcagttccctccttttcttgcatgtaagttgtcccccatcccaaagtattccatctacttttctatcgccgtccccttttgcagccctctctggggatggactgggtaaatgttgacagaggccctgccccgttcacagatcctggccctgagccagccctgtgctcctccctcccccaacactccctaccaaccccctaatcccctactccctccaccccccctccactgtaggccactggatggtcatttgcatctccgtaaatgtgctctgctcctcagctgagagagaaaaaaataaactgtatttggctgcaaga

SEQ ID NO: 458699 - DNA, 903 bp, Homo sapiens
cacgaggagagacccacgcccctcccatcctcaggtgcctgcttcagaaaatgaagtagtaagtctgctggcctccgccatcttagtaaagtaacagtcccatgaaacaaagatgcagtcgggcactcactggagagttctgggcctctgcctcttatcagttggcgtttgggggcaagatggtaatgaagaaatgggtggtattacacagacaccatataaagtctccatctctggaaccacagtaatattgacatgccctcagtatcctggatctgaaatactatggcaacacaatgataaaaacataggcggtgatgaggatgataaaaacataggcagtgatgaggatcacctgtcactgaaggaattttcagaattggagcaaagtggttattatgtctgctaccccagaggaagcaaaccagaagatgcgaacttttatctctacctgagggcaagagtgtgtgagaactgcatggagatggatgtgatgtcggtggccacaattgtcatagtggacatctgcatcactgggggcttgctgctgctggtttactactggagcaagaatagaaaggccaaggccaagcctgtgacacgaggagcgggtgctggcggcaggcaaaggggacaaaacaaggagaggccaccacctgttcccaacccagactatgagcccatccggaaaggccagcgggacctgtattctggcctgaatcagagacgcatctgaccctctggagaacactgcctcccgctggcccaggtctcctctccagtccccctgcgactccctgtttcctgggctagtcttggaccccacgagagagaatcgttcctcagcctcatggtgaactcgcgccctcagtagccacagggatcctctagaacgctacacca

SEQ ID NO: 458700 - DNA, 1422 bp, Homo sapiens
cacgaggagagacccacgcccctcccatcctcaggtgcctgcttcagaaaatgaagtagtaagtctgctggcctccgccatcttagtaaagtaacagtcccatgaaacaaagatgcagtcgggcactcactggagagttctgggcctctgcctcttatcagttggcgtttgggggcaagatggtaatgaagaaatgggtggtattacacagacaccatataaagtctccatctctggaaccacagtaatattgacatgccctcagtatcctggatctgaaatactatggcaacacaatgataaaaacataggcggtgatgaggatgataaaaacataggcagtgatgaggatcacctgtcactgaaggaattttcagaattggagcaaagtggttattatgtctgctaccccagaggaagcaaaccagaagatgcgaacttttatctctacctgagggcaagagtgtgtgagaactgcatggagatggatgtgatgtcggtggccacaattgtcatagtggacatctgcatcactgggggcttgctgctgctggtttactactggagcaagaatagaaaggccaaggccaagcctgtgacacgaggagcgggtgctggcggcaggcaaaggggacaaaacaaggagaggccaccacctgttcccaacccagactatgagcccatccggaaaggccagcgggacctgtattctggcctgaatcagagacgcatctgaccctctggagaacactgcctcccgctggcccaggtctcctctccagtccccctgcgactccctgtttcctgggctagtcttggaccccacgagagagaatcgttcctcagcctcatggtgaactcgcgccctccagcctgatcccccgctccctcctccctgccttctctgctggtacccagtcctaaaatattgctgcttcctcttcctttgaagcatcatcagtagtcacaccctcacagctggcctgccctcttgccaggatatttatttgtgctattcactcccttccctttggatgtaacttctccgttcagttccctccttttcttgcatgtaagttgtcccccatcccaaagtattccatctacttttctatcgccgtccccttttgcagccctctctggggatggactgggtaaatgttgacagaggccctgccccgttcacagatcctggccctgagccagccctgtgctcctccctcccccaacactccctaccaaccccctaatcccctactccctccaccccccctccactgtaggccactggatggtcatttgcatctccgtaaatgtgctctgctcctcagctgagagagaaaaaaataaactgtatttggctgcaagaaataattctataatataatttatattatgtggatatatctacagtaaaaactc

SEQ ID NO: 458701 - DNA, 927 bp, Homo sapiens
gggtgatctagaggatccttcatgtgtgagaactgcatggagatggatgtgatgtcggtggccacaattgtcatagtggacatctgcatcactgggggcttgctgctgctggtttactactggagcaagaatagaaaggccaaggccaagcctgtgacacgaggagcgggtgctggcggcaggcaaaggggacaaaacaaggagaggccaccacctgttcccaacccagactatgagcccatccggaaaggccagcgggacctgtattctggcctgaatcagagacgcatctgaccctctggagaacactgcctcccgctggcccaggtctcctctccagtccccctgcgactccctgtttcctgggctagtcttggaccccacgagagagaatcgttcctcagcctcatggtgaactcgcgccctccagcctgatcccccgctccctcctccctgccttctctgctggtacccagtcctaaaatattgctgcttcctcttcctttgaagcatcatcagtagtcacaccctcacagctggcctgccctcttgccaggatatttatttgtgctattcactcccttccctttggatgtaacttctccgttcagttccctccttttcttgcatgtaagttgtcccccatcccaaagtattccatctacttttctatcgccgtccccttttgcagccctctctggggatggactgggtaaatgttgacagaggccctgccccgttcacagatcctggccctgagccagccctgtgctcctccctcccccaacactccctaccaaccccctaatcccctactccctccaccccccctccactgtaggccactggatggtcatttgcatctccgtaaatgtgctctgctcctcagctgagagagaaaaaaataaactgtatttggctgcaaga

SEQ ID NO: 458702 - DNA, 6661 bp, Homo sapiens
tagctaggcatggtggtgcgtgcctgtagtcccaggtacttgggaggctaaggtgtgaggatcacctgagcctgagcctgggaagtcaaggctgcagtgagccgagatttttgtgccactgcactctagcctgggtgatgagagtgagacccaagaaataaagaagaaagagaaaaagaaaaaaggaaggaaggaaggaaagagaggagaggagaggagagaggaggagagaaggagagaaggaggaagggagggaaggaaggaaggaaggaaggtcaataattggctttcatggtttgatttcagtcccatacattaaagaaaaaaattttttaaaggtcttagcccactggctgtgggtcctgcccccaggtggttttcagtcgtctccctcatgattccagcggccatagccatctcgttcctctggctcttcgatactctcattctcaaaggaggcctcttcctcctcttcttcccgtattaccttcattagctcaaggaagctggggggcgggccctgatccttcagctccctaagccggcaccacagcatctggttaagagtggccccagccatgacctgctccaggcggacctggtccgcaatacgccgagggatggcgcgtttctccaccgctctccggagcagggtttctagccgtaacacataggctgagaccttctctccttcctcctgataggtcttcagatacctcacctgggctgtcctgcggctctctaggctcccaaacacttgcttaaaggcctccaaacactcttctacactgatggacgggttgtctgcctgcactatgtgcatgaggtccagggcagggccccgcaggctttccgccagccaccttttcttttctgcctctgttactggccactctttgactatctccgtggcctgttccaaccagacctcaaaggactcttcctctggggctgggacagcactccctgagaatactcgcagtttccggtatctcatgggtagcaggggctgaggcgcatgtgccattgcctgtcccaacaaatgggccagtaattctggtgagatgcagggcactgtggctggagacacgccctcctgccccagggctcgaaacatacccgagaccgtctgcccctctttttctagaaacaggttcaatctttcaagaaactcagtgtcctgattaggggtcttaaagatcaccttccagacacccccctttccctggacctcactgggaatggccgagacatcagtatcttccagaagctctagtaagacagcattggcattctcctgcttccggaatatcttgccaagcagtctatacctgcccagagactttaaagtctcctgaaggacctcctgaatctcagcctcctcaaagtccgccggtatccccgtaaccatcagtgacttctgctcatccacactcattatcctgcaccagtcctctaacagtgccagggccattgtcctaagaattgacccactctgactctacaggcaccaatttgttagtggtgcagctatgcactgacttaatattgaaaatatcctggatgagcttctaaccttagaacccaccaatgaatgggtcccagactaggtcactcaaagacagtcacaaagttttctggacaaattgaccctggcctactcagtggcaagaactcaggacttcttgtctttaggcctgacccaggtgggcaggtcgtatctcagttctactcagggtcagtgtggtacgttcaatccacaggctcttgaattcattctccttgtccttggggcctttgtgaaaaggcctgtcataccgaaaactacacagaggccgcatttaccctgctcctttactgtgagctgctgcagtgggaggaccggccactacgggaattcctccactacccatcgcagacagagtggcagcggaaggagggactgtgccggaagatcattcactacttcaacaaaggcaagagctgggagtttgggatcccactgtgcagggagctggcgtgtcagtacgagagcctctatgattaccagagcctcagctggattcggaaaatggaggccagctactatgacaacattatggagcagcaacgcctggagcctgagttctttcgggtcggcttctatggcaggaagtttcctttctttcttcggaacaaagaatacgtgtgccgtggccatgactacgagaggctggaggccttccagcagaggatgctcagtgagtttccgcaggctgtcgccatgcagcaccccaaccatcctgatgacgccatcctacagtgcgatgcccagtacttgcagatctatgcagtgacgcccattccagattatgtggatgttctgcagatggatagggtaccagatcgagtcaagagcttctatcgcgtcaacaatgtgaggaagttccggtatgacaggccttttcacaaaggccccaaggacaaggagaatgaattcaagagcctgtggattgaacgtaccacactgaccctgacccacagcttgcctggcatctctcggtggtttgaagtggagaggagggaactggtggaggtgagccctctggagaatgccatccaagtggttgagaataagaaccaggagctacgctccctgatcagccagtatcaacacaagcaggtgcatggcaacattaacctgctaagcatgtgcctgaatggtgtcattgatgcagctgtcaatggaggcattgcacgctatcaggaggccttctttgataaagattacatcaacaagcacccaggagatgctgagaagatcacccagctcaaggagcttatgcaggagcaggttcatgtccttggagttgggctagcagttcatgagaagtttgtgcacccagaaatgcggcctctgcataagaagctaattgatcagttccagatgatgcgggccagtctctaccatgagtttccaggtttggataagctaagtcctgcatgttcaggcaccagcaccccacggggaaatgttctggcatcccatagccccatgagtccggagagcatcaagatgacccaccggcacagtgaagcaggaaacatggtgatgctgggtgacggctccatgggtgatgctcctgaggacctgtaccaccacatgcagctcgcgtatcccaaccccaggtaccaaggctcagtcaccaacgtctctgttctgtcctcgtcccaggcaagcccttcttcctccagcctgagttccactcactcagcaccatcccagatgattacctctgccccttccagtgcccgaggctctccctctctgccagataagtaccgccatgcccgtgaaatgatgttgttgctgcccacataccgggaccgcccaagcagtgccatgtatccagcagccatcctggagaacggacagccgccgaatttccagcgagccctgttccagcaagtggtcggagcctgcaaaccctgcagtgatcccaatctgtctgtggctgaaaaagtctcctctccaccctatcccagcctcccccacaagcccccagtcaggtctggacggcagcaactctacgctgtccggcagtgccagcagcggcgtgtcctccttgagtgagagtaactttgggcactcctcggaggccccacctcgcactgacaccatggactccatgccaagtcaggcctggaatgctgacgaagatcttgagccaccctacctccctgtccactacagcctctctgagtctgccgtcctggactccatcaaggcccagccatgccgaagccactcagccccagggtgcgtcatccctcaggaccccatggacccgcctgcgctgccgcccaagccctaccacccccgcctgccggccctggagcacgatgagggggtgctgctgcgtgaagagactgagaggcctcgaggcctgcaccgcaaggctccattgcctcctgggagcgctaaggaggagcaggcccgcatggcctgggagcacggccgaggggagcagtgaggggcaacgaggcggctgggatgccgccctcagtaagcagcttgccaatcactccaggtctgaaaagcaagtcccccagccccaccccagggagccagagaggcttgcactcaggagagaaccacccccaagtctccgttctactgccgtgaactcatgtgttgccatgtacagaggccacagcagcatgaagggttgtggcttccctttttatttttttacatttccatttctatgggttttcctttctttcctttatgcagtagatgctttcttcctcctgcagttctggaccatgtggagctacatggagaaattgcacagacagaatcactttgccacactgcagggcccaggagtgggagcccaggccctccctccagggtagagatgcaccgaatggaaattgcactaaggacctcttcctttgctgtatggacagaagagttcatggttgcattcagggattgcaaggaccatatagacatgtcacaggtggaaaaagggccacaagccgttttgcacaaatgcctgcccacctgcccctcttccatccaggagtgtgctactgaggggctggctggaccaacctgctggctcaggcatgtgactggcctaactgcatgcccagggcactgccagggttcaatgggccagccgtctcctactccaccttggatttttctctccatcacatcatttctgaccatttgctcccttccattcttgaaacacctcatgccccacaggagccccagtggtgactggatctgcaagggttatctcccgccctctggggtttgagtggaggtatggagccagagaggctatcctagctaccttcctcctagggggagctggtccccttcctatgtggtagagagactggtgtaagagtgtggggtgtggcaggcgccggaaatcctcaaagctttcagaagcatccagaatgcctaccatcagctcctgaatcagggattttcagcactacctctgagccatggggttggctgcccagccaggcttccaggccctgaggacatgtggtcaggttcagcaggctcctgggtaaagagggtgggagggggcttctccttttggaagcagatagccatgcaggtagaattgtcatctcccaagtggccacatacagcaacccactccaggccatggggaccaccactcagggttcggggctggcaggagggtagtttctccagtctccccagtctgttggtgtctttataggaaactataaagcagagcagtggtgtctttagaggaaactcattcaagtcagggcactgattttcctctcagtttattatttggggggatagggtcaggtgggtatagtagtactttaccagggtgcttttaagttactttaaaaaaagcctacaaaatattttttttcttttatttgctcgagttcacattaatgatggtcacaaggctgccttgttgggcaggcgtattgcccccagttcctcttctgctggcctgtatgacctccacagccaggccctgggcccaagccccttgtcccttctccactgcccctctttccagacagtaaaggccatggtcagtgtgtttttctcttgtaaacaaaccccagcttgtttaacagaaatgctaataacctactgggaaagatggaggtctaaattacctccagggtttttctgggggtttatcaccagtgtgggtcccttctgataccaccaggttcactccaggcagagtggggcggaaggctgctgaggatatgggtcagttacagcagccctcacctcaaagggctggcctgcttctcagcctacattcatttgcaagcttcaatctctggaccatctggtgttcacaggtgttagagggttaggggttaggggctagttttggatttgattcataggtaggagggcttagattttaaggcacttctgaaagtcaatccctggacaaggcagtcatcacataagaacagctaccttctccacttggtggcacaagaggtagggaggggagtatgggttcatttggcttcgcattatgcaaggtgaaaccgtttgttttccctctccattttccctaactaaatgaaaaggacacattctgaaatcccttttgttggagaataagtcagtctgaggggaaatgggaggccagagatgagaaccctttgaaaagattgtaaaatactgattttcattctttcaagcttatttgtaaatacctatttgaatgctgtgtatttgtacaggaatttgagcaaaaaatgtatagagtgtgatgtccaattggtattcagcactataaatgtgtttttaacctcccgcattctgtgcttatttaaaacaaggaaacttctaaccatttcttttgtgtattcatgtttaaagaaaaaaagtgatttaaaaatgatcttacctgtaccagaaaagcaaagttaaaggaaacaaaatttgtaccattgtcccaagaggtattttactgtatatattgtggtagcatgttcaaaatccaacaagtaatgtgaattttagatgtaaatatctgccacttgattttttttccccctttccccacttccttgactgctgtgatgtgaattaaagataaatacgtgatactgatccactgaa

SEQ ID NO: 458703 - DNA, 6199 bp, Homo sapiens
tagctaggcatggtggtgcgtgcctgtagtcccaggtacttgggaggctaaggtgtgaggatcacctgagcctgagcctgggaagtcaaggctgcagtgagccgagatttttgtgccactgcactctagcctgggtgatgagagtgagacccaagaaataaagaagaaagagaaaaagaaaaaaggaaggaaggaaggaaagagaggagaggagaggagagaggaggagagaaggagagaaggaggaagggagggaaggaaggaaggaaggaaggtcaataattggctttcatggtttgatttcagtcccatacattaaagaaaaaaattttttaaaggtcttagcccactggctgtgggtcctgcccccaggtggttttcagtcgtctccctcatgattccagcggccatagccatctcgttcctctggctcttcgatactctcattctcaaaggaggcctcttcctcctcttcttcccgtattaccttcattagctcaaggaagctggggggcgggccctgatccttcagctccctaagccggcaccacagcatctggttaagagtggccccagccatgacctgctccaggcggacctggtccgcaatacgccgagggatggcgcgtttctccaccgctctccggagcagggtttctagccgtaacacataggctgagaccttctctccttcctcctgataggtcttcagatacctcacctgggctgtcctgcggctctctaggctcccaaacacttgcttaaaggcctccaaacactcttctacactgatggacgggttgtctgcctgcactatgtgcatgaggtccagggcagggccccgcaggctttccgccagccaccttttcttttctgcctctgttactggccactctttgactatctccgtggcctgttccaaccagacctcaaaggactcttcctctggggctgggacagcactccctgagaatactcgcagtttccggtatctcatgggtagcaggggctgaggcgcatgtgccattgcctgtcccaacaaatgggccagtaattctggtgagatgcagggcactgtggctggagacacgccctcctgccccagggctcgaaacatacccgagaccgtctgcccctctttttctagaaacaggttcaatctttcaagaaactcagtgtcctgattaggggtcttaaagatcaccttccagacacccccctttccctggacctcactgggaatggccgagacatcagtatcttccagaagctctagtaagacagcattggcattctcctgcttccggaatatcttgccaagcagtctatacctgcccagagactttaaagtctcctgaaggacctcctgaatctcagcctcctcaaagtccgccggtatccccgtaaccatcagtgacttctgctcatccacactcattatcctgcaccagtcctctaacagtgccagggccattgtcctaagaattgacccactctgactctacaggcaccaatttgttagtggtgcagctatgcactgacttaatattgaaaatatcctggatgagcttctaaccttagaacccaccaatgaatgggtcccagactaggtcactcaaagacagtcacaaagttttctggacaaattgaccctggcctactcagtggcaagaactcaggacttcttgtctttaggcctgacccaggtgggcaggtcgtatctcagttctactcagggtcagtgtggtacgttcaatccacaggctcttgaattcattctccttgtccttggggcctttgtgaaaaggcctgtcataccgaaaactacacagaggccgcatttaccctgctcctttactgtgagctgctgcagtgggaggaccggccactacgggaattcctccactacccatcgcagacagagtggcagcggaaggagggactgtgccggaagatcattcactacttcaacaaaggcaagagctgggagtttgggatcccactgtgcagggagctggcgtgtcagtacgagagcctctatgattaccagagcctcagctggattcggaaaatggaggccagctactatgacaacattatggagcagcaacgcctggagcctgagttctttcgggtcggcttctatggcaggaagtttcctttctttcttcggaacaaagaatacgtgtgccgtggccatgactacgagaggctggaggccttccagcagaggatgctcagtgagtttccgcaggctgtcgccatgcagcaccccaaccatcctgatgacgccatcctacagtgcgatgcccagtacttgcagatctatgcagtgacgcccattccagattatgtggatgttctgcagatggatagggtaccagatcgagtcaagagcttctatcgcgtcaacaatgtgaggaagttccggtatgacaggccttttcacaaaggccccaaggacaaggagaatgaattcaagagcctgtggattgaacgtaccacactgaccctgacccacagcttgcctggcatctctcggtggtttgaagtggagaggagggaactggtggaggtgagccctctggagaatgccatccaagtggttgagaataagaaccaggagctacgctccctgatcagccagtatcaacacaagcaggtgcatggcaacattaacctgctaagcatgtgcctgaatggtgtcattgatgcagctgtcaatggaggcattgcacgctatcaggaggccttctttgataaagattacatcaacaagcacccaggagatgctgagaagatcacccagctcaaggagcttatgcaggagcaggttcatgtccttggagttgggctagcagttcatgagaagtttgtgcacccagaaatgcggcctctgcataagaagctaattgatcagttccagatgatgcgggccagtctctaccatgagtttccaggtttggataagctaagtcctgcatgttcaggcaccagcaccccacggggaaatgttctggcatcccatagccccatgagtccggagagcatcaagatgacccaccggcacagtgaagcaggaaacatggtgatgctgggtgacggctccatgggtgatgctcctgaggacctgtaccaccacatgcagctcgcgtatcccaaccccaggtaccaaggctcagtcaccaacgtctctgttctgtcctcgtcccaggcaagcccttcttcctccagcctgagttccactcactcagcaccatcccagatgattacctctgccccttccagtgcccgaggctctccctctctgccagataagtaccgccatgcccgtgaaatgatgttgttgctgcccacataccgggaccgcccaagcagtgccatgtatccagcagccatcctggagaacggacagccgccgaatttccagcgagccctgttccagcaagtggtcggagcctgcaaaccctgcagtgatcccaatctgtctgtggctgaaaaagtctcctctccaccctatcccagcctcccccacaagcccccagtcaggtctggacggcagcaactctacgctgtccggcagtgccagcagcggcgtgtcctccttgagtgagagtaactttgggcactcctcggaggccccacctcgcactgacaccatggactccatgccaagtcaggcctggaatgctgacgaagatcttgagccaccctacctccctgtccactacagcctctctgagtctgccgtcctggactccatcaaggcccagccatgccgaagccactcagccccagggtgcgtcatccctcaggaccccatggacccgcctgcgctgccgcccaagccctaccacccccgcctgccggccctggagcacgatgagggggtgctgctgcgtgaagagactgagaggcctcgaggcctgcaccgcaaggctccattgcctcctgggagcgctaaggaggagcaggcccgcatggcctgggagcacggccgaggggagcagtgaggggcaacgaggcggctgggatgccgccctcagtaagcagcttgccaatcactccaggtctgaaaagcaagtcccccagccccaccccagggagccagagaggcttgcactcaggagagaaccacccccaagtctccgttctactgccgtgaactcatgtgttgccatgtacagaggccacagcagcatgaagggttgtggcttccctttttatttttttacatttccatttctatgggttttcctttctttcctttatgcagtagatgctttcttcctcctgcagttctggaccatgtggagctacatggagaaattgcacagacagaatcactttgccacactgcagggcccaggagtgggagcccaggccctccctccagggtagagatgcaccgaatggaaattgcactaaggacctcttcctttgctgtatggacagaagagttcatggttgcattcagggattgcaaggaccatatagacatgtcacaggtggaaaaagggccacaagccgttttgcacaaatgcctgcccacctgcccctcttccatccaggagtgtgctactgaggggctggctggaccaacctgctggctcaggcatgtgactggcctaactgcatgcccagggcactgccagggttcaatgggccagccgtctcctactccaccttggatttttctctccatcacatcatttctgaccatttgctcccttccattcttgaaacacctcatgccccacaggagccccagtggtgactggatctgcaagggttatctcccgccctctggggtttgagtggaggtatggagccagagaggctatcctagctaccttcctcctagggggagctggtccccttcctatgtggtagagagactggtgtaagagtgtggggtgtggcaggcgccggaaatcctcaaagctttcagaagcatccagaatgcctaccatcagctcctgaatcagggattttcagcactacctctgagccatggggttggctgcccagccaggcttccaggccctgaggacatgtggtcaggttcagcaggctcctgggtaaagagggtgggagggggcttctccttttggaagcagatagccatgcaggtagaattgtcatctcccaagtggccacatacagcaacccactccaggccatggggaccaccactcagggttcggggctggcaggagggtagtttctccagtctccccagtctgttggtgtctttataggaaactataaagcagagcagtggtgtctttagaggaaactcattcaagtcagggcactgattttcctctcagtttattatttggggggatagggtcaggtgggtatagtagtactttaccagggtgcttttaagttactttaaaaaaagcctacaaaatattttttttcttttatttgctcgagttcacattaatgatggtcacaaggctgccttgttgggcaggcgtattgcccccagttcctcttctgctggcctgtatgacctccacagccaggccctgggcccaagccccttgtcccttctccactgcccctctttccagacagtaaaggccatggtcagtgtgtttttctcttgtaaacaaaccccagcttgtttaacagaaatgctaataacctactgggaaagatggaggtctaaattacctccagggtttttctgggggtttatcaccagtgtgggtcccttctgataccaccaggttcactccaggcagagtggggcggaaggctgctgaggatatgggtcagttacagcagccctcacctcaaagggctggcctgcttctcagcctacattcatttgcaagcttcaatctctggaccatctggtgttcacaggtgttagagggttaggggttaggggctagttttggatttgattcataggtaggagggcttagattttaaggcacttctgaaagtcaatccctggacaaggcagtcatcacataagaacagctaccttctccacttggtggcacaagaggtagggaggggagtatgggttcatttggcttcgcattatgcaaggtgaaaccgtttgttttccctctccattttccctaactaaatgaaaaggaaaacaaacggttcaccttgcagtcgaccggccgcgaatttagtagtagtagtagtagtagtagtcggcggccgc

SEQ ID NO: 458704 - DNA, 2807 bp, Homo sapiens
tcatagaggatccccatatggatacgcggataaggggtgctgctgcgtgaagagactgagaggcctcgaggcctgcaccgcaaggctccattgcctcctgggagcgctaaggaggagcaggcccgcatggcctgggagcacggccgaggggagcagtgaggggcaacgaggcggctgggatgccgccctcagtaagcagcttgccaatcactccaggtctgaaaagcaagtcccccagccccaccccagggagccagagaggcttgcactcaggagagaaccacccccaagtctccgttctactgccgtgaactcatgtgttgccatgtacagaggccacagcagcatgaagggttgtggcttccctttttatttttttacatttccatttctatgggttttcctttctttcctttatgcagtagatgctttcttcctcctgcagttctggaccatgtggagctacatggagaaattgcacagacagaatcactttgccacactgcagggcccaggagtgggagcccaggccctccctccagggtagagatgcaccgaatggaaattgcactaaggacctcttcctttgctgtatggacagaagagttcatggttgcattcagggattgcaaggaccatatagacatgtcacaggtggaaaaagggccacaagccgttttgcacaaatgcctgcccacctgcccctcttccatccaggagtgtgctactgaggggctggctggaccaacctgctggctcaggcatgtgactggcctaactgcatgcccagggcactgccagggttcaatgggccagccgtctcctactccaccttggatttttctctccatcacatcatttctgaccatttgctcccttccattcttgaaacacctcatgccccacaggagccccagtggtgactggatctgcaagggttatctcccgccctctggggtttgagtggaggtatggagccagagaggctatcctagctaccttcctcctagggggagctggtccccttcctatgtggtagagagactggtgtaagagtgtggggtgtggcaggcgccggaaatcctcaaagctttcagaagcatccagaatgcctaccatcagctcctgaatcagggattttcagcactacctctgagccatggggttggctgcccagccaggcttccaggccctgaggacatgtggtcaggttcagcaggctcctgggtaaagagggtgggagggggcttctccttttggaagcagatagccatgcaggtagaattgtcatctcccaagtggccacatacagcaacccactccaggccatggggaccaccactcagggttcggggctggcaggagggtagtttctccagtctccccagtctgttggtgtctttataggaaactataaagcagagcagtggtgtctttagaggaaactcattcaagtcagggcactgattttcctctcagtttattatttggggggatagggtcaggtgggtatagtagtactttaccagggtgcttttaagttactttaaaaaaagcctacaaaatattttttttcttttatttgctcgagttcacattaatgatggtcacaaggctgccttgttgggcaggcgtattgcccccagttcctcttctgctggcctgtatgacctccacagccaggccctgggcccaagccccttgtcccttctccactgcccctctttccagacagtaaaggccatggtcagtgtgtttttctcttgtaaacaaaccccagcttgtttaacagaaatgctaataacctactgggaaagatggaggtctaaattacctccagggtttttctgggggtttatcaccagtgtgggtcccttctgataccaccaggttcactccaggcagagtggggcggaaggctgctgaggatatgggtcagttacagcagccctcacctcaaagggctggcctgcttctcagcctacattcatttgcaagcttcaatctctggaccatctggtgttcacaggtgttagagggttaggggttaggggctagttttggatttgattcataggtaggagggcttagattttaaggcacttctgaaagtcaatccctggacaaggcagtcatcacataagaacagctaccttctccacttggtggcacaagaggtagggaggggagtatgggttcatttggcttcgcattatgcaaggtgaaaccgtttgttttccctctccattttccctaactaaatgaaaaggacacattctgaaatcccttttgttggagaataagtcagtctgaggggaaatgggaggccagagatgagaaccctttgaaaagattgtaaaatactgattttcattctttcaagcttatttgtaaatacctatttgaatgctgtgtatttgtacaggaatttgagcaaaaaatgtatagagtgtgatgtccaattggtattcagcactataaatgtgtttttaacctcccgcattctgtgcttatttaaaacaaggaaacttctaaccatttcttttgtgtattcatgtttaaagaaaaaaagtgatttaaaaatgatcttacctgtaccagaaaagcaaagttaaaggaaacaaaatttgtaccattgtcccaagaggtattttactgtatatattgtggtagcatgttcaaaatccaacaagtaatgtgaattttagatgtaaatatctgccacttgattttttttccccctttccccacttccttgactgctgtgatgtgaattaaagataaatacgtgatactgatccactgaa

SEQ ID NO: 458705 - DNA, 8063 bp, Homo sapiens
gacctgcgaaggcagctactgtctggtcacctgactcaggatcaggtgcgggaggttaagcggcacatcaccgtgcgcctggactggggtaatgaacatttgggcctggacctggtgcctcggaaggactttgaagtagtggactcggaccagattagtgtctcagatctctataagatgcatttatctagccggcagagtgtacagcaaagcacatcccaggtagatacaatgcgcccacgtcatggggaaacatgtcggatgccagtgccacatcacttcttcctcagcctgaagagtttcacttacaatactattggggaagataccgatgtcttcttttccttatatgacatgagggaaggcaagcagatcagtgagcggtttctggtaagactgaacaagaatggtgggccgaggaacccagagaagatagaacgaatgtgtgccctttttacagatctgagcagcaaagatatgaagagagatttgtatatcgttgcccatgtgatccgaataggccggatgctcctgaacgactcaaagaaaggtcctcctcacctgcactacaggcgaccatatggctgtgcggtcctaagcatcttggatgtcctacagtcactcacagaagtaaaggaagaaaaggattttgttcttaaggtttacacgtgcaacaacgagagtgagtggtcccagatccacgagaacatcatccgaaagtccagtgccaagtactctgcccccagcgccagccatggtcttatcatttctctgcagcttcttcgtggagacatggaacagattcggagagaaaatcccatgatatttaataggggattggcaattacaagaaaattgggatttcctgatgtcattatgccaggtgatatccgcaatgacctgtacctaaccctggagaagggggatttcgagagaggaggaaagagtgtacaaaagaatattgaagtgaccatgtatgtgctttatgcagatggagaaatcttgaaggattgcatcagcttgggttcaggagagccaaataggagttcctaccactcctttgtcctctaccacagtaatagtcctcgctggggagaaattatcaaattgcctatccccattgaccggttccggggctcccacctgcgctttgagttcagacattgttccacaaaggacaaaggggaaaagaaactctttggctttgcattctcaaccctgatgcgtgatgatggcaccaccctctcagatgatattcacgagctttatgtgtacaagtgtgatgagaatagcacgtttaataaccatgctctgtacctgggcctgccctgctgcaaagaggactacaatggctgccctaatattccttctagcctcatcttccagcgcagcaccaaagagtctttcttcatctccactcagctctcctctaccaaactcacccagaatgtggacctcctagctctgctgaagtggaaagccttccccgaccggatcatggatgtactagggcggctgcggcatgtcagtggggaggaaattgttaagtttctgcaggacatcttagatacactctttgtgattttggatgataatacagagaagtacggcctgttggtttttcagtctctggtgttcatcatcaacctgctccgagacatcaagtattttcactttcgacctgtgatggacacgtatatccagaagcactttgctggagctctggcatacaaggagctcatccgctgtttgaagtggtatatggactgctcagcagaactgattcgacaggaccacattcaagaagctatgcgggccttggagtaccttttcaagttcattgtacagtcacggatcctgtactcacgagccacttgtggaatggaagaggaacaattcagatccagtatccaagaacttttccagtccatccggtttgtgctcagtctggacagccgaaactcagaaacactcctttttactcaggctgcactcctcaattctttcccaaccatctttgatgagcttctgcaaatgttcaccgtgcaagaggtggcagagtttgtgagagggacactggggagcatgcccagcactgtgcacattgggcagtcaatggacgtggtcaagctgcagtccattgccaggacagtggatagccgcctgttttctttctcagaatcccgccgcatcctgcttcctgtggttctccatcacattcaccttcacctgaggcagcagaaagagctgctaatttgctcagggattcttggcagcatcttctccatcgtcaagaccagctctctggaggcagatgtcatggaggaagtagagatgatggtggagagcctcctggacgtgctcttgcagactctgctcaccatcatgagcaaatcgcacgctcaggaggcggtaagagggcagcggtgcccgcagtgcacagccgagatcactggcgagtatgtgtcctgccttctctcactgctccgccagatgtgtgacacccatttccagcacctcctggacaacttccagagcaaagatgaactcaaggaatttctgctgaagattttttgcgtgttccggaacctgatgaagatgagtgtcttccctcgggactggatggtaatgagactgctcacaagcaatattatagtcactactgtccagtacctgtcctctgcactgcacaagaatttcacagagactgactttgactttaaggtgtggaattcttactttagcctggcagttctattcataaatcagccaagccttcagctagaaattatcacctcagccaaaaggaagaagattctagataagtatggggacatgcgtgtaatgatggcctatgaactgttcagcatgtggcagaatttgggtgaacataagatccactttattccgggaatgattggtccttttctgggtgtgacactggtcccacagccagaagtacggaatatcatgattcccatctttcatgacatgatggactgggagcagagaaaaaatggcaacttcaaacaggtggaggccgagttgattgacaagctggacagcatggtgtcagaagggaaaggtgacgagagctacagggagctcttcagcctactaacccagctgtttgggccctaccccagcctgctggagaaggttgaacaagaaacatggcgcgagaccggcatttcctttgtgacctcagtcacccgcctcatggaacgtcttcttgactacagggactgcatgaaaggagaggaaacagagaataagaagataggctgcactgttaacctgatgaatttttacaaatctgagattaacaaggaagaaatgtatatccgctacatccataagctttgtgacatgcacttgcaggccgaaaactacacagaggccgcatttaccctgctcctttactgtgagctgctgcagtgggaggaccggccactacgggaattcctccactacccatcgcagacagagtggcagcggaaggagggactgtgccggaagatcattcactacttcaacaaaggcaagagctgggagtttgggatcccactgtgcagggagctggcgtgtcagtacgagagcctctatgattaccagagcctcagctggattcggaaaatggaggccagctactatgacaacattatggagcagcaacgcctggagcctgagttctttcgggtcggcttctatggcaggaagtttcctttctttcttcggaacaaagaatacgtgtgccgtggccatgactacgagaggctggaggccttccagcagaggatgctcagtgagtttccgcaggctgtcgccatgcagcaccccaaccatcctgatgacgccatcctacagtgcgatgcccagtacttgcagatctatgcagtgacgcccattccagattatgtggatgttctgcagatggatagggtaccagatcgagtcaagagcttctatcgcgtcaacaatgtgaggaagttccggtatgacaggccttttcacaaaggccccaaggacaaggagaatgaattcaagagcctgtggattgaacgtaccacactgaccctgacccacagcttgcctggcatctctcggtggtttgaagtggagaggagggaactggtggaggtgagccctctggagaatgccatccaagtggttgagaataagaaccaggagctacgctccctgatcagccagtatcaacacaagcaggtgcatggcaacattaacctgctaagcatgtgcctgaatggtgtcattgatgcagctgtcaatggaggcattgcacgctatcaggaggccttctttgataaagattacatcaacaagcacccaggagatgctgagaagatcacccagctcaaggagcttatgcaggagcaggttcatgtccttggagttgggctagcagttcatgagaagtttgtgcacccagaaatgcggcctctgcataagaagctaattgatcagttccagatgatgcgggccagtctctaccatgagtttccaggtttggataagctaagtcctgcatgttcaggcaccagcaccccacggggaaatgttctggcatcccatagccccatgagtccggagagcatcaagatgacccaccggcacagccccatgaacttgatgggcacaggccgccattcatcatcctctctctcctcacatgcgtctagtgaagcaggaaacatggtgatgctgggtgacggctccatgggtgatgctcctgaggacctgtaccaccacatgcagctcgcgtatcccaaccccaggtaccaaggctcagtcaccaacgtctctgttctgtcctcgtcccaggcaagcccttcttcctccagcctgagttccactcactcagcaccatcccagatgattacctctgccccttccagtgcccgaggctctccctctctgccagataagtaccgccatgcccgtgaaatgatgttgttgctgcccacataccgggaccgcccaagcagtgccatgtatccagcagccatcctggagaacggacagccgccgaatttccagcgagccctgttccagcaagtggtcggagcctgcaaaccctgcagtgatcccaatctgtctgtggctgaaaaaggtcattactccctacactttgacgccttccaccaccctctgggtgatacccccccagccctccctgcccggaccctgcgcaagtctcctctccaccctatcccagcctcccccacaagcccccagtcaggtctggacggcagcaactctacgctgtccggcagtgccagcagcggcgtgtcctccttgagtgagagtaactttgggcactcctcggaggccccacctcgcactgacaccatggactccatgccaagtcaggcctggaatgctgacgaagatcttgagccaccctacctccctgtccactacagcctctctgagtctgccgtcctggactccatcaaggcccagccatgccgaagccactcagccccagggtgcgtcatccctcaggaccccatggacccgcctgcgctgccgcccaagccctaccacccccgcctgccggccctggagcacgatgagggggtgctgctgcgtgaagagactgagaggcctcgaggcctgcaccgcaaggctccattgcctcctgggagcgctaaggaggagcaggcccgcatggcctgggagcacggccgaggggagcagtgaggggcaacgaggcggctgggatgccgccctcagtaagcagcttgccaatcactccaggtctgaaaagcaagtcccccagccccaccccagggagccagagaggcttgcactcaggagagaaccacccccaagtctccgttctactgccgtgaactcatgtgttgccatgtacagaggccacagcagcatgaagggttgtggcttccctttttatttttttacatttccatttctatgggttttcctttctttcctttatgcagtagatgctttcttcctcctgcagttctggaccatgtggagctacatggagaaattgcacagacagaatcactttgccacactgcagggcccaggagtgggagcccaggccctccctccagggtagagatgcaccgaatggaaattgcactaaggacctcttcctttgctgtatggacagaagagttcatggttgcattcagggattgcaaggaccatatagacatgtcacaggtggaaaaagggccacaagccgttttgcacaaatgcctgcccacctgcccctcttccatccaggagtgtgctactgaggggctggctggaccaacctgctggctcaggcatgtgactggcctaactgcatgcccagggcactgccagggttcaatgggccagccgtctcctactccaccttggatttttctctccatcacatcatttctgaccatttgctcccttccattcttgaaacacctcatgccccacaggagccccagtggtgactggatctgcaagggttatctcccgccctctggggtttgagtggaggtatggagccagagaggctatcctagctaccttcctcctagggggagctggtccccttcctatgtggtagagagactggtgtaagagtgtggggtgtggcaggcgccggaaatcctcaaagctttcagaagcatccagaatgcctaccatcagctcctgaatcagggattttcagcactacctctgagccatggggttggctgcccagccaggcttccaggccctgaggacatgtggtcaggttcagcaggctcctgggtaaagagggtgggagggggcttctccttttggaagcagatagccatgcaggtagaattgtcatctcccaagtggccacatacagcaacccactccaggccatggggaccaccactcagggttcggggctggcaggagggtagtttctccagtctccccagtctgttggtgtctttataggaaactataaagcagagcagtggtgtctttagaggaaactcattcaagtcagggcactgattttcctctcagtttattatttggggggatagggtcaggtgggtatagtagtactttaccagggtgcttttaagttactttaaaaaaagcctacaaaatattttttttcttttatttgctcgagttcacattaatgatggtcacaaggctgccttgttgggcaggcgtattgcccccagttcctcttctgctggcctgtatgacctccacagccaggccctgggcccaagccccttgtcccttctccactgcccctctttccagacagtaaaggccatggtcagtgtgtttttctcttgtaaacaaaccccagcttgtttaacagaaatgctaataacctactgggaaagatggaggtctaaattacctccagggtttttctgggggtttatcaccagtgtgggtcccttctgataccaccaggttcactccaggcagagtggggcggaaggctgctgaggatatgggtcagttacagcagccctcacctcaaagggctggcctgcttctcagcctacattcatttgcaagcttcaatctctggaccatctggtgttcacaggtgttagagggttaggggttaggggctagttttggatttgattcataggtaggagggcttagattttaaggcacttctgaaagtcaatccctggacaaggcagtcatcacataagaacagctaccttctccacttggtggcacaagaggtagggaggggagtatgggttcatttggcttcgcattatgcaaggtgaaaccgtttgttttccctctccattttccctaactaaatgaaaaggacacattctgaaatcccttttgttggagaataagtcagtctgaggggaaatgggaggccagagatgagaaccctttgaaaagattgtaaaatactgattttcattctttcaagcttatttgtaaatacctatttgaatgctgtgtatttgtacaggaatttgagcaaaaaatgtatagagtgtgatgtccaattggtattcagcactataaatgtgtttttaacctcc

SEQ ID NO: 458706 - DNA, 7497 bp, Homo sapiens
cggtgacggggtagaaccaggtctgtggaactccctaagtgtcaaatggaattttcaagagatgaccctaatctttttccaattgttttatcaaggtgtctgtactaggataaggaattcctagtctctgttcctaaactttgttccaaatggttacgtggttgcagttctccgggaattgacctttagaaggaagacactaaaacatcagaatgtgcaacaacgagagtgagtggtcccagatccacgagaacatcatccgaaagtccagtgccaagtactctgcccccagcgccagccatggtcttatcatttctctgcagcttcttcgtggagacatggaacagattcggagagaaaatcccatgatatttaataggggattggcaattacaagaaaattgggatttcctgatgtcattatgccaggtgatatccgcaatgacctgtacctaaccctggagaagggggatttcgagagaggaggaaagagtgtacaaaagaatattgaagtgaccatgtatgtgctttatgcagatggagaaatcttgaaggattgcatcagcttgggttcaggagagccaaataggagttcctaccactcctttgtcctctaccacagtaatagtcctcgctggggagaaattatcaaattgcctatccccattgaccggttccggggctcccacctgcgctttgagttcagacattgttccacaaaggacaaaggggaaaagaaactctttggctttgcattctcaaccctgatgcgtgatgatggcaccaccctctcagatgatattcacgagctttatgtgtacaagtgtgatgagaatagcacgtttaataaccatgctctgtacctgggcctgccctgctgcaaagaggactacaatggctgccctaatattccttctagcctcatcttccagcgcagcaccaaagagtctttcttcatctccactcagctctcctctaccaaactcacccagaatgtggacctcctagctctgctgaagtggaaagccttccccgaccggatcatggatgtactagggcggctgcggcatgtcagtggggaggaaattgttaagtttctgcaggacatcttagatacactctttgtgattttggatgataatacagagaagtacggcctgttggtttttcagtctctggtgttcatcatcaacctgctccgagacatcaagtattttcactttcgacctgtgatggacacgtatatccagaagcactttgctggagctctggcatacaaggagctcatccgctgtttgaagtggtatatggactgctcagcagaactgattcgacaggaccacattcaagaagctatgcgggccttggagtaccttttcaagttcattgtacagtcacggatcctgtactcacgagccacttgtggaatggaagaggaacaattcagatccagtatccaagaacttttccagtccatccggtttgtgctcagtctggacagccgaaactcagaaacactcctttttactcaggctgcactcctcaattctttcccaaccatctttgatgagcttctgcaaatgttcaccgtgcaagaggtggcagagtttgtgagagggacactggggagcatgcccagcactgtgcacattgggcagtcaatggacgtggtcaagctgcagtccattgccaggacagtggatagccgcctgttttctttctcagggcgagtatgtgtcctgccttctctcactgctccgccagatgtgtgacacccatttccagcacctcctggacaacttccagagcaaagatgaactcaaggaatttctgctgaagattttttgcgtgttccggaacctgatgaagatgagtgtcttccctcgggactggatggtaatgagactgctcacaagcaatattatagtcactactgtccagtacctgtcctctgcactgcacaagaatttcacagagactgactttgactttaaggtgtggaattcttactttagcctggcagttctattcataaatcagccaagccttcagctagaaattatcacctcagccaaaaggaagaagattctagataagtatggggacatgcgtgtaatgatggcctatgaactgttcagcatgtggcagaatttgggtgaacataagatccactttattccgggaatgattggtccttttctgggtgtgacactggtcccacagccagaagtacggaatatcatgattcccatctttcatgacatgatggactgggagcagagaaaaaatggcaacttcaaacaggtggaggccgagttgattgacaagctggacagcatggtgtcagaagggaaaggtgacgagagctacagggagctcttcagcctactaacccagctgtttgggccctaccccagcctgctggagaaggttgaacaagaaacatggcgcgagaccggcatttcctttgtgacctcagtcacccgcctcatggaacgtcttcttgactacagggactgcatgaaaggagaggaaacagagaataagaagataggctgcactgttaacctgatgaatttttacaaatctgagattaacaaggaagaaatgtatatccgctacatccataagctttgtgacatgcacttgcaggccgaaaactacacagaggccgcatttaccctgctcctttactgtgagctgctgcagtgggaggaccggccactacgggaattcctccactacccatcgcagacagagtggcagcggaaggagggactgtgccggaagatcattcactacttcaacaaaggcaagagctgggagtttgggatcccactgtgcagggagctggcgtgtcagtacgagagcctctatgattaccagagcctcagctggattcggaaaatggaggccagctactatgacaacattatggagcagcaacgcctggagcctgagttctttcgggtcggcttctatggcaggaagtttcctttctttcttcggaacaaagaatacgtgtgccgtggccatgactacgagaggctggaggccttccagcagaggatgctcagtgagtttccgcaggctgtcgccatgcagcaccccaaccatcctgatgacgccatcctacagtgcgatgcccagtacttgcagatctatgcagtgacgcccattccagattatgtggatgttctgcagatggatagggtaccagatcgagtcaagagcttctatcgcgtcaacaatgtgaggaagttccggtatgacaggccttttcacaaaggccccaaggacaaggagaatgaattcaagagcctgtggattgaacgtaccacactgaccctgacccacagcttgcctggcatctctcggtggtttgaagtggagaggagggaactggtggaggtgagccctctggagaatgccatccaagtggttgagaataagaaccaggagctacgctccctgatcagccagtatcaacacaagcaggtgcatggcaacattaacctgctaagcatgtgcctgaatggtgtcattgatgcagctgtcaatggaggcattgcacgctatcaggaggccttctttgataaagattacatcaacaagcacccaggagatgctgagaagatcacccagctcaaggagcttatgcaggagcaggttcatgtccttggagttgggctagcagttcatgagaagtttgtgcacccagaaatgcggcctctgcataagaagctaattgatcagttccagatgatgcgggccagtctctaccatgagtttccaggtttggataagctaagtcctgcatgttcaggcaccagcaccccacggggaaatgttctggcatcccatagccccatgagtccggagagcatcaagatgacccaccggcacagtgaagcaggaaacatggtgatgctgggtgacggctccatgggtgatgctcctgaggacctgtaccaccacatgcagctcgcgtatcccaaccccaggtaccaaggctcagtcaccaacgtctctgttctgtcctcgtcccaggcaagcccttcttcctccagcctgagttccactcactcagcaccatcccagatgattacctctgccccttccagtgcccgaggctctccctctctgccagataagtaccgccatgcccgtgaaatgatgttgttgctgcccacataccgggaccgcccaagcagtgccatgtatccagcagccatcctggagaacggacagccgccgaatttccagcgagccctgttccagcaagtggtcggagcctgcaaaccctgcagtgatcccaatctgtctgtggctgaaaaagtctcctctccaccctatcccagcctcccccacaagcccccagtcaggtctggacggcagcaactctacgctgtccggcagtgccagcagcggcgtgtcctccttgagtgagagtaactttgggcactcctcggaggccccacctcgcactgacaccatggactccatgccaagtcaggcctggaatgctgacgaagatcttgagccaccctacctccctgtccactacagcctctctgagtctgccgtcctggactccatcaaggcccagccatgccgaagccactcagccccagggtgcgtcatccctcaggaccccatggacccgcctgcgctgccgcccaagccctaccacccccgcctgccggccctggagcacgatgagggggtgctgctgcgtgaagagactgagaggcctcgaggcctgcaccgcaaggctccattgcctcctgggagcgctaaggaggagcaggcccgcatggcctgggagcacggccgaggggagcagtgaggggcaacgaggcggctgggatgccgccctcagtaagcagcttgccaatcactccaggtctgaaaagcaagtcccccagccccaccccagggagccagagaggcttgcactcaggagagaaccacccccaagtctccgttctactgccgtgaactcatgtgttgccatgtacagaggccacagcagcatgaagggttgtggcttccctttttatttttttacatttccatttctatgggttttcctttctttcctttatgcagtagatgctttcttcctcctgcagttctggaccatgtggagctacatggagaaattgcacagacagaatcactttgccacactgcagggcccaggagtgggagcccaggccctccctccagggtagagatgcaccgaatggaaattgcactaaggacctcttcctttgctgtatggacagaagagttcatggttgcattcagggattgcaaggaccatatagacatgtcacaggtggaaaaagggccacaagccgttttgcacaaatgcctgcccacctgcccctcttccatccaggagtgtgctactgaggggctggctggaccaacctgctggctcaggcatgtgactggcctaactgcatgcccagggcactgccagggttcaatgggccagccgtctcctactccaccttggatttttctctccatcacatcatttctgaccatttgctcccttccattcttgaaacacctcatgccccacaggagccccagtggtgactggatctgcaagggttatctcccgccctctggggtttgagtggaggtatggagccagagaggctatcctagctaccttcctcctagggggagctggtccccttcctatgtggtagagagactggtgtaagagtgtggggtgtggcaggcgccggaaatcctcaaagctttcagaagcatccagaatgcctaccatcagctcctgaatcagggattttcagcactacctctgagccatggggttggctgcccagccaggcttccaggccctgaggacatgtggtcaggttcagcaggctcctgggtaaagagggtgggagggggcttctccttttggaagcagatagccatgcaggtagaattgtcatctcccaagtggccacatacagcaacccactccaggccatggggaccaccactcagggttcggggctggcaggagggtagtttctccagtctccccagtctgttggtgtctttataggaaactataaagcagagcagtggtgtctttagaggaaactcattcaagtcagggcactgattttcctctcagtttattatttggggggatagggtcaggtgggtatagtagtactttaccagggtgcttttaagttactttaaaaaaagcctacaaaatattttttttcttttatttgctcgagttcacattaatgatggtcacaaggctgccttgttgggcaggcgtattgcccccagttcctcttctgctggcctgtatgacctccacagccaggccctgggcccaagccccttgtcccttctccactgcccctctttccagacagtaaaggccatggtcagtgtgtttttctcttgtaaacaaaccccagcttgtttaacagaaatgctaataacctactgggaaagatggaggtctaaattacctccagggtttttctgggggtttatcaccagtgtgggtcccttctgataccaccaggttcactccaggcagagtggggcggaaggctgctgaggatatgggtcagttacagcagccctcacctcaaagggctggcctgcttctcagcctacattcatttgcaagcttcaatctctggaccatctggtgttcacaggtgttagagggttaggggttaggggctagttttggatttgattcataggtaggagggcttagattttaaggcacttctgaaagtcaatccctggacaaggcagtcatcacataagaacagctaccttctccacttggtggcacaagaggtagggaggggagtatgggttcatttggcttcgcattatgcaaggtgaaaccgtttgttttccctctccattttccctaactaaatgaaaaggacacattctgaaatcccttttgttggagaataagtcagtctgaggggaaatgggaggccagagatgagaaccctttgaaaagattgtaaaatactgattttcattctttcaagcttatttgtaaatacctatttgaatgctgtgtatttgtacaggaatttgagcaaaaaatgtatagagtgtgatgtccaattggtattcagcactataaatgtgtttttaacctcccgcattctgtgcttatttaaaacaaggaaacttctaaccatttcttttgtgtattcatgtttaaagaaaaaaagtgatttaaaaatgatcttacctgtaccagaaaagcaaagttaaaggaaacaaaatttgtaccattgtcccaagaggtattttactgtatatattgtggtagcatgttcaaaatccaacaagtaatgtgaattttagatgtaaatatctgccacttgattttttttccccctttccccacttccttgactgctgtgatgtgaattaaagataaatacgtgatactgatccactgaa

SEQ ID NO: 458707 - DNA, 337 bp, Homo sapiens
tacccagggctcccatagacctgccagtggttccacccacagcaggtgttccttctggctggtgctttctccttctggtgctgtctgcctccagggcctgccctccccctcctgcccagcacacccacggctatggccagctgcccagagcttggctatggcttccacaggtagttgacaggtgtttccttctctttattgtagaatttttacaaatctgagattaacaaggaagaaatgtatatccgctacatccataagctttgtgacatgcacttgcaggccgaaaactacacaggtaagtggggagaagagagagccatgcctgaccatgagg

SEQ ID NO: 458708 - DNA, 651 bp, Homo sapiens
gcgctgggaagagtaggttcagagtgcattccggaacccggggcgcggcgcactgcgcaggcggccggactccgctcagtttccggtgcggcgaacaccaaagtccgggaacttaagcattttcggtttctagggttgttacgaagctgcaggagcgagatggaggtggacgcaccgggtgttgatggtcgagatggtctccgggagcggcgaggctttagcgagggagggaggcagaacttcgatgtgaggcctcagtctggggcaaatgggcttcccaaacactcctactggttggacctctggcttttcatccttttcgatgtggtggtgtttctctttgtgtattttttgccatgacttgttcgctgatatctaaattaagaagttggttcttgagtgaattctgaaaatggctacaaacttcttgaataaagaagacaggactctcaatagaagaatttcacatctccaagggacccttcctttcattttacactttgttactaatttgcagaactctattaattgggtaggatttcacccattcctagctaagttcttaaaattaaaccctttggttcgtgtttaaaaactttcaaacatctgatggctttacaggggctgaatataaaagcatttgtacttaaa

SEQ ID NO: 458709 - DNA, 504 bp, Homo sapiens
aaatggagtctcactctgttgtccaaggtggaggttgcagtgagccaagatggggccactgcactctaacgtgggcaacagagaccctgtctcaaaaagaaaatattcctgttagccctaaaggctttacatgaggaatggtagaagtggtcttttgtttaaattagttgcattcagcatatatgaattgtcttaaatattttggggatactcccccgccttttaaacagggcataagatctggtaaactctctgtatatcttcctacctttcaaaatcgttcttagggttagtcaagtctggaatataattgctgactataaagttagcaattatgcttttaaggtgttgtcacatcaacctaaagagaaccatctatggaaggtatggttgaaacatctgtaggaacacagaactgggatttcactgagtttaccaaatcaactgtgtgaactgtttctgcactgcttgctaatggtttcatctaataaatgtttacttata

SEQ ID NO: 458710 - DNA, 797 bp, Homo sapiens
gcgctgggaagagtaggttcagagtgcattccggaacccggggcgcggcgcactgcgcaggcggccggactccgctcagtttccggtgcggcgaacaccaaagtccgggaacttaagcattttcggtttctagggttgttacgaagctgcaggagcgagatggaggtggacgcaccgggtgttgatggtcgagatggtctccgggagcggcgaggctttagcgagggagggaggcagaacttcgatgtgaggcctcagtctggggcaaatgggcttcccaaacactcctactggttggacctctggcttttcatccttttcgatgtggtggtgtttctctttgtgtattttttgccatgacttgttcgctgatatctaaattaagaagttggttcttgagtgaattctgaaaatggctacaaacttcttgaataaagaagacaggactctcaatagaagaatttcacatctccaagggacccttcctttcattttacactttgttactaatttgcagaactctattaattgggtaggatttcacccattcctagctaagttcttaaaattaaaccctttggttcgtgtttaaaaactttcaaacatctgatggctttacaggggctgaatataaaagcatttgtacttaaaaaaaaaaaaaacgcactttatgaatcttaatataagactttattcaaaacagtggggggccgccggcccccctctttttttcctgagaaatttttcattcgcccccatttgggcccttctggccaattccgccttgggggggtttt

SEQ ID NO: 458711 - DNA, 2032 bp, Homo sapiens
gcgctgggaagagtaggttcagagtgcattccggaacccggggcgcggcgcactgcgcaggcggccggactccgctcagtttccggtgcggcgaacaccaaagtccgggaacttaagcattttcggtttctagggttgttacgaagctgcaggagcgagatggaggtggacgcaccgggtgttgatggtcgagatggtctccgggagcggcgaggctttagcgagggagggaggcagaacttcgatgtgaggcctcagtctggggcaaatgggcttcccaaacactcctactggttggacctctggcttttcatccttttcgatgtggtggtgtttctctttgtgtattttttgccatgacttgttcgctgatatctaaattaagaagttggttcttgagtgaattctgaaaatggctacaaacttcttgaataaagaagacaggactctcaatagaagaatttcacatctccaagggacccttcctttcattttacactttgttactaatttgcagaactctattaattgggtaggatttcacccattcctagctaagttcttaaaattaaaccctttggttcgtgtttaaaaactttcaaacatctgatggctttacaggggctgaatataaaagcatttgtacttaaaggtcttgtgtattcattaagaaatatagtaatgtcttttaatgttttaagagttgatcagggtttactatgatgcaagtaataggatgattaataagggaaggtttttatgaattcaaaagtcaattattcaaaagcagggaaagattttgagagagggaacaaagtattcttagattgcgtagaagctgctaggttccagttttaatttttaggtttagttggactctgttatgaaaagataggttatgggtgggcgacaggttgatacagtcttagagggtatcttcccccttttttccttttaaactcttgagcctcctataacgaaggattatgtgtttcaaacctattttttttttactgtttcattaagtgtgcttgtgcccaaaatatttacttgtataatatctgtaacttgcttaaatacttcagcaaagtcagcatatttactcattcaacaaatatttgagccaggcattattttagacacagcagtgaacaaaacaaaaaggcattcttgccttcatggagcttacattcttattgttatttaaatctaaatgttataaaacaagaatttatattctagggttgatcagctagtatttaatcaaaaaggccacactcccatagcagctactctaagctgtagtagctaataaaaaatattaatgttggccgggcacagtggctcacgcctataatcccagcactttgggaggccaagggtggtagatcacttgaggtcaagagttgtgacaccagcctggccaacctggtgaaaccctatctctattaaaaaatacaaaaaaatacaaaaaaattagctgggcatgttggcatgcacctgtagtcccagctatttgggaggctgaggcacgagaattgcttgaatccgggaggtggaggttgcagtgagccaagatggggccactgcactctaacgtgggcaacagagaccctgtctcaaaaagaaaatattcctgttagccctaaaggctttacatgaggaatggtagaagtggtcttttgtttaaattagttgcattcagcatatatgaattgtcttaaatattttggggatactcccccgccttttaaacagggcataagatctggtaaactctctgtatatcttcctacctttcaaaatcgttcttagggttagtcaagtctggaatataattgctgactataaagttagcaattatgcttttaaggtgttgtcacatcaacctaaagagaaccatctatggaaggtatggttgaaacatctgtaggaacacagaactgggatttcactgagtttaccaaatcaactgtgtgaactgtttctgcactgcttgctaatggtttcatctaataaatgtttacttata

SEQ ID NO: 458712 - DNA, 2030 bp, Homo sapiens
gcgctgggaagagtaggttcagagtgcattccggaacccggggcgcggcgcactgcgcaggcggccggactccgctcagtttccggtgcggcgaacaccaaagtccgggaacttaagcattttcggtttctagggttgttacgaagctgcaggagcgagatggaggtggacgcaccgggtgttgatggtcgagatggtctccgggagcggcgaggctttagcgagggagggaggcagaacttcgatgtgaggcctcagtctggggcaaatgggcttcccaaacactcctactggttggacctctggcttttcatccttttcgatgtggtggtgtttctctttgtgtattttttgccatgacttgttcgctgatatctaaattaagaagttggttcttgagtgaattctgaaaatggctacaaacttcttgaataaagaagacaggactctcaatagaagaatttcacatctccaagggacccttcctttcattttacactttgttactaatttgcagaactctattaattgggtaggatttcacccattcctagctaagttcttaaaattaaaccctttggttcgtgtttaaaaactttcaaacatctgatggctttacaggggctgaatataaaagcatttgtacttaaaggtcttgtgtattcattaagaaatatagtaatgtcttttaatgttttaagagttgatcagggtttactatgatgcaagtaataggatgattaataagggaaggtttttatgaattcaaaagtcaattattcaaaagcagggaaagattttgagagagggaacaaagtattcttagattgcgtagaagctgctaggttccagttttaatttttaggtttagttggactctgttatgaaaagataggttatgggtgggcgacaggttgatacagtcttagaaaaagcaggtaatatcaaagtattggaaagctagcatgcatgccctcttacctgggtatcttcccccttttttccttttaaactcttgagcctcctataacgaaggattatgtgtttcaaacctattttttttttactgtttcattaagtgtgcttgtgcccaaaatatttacttgtataatatctgtaacttgcttaaatacttcaacacagcagtgaacaaaacaaaaaggcattcttgccttcatggagcttacattcttattgttatttaaatctaaatgttataaaacaagaatttatattctagggttgatcagctagtatttaatcaaaaaggccacactcccatagcagctactctaagctgtagtagctaataaaaaatattaatgttggccgggcacagtggctcacgcctataatcccagcactttgggaggccaagggtggtagatcacttgaggtcaagagttgtgacaccagcctggccaacctggtgaaaccctatctctattaaaaaatacaaaaaaatacaaaaaaattagctgggcatgttggcatgcacctgtagtcccagctatttgggaggctgaggcacgagaattgcttgaatccgggaggtggaggttgcagtgagccaagatggggccactgcactctaacgtgggcaacagagaccctgtctcaaaaagaaaatattcctgttagccctaaaggctttacatgaggaatggtagaagtggtcttttgtttaaattagttgcattcagcatatatgaattgtcttaaatattttggggatactcccccgccttttaaacagggcataagatctggtaaactctctgtatatcttcctacctttcaaaatcgttcttagggttagtcaagtctggaatataattgctgactataaagttagcaattatgcttttaaggtgttgtcacatcaacctaaagagaaccatctatggaaggtatggttgaaacatctgtaggaacacagaactgggatttcactgagtttaccaaatcaactgtgtgaactgtttctgcactgcttgctaatggtttcatctaataaatgtttacttata

SEQ ID NO: 458713 - DNA, 2032 bp, Homo sapiens
gcgctgggaagagtaggttcagagtgcattccggaacccggggcgcggcgcactgcgcaggcggccggactccgctcagtttccggtgcggcgaacaccaaagtccgggaacttaagcattttcggtttctagggttgttacgaagctgcaggagcgagatggaggtggacgcaccgggtgttgatggtcgagatggtctccgggagcggcgaggctttagcgagggagggaggcagaacttcgatgtgaggcctcagtctggggcaaatgggcttcccaaacactcctactggttggacctctggcttttcatccttttcgatgtggtggtgtttctctttgtgtattttttgccatgacttgttcgctgatatctaaattaagaagttggttcttgagtgaattctgaaaatggctacaaacttcttgaataaagaagacaggactctcaatagaagaatttcacatctccaagggacccttcctttcattttacactttgttactaatttgcagaactctattaattgggtaggatttcacccattcctagctaagttcttaaaattaaaccctttggttcgtgtttaaaaactttcaaacatctgatggctttacaggggctgaatataaaagcatttgtacttaaaggtcttgtgtattcattaagaaatatagtaatgtcttttaatgttttaagagttgatcagggtttactatgatgcaagtaataggatgattaataagggaaggtttttatgaattcaaaagtcaattattcaaaagcagggaaagattttgagagagggaacaaagtattcttagattgcgtagaagctgctaggttccagttttaatttttaggtttagttggactctgttatgaaaagataggttatgggtgggcgacaggttgatacagtcttagaaaaagcaggtaatatcaaagtattggaaagctagcatgcatgccctcttacctgggtatcttcccccttttttccttttaaactcttgagcctcctataacgaaggattatgtgtttcaaacctattttttttttactgtttcattaagtgtgcttgtgcccaaaatatttacttgtataatatctgtaacttgcttaaatacttcagcaaagtcagcatatttactcattcaacaaatatttgagccaggcattattttagacacagcagtgaacaaaacaaaaaggcattcttgccttcatggagcttacattcttattgttatttaaatctaaatgttataaaacaagaatttatattctagggttgatcagctagtatttaatcaaaaaggccacactcccatagcagctactctaagctgtagtagctaataaaaaatattaatgttggccgggcacagtggctcacgcctataatcccagcactttgggaggccaagggtggtagatcacttgaggtcaagagttgtgacaccagcctggccaacctggtgaaaccctatctctattaaaaaatacaaaaaaatacaaaaaaattagctgggcatgttggcatgcacctgtagtcccagctatttgggaggctgaggcacgagaattgcttgaatccgggaggtggaggttgcagtgagccaagatggggccactgcactctaacgtgggcaacagagaccctgtctcaaaaagaaaatattcctgttagccctaaaggctttacatgaggaatggtagaagtggtcttttgtttaaattagttgcattcagcatatatgaattgtcttaaatattttggggatactcccccgccttttaaacagggcataagatctggtaaactctctgtatatcttcctacctttcaaaatcgttcttagggttaggtctacctgggccagggtagaccgtaacattggacttatggtcttagcactggacactggttttagggcttttcactagggcacattccgaagggtaccaacaatgttaatatacatcactctactctccactatatagatgctatgtctaagaaaaa

SEQ ID NO: 458714 - DNA, 2076 bp, Homo sapiens
gcgctgggaagagtaggttcagagtgcattccggaacccggggcgcggcgcactgcgcaggcggccggactccgctcagtttccggtgcggcgaacaccaaagtccgggaacttaagcattttcggtttctagggttgttacgaagctgcaggagcgagatggaggtggacgcaccgggtgttgatggtcgagatggtctccgggagcggcgaggctttagcgagggagggaggcagaacttcgatgtgaggcctcagtctggggcaaatgggcttcccaaacactcctactggttggacctctggcttttcatccttttcgatgtggtggtgtttctctttgtgtattttttgccatgacttgttcgctgatatctaaattaagaagttggttcttgagtgaattctgaaaatggctacaaacttcttgaataaagaagacaggactctcaatagaagaatttcacatctccaagggacccttcctttcattttacactttgttactaatttgcagaactctattaattgggtaggatttcacccattcctagctaagttcttaaaattaaaccctttggttcgtgtttaaaaactttcaaacatctgatggctttacaggggctgaatataaaagcatttgtacttaaaggtcttgtgtattcattaagaaatatagtaatgtcttttaatgttttaagagttgatcagggtttactatgatgcaagtaataggatgattaataagggaaggtttttatgaattcaaaagtcaattattcaaaagcagggaaagattttgagagagggaacaaagtattcttagattgcgtagaagctgctaggttccagttttaatttttaggtttagttggactctgttatgaaaagataggttatgggtgggcgacaggttgatacagtcttagaaaaagcaggtaatatcaaagtattggaaagctagcatgcatgccctcttacctgggtatcttcccccttttttccttttaaactcttgagcctcctataacgaaggattatgtgtttcaaacctattttttttttactgtttcattaagtgtgcttgtgcccaaaatatttacttgtataatatctgtaacttgcttaaatacttcagcaaagtcagcatatttactcattcaacaaatatttgagccaggcattattttagacacagcagtgaacaaaacaaaaaggcattcttgccttcatggagcttacattcttattgttatttaaatctaaatgttataaaacaagaatttatattctagggttgatcagctagtatttaatcaaaaaggccacactcccatagcagctactctaagctgtagtagctaataaaaaatattaatgttggccgggcacagtggctcacgcctataatcccagcactttgggaggccaagggtggtagatcacttgaggtcaagagttgtgacaccagcctggccaacctggtgaaaccctatctctattaaaaaatacaaaaaaatacaaaaaaattagctgggcatgttggcatgcacctgtagtcccagctatttgggaggctgaggcacgagaattgcttgaatccgggaggtggaggttgcagtgagccaagatggggccactgcactctaacgtgggcaacagagaccctgtctcaaaaagaaaatattcctgttagccctaaaggctttacatgaggaatggtagaagtggtcttttgtttaaattagttgcattcagcatatatgaattgtcttaaatattttggggatactcccccgccttttaaacagggcataagatctggtaaactctctgtatatcttcctacctttcaaaatcgttcttagggttaggtctaccccaggtagacctaacactgcattctcactataacatgccctataatggctgcatcccttttgagcacctccaaaatctacatttacacagtaggtaaattagggatgactgcattatcaaaatactctcagggttcctataaatggcagctctcctgttgtattcaggtgttgttacgactacatatgtgttgca

SEQ ID NO: 458715 - DNA, 2031 bp, Homo sapiens
gcgctgggaagagtaggttcagagtgcattccggaacccggggcgcggcgcactgcgcaggcggccggactccgctcagtttccggtgcggcgaacaccaaagtccgggaacttaagcattttcggtttctagggttgttacgaagctgcaggagcgagatggaggtggacgcaccgggtgttgatggtcgagatggtctccgggagcggcgaggctttagcgagggagggaggcagaacttcgatgtgaggcctcagtctggggcaaatgggcttcccaaacactcctactggttggacctctggcttttcatccttttcgatgtggtggtgtttctctttgtgtattttttgccatgacttgttcgctgatatctaaattaagaagttggttcttgagtgaattctgtcacatctccaagggacccttcctttcattttacactttgttactaatttgcagaactctattaattgggtaggatttcacccattcctagctaagttcttaaaattaaaccctttggttcgtgtttaaaaactttcaaacatctgatggctttacaggggctgaatataaaagcatttgtacttaaaggtcttgtgtattcattaagaaatatagtaatgtcttttaatgttttaagagttgatcagggtttactatgatgcaagtaataggatgattaataagggaaggtttttatgaattcaaaagtcaattattcaaaagcagggaaagattttgagagagggaacaaagtattcttagattgcgtagaagctgctaggttccagttttaatttttaggtttagttggactctgttatgaaaagataggttatgggtgggcgacaggttgatacagtcttagaaaaagcaggtaatatcaaagtattggaaagctagcatgcatgccctcttacctgggtatcttcccccttttttccttttaaactcttgagcctcctataacgaaggattatgtgtttcaaacctattttttttttactgtttcattaagtgtgcttgtgcccaaaatatttacttgtataatatctgtaacttgcttaaatacttcagcaaagtcagcatatttactcattcaacaaatatttgagccaggcattattttagacacagcagtgaacaaaacaaaaaggcattcttgccttcatggagcttacattcttattgttatttaaatctaaatgttataaaacaagaatttatattctagggttgatcagctagtatttaatcaaaaaggccacactcccatagcagctactctaagctgtagtagctaataaaaaatattaatgttggccgggcacagtggctcacgcctataatcccagcactttgggaggccaagggtggtagatcacttgaggtcaagagttgtgacaccagcctggccaacctggtgaaaccctatctctattaaaaaatacaaaaaaatacaaaaaaattagctgggcatgttggcatgcacctgtagtcccagctatttgggaggctgaggcacgagaattgcttgaatccgggaggtggaggttgcagtgagccaagatggggccactgcactctaacgtgggcaacagagaccctgtctcaaaaagaaaatattcctgttagccctaaaggctttacatgaggaatggtagaagtggtcttttgtttaaattagttgcattcagcatatatgaattgtcttaaatattttggggatactcccccgccttttaaacagggcataagatctggtaaactctctgtatatcttcctacctttcaaaatcgttcttagggttagtcaagtctggaatataattgctgactataaagttagcaattatgcttttaaggtgttgtcacatcaacctaaagagaaccatctatggaaggtatggttgaaacatctgtaggaacacagaactgggatttcactgagtttaccaaatcaactgtgtgaactgtttctgcactgcttgctaatggtttcatctaataaatgtttacttata

SEQ ID NO: 458716 - DNA, 1787 bp, Homo sapiens
caacactctctgtgacttgctttcatctttgatgtgtggttctcttgtgtattttgccatgacttgttcgctgatatctaaattaagaagttggttcttgagtgaattctgaaaatggctacaaacttcttgaataaagaagacaggactctcaatagaagaatttcacatctccaagggacccttcctttcattttacactttgttactaatttgcagaactctattaattgggtaggatttcacccattcctagctaagttcttaaaattaaaccctttggttcgtgtttaaaaactttcaaacatctgatggctttacaggggctgaatataaaagcatttgtacttaaaggtcttgtgtattcattaagaaatatagtaatgtcttttaatgttttaagagttgatcagggtttactatgatgcaagtaataggatgattaataagggaaggtttttatgaattcaaaagtcaattattcaaaagcagggaaagattttgagagagggaacaaagtattcttagattgcgtagaagctgctaggttccagttttaatttttaggtttagttggactctgttatgaaaagataggttatgggtgggcgacaggttgatacagtcttagaaaaagcaggtaatatcaaagtattggaaagctagcatgcatgccctcttacctgggtatcttcccccttttttccttttaaactcttgagcctcctataacgaaggattatgtgtttcaaacctattttttttttactgtttcattaagtgtgcttgtgcccaaaatatttacttgtataatatctgtaacttgcttaaatacttcagcaaagtcagcatatttactcattcaacaaatatttgagccaggcattattttagacacagcagtgaacaaaacaaaaaggcattcttgccttcatggagcttacattcttattgttatttaaatctaaatgttataaaacaagaatttatattctagggttgatcagctagtatttaatcaaaaaggccacactcccatagcagctactctaagctgtagtagctaataaaaaatattaatgttggccgggcacagtggctcacgcctataatcccagcactttgggaggccaagggtggtagatcacttgaggtcaagagttgtgacaccagcctggccaacctggtgaaaccctatctctattaaaaaatacaaaaaaatacaaaaaaattagctgggcatgttggcatgcacctgtagtcccagctatttgggaggctgaggcacgagaattgcttgaatccgggaggtggaggttgcagtgagccaagatggggccactgcactctaacgtgggcaacagagaccctgtctcaaaaagaaaatattcctgttagccctaaaggctttacatgaggaatggtagaagtggtcttttgtttaaattagttgcattcagcatatatgaattgtcttaaatattttggggatactcccccgccttttaaacagggcataagatctggtaaactctctgtatatcttcctacctttcaaaatcgttcttagggttagtcaagtctggaatataattgctgactataaagttagcaattatgcttttaaggtgttgtcacatcaacctaaagagaaccatctatggaaggtatggttgaaacatctgtaggaacacagaactgggatttcactgagtttaccaaatcaactgtgtgaactgtttctgcactgcttgctaatggtttcatctaataaatgtttacttata

SEQ ID NO: 458717 - DNA, 981 bp, Homo sapiens
gcgctgggaagagtaggttcagagtgcattccggaacccggggcgcggcgcactgcgcaggcggccggactccgctcagtttccggtgcggcgaacaccaaagtccgggaacttaagcattttcggtttctagggttgttacgaagctgcaggagcgagatggaggtggacgcaccgggtgttgatggtcgagatggtctccgggagcggcgaggctttagcgagggagggaggcagaacttcgatgtgaggcctcagtctggggcaaatgggcttcccaaacactcctactggttggacctctggcttttcatccttttcgatgtggtggtgtttctctttgtgtattttttgccatgacttgttcgctgatatctaaattaagaagttggttcttgagtgaattctgaaaatggctacaaacttcttgaataaagaagacaggactctcaatagaagaatttcacatctccaagggacccttcctttcattttacactttgttactaatttgcagtgagccaagatggggccactgcactctaacgtgggcaacagagaccctgtctcaaaaagaaaatattcctgttagccctaaaggctttacatgaggaatggtagaagtggtcttttgtttaaattagttgcattcagcatatatgaattgtcttaaatattttggggatactcccccgccttttaaacagggcataagatctggtaaactctctgtatatcttcctacctttcaaaatcgttcttagggttagtcaagtctggaatataattgctgactataaagttagcaattatgcttttaaggtgttgtcacatcaacctaaagagaaccatctatggaaggtatggttgaaacatctgtaggaacacagaactgggatttcactgagtttaccaaatcaactgtgtgaactgtttctgcactgcttgctaatggtttcatctaataaatgtttacttata

SEQ ID NO: 458718 - DNA, 2085 bp, Homo sapiens
gcgctgggaagagtaggttcagagtgcattccggaacccggggcgcggcgcactgcgcaggcggccggactccgctcagtttccggtgcggcgaacaccaaagtccgggaacttaagcattttcggtttctagggttgttacgaagctgcaggagcgagatggaggtggacgcaccgggtgttgatggtcgagatggtctccgggagcggcgaggctttagcgagggagggaggcagaacttcgatgtgaggcctcagtctggggcaaatgggcttcccaaacactcctactggttggacctctggcttttcatccttttcgatgtggtggtgtttctctttgtgtattttttgccatgacttgttcgctgatatctaaattaagaagttggttcttgagtgaattctgaaaatggctacaaacttcttgaataaagaagacaggactctcaatagaagaatttcacatctccaagggacccttcctttcattttacactttgttactaatttgcagaactctattaattgggtaggatttcacccattcctagctaagttcttaaaattaaaccctttggttcgtgtttaaaaactttcaaacatctgatggctttacaggggctgaatataaaagcatttgtacttaaaggtcttgtgtattcattaagaaatatagtaatgtcttttaatgttttaagagttgatcagggtttactatgatgcaagtaataggatgattaataagggaaggtttttatgaattcaaaagtcaattattcaaaagcagggaaagattttgagagagggaacaaagtattcttagattgcgtagaagctgctaggttccagttttaatttttaggtttagttggactctgttatgaaaagataggttatgggtgggcgacaggttgatacagtcttagaaaaagcaggtaatatcaaagtattggaaagctagcatgcatgccctcttacctgggtatcttcccccttttttccttttaaactcttgagcctcctataacgaaggattatgtgtttcaaacctattttttttttactgtttcattaagtgtgcttgtgcccaaaatatttacttgtataatatctgtaacttgcttaaatacttcagcaaagtcagcatatttactcattcaacaaatatttgagccaggcattattttagacacagcagtgaacaaaacaaaaaggcattcttgccttcatggagcttacattcttattgttatttaaatctaaatgttataaaacaagaatttatattctagggttgatcagctagtatttaatcaaaaaggccacactcccatagcagctactctaagctgtagtagctaataaaaaatattaatgttggccgggcacagtggctcacgcctataatcccagcactttgggaggccaagggtggtagatcacttgaggtcaagagttgtgacaccagcctggccaacctggtgaaaccctatctctattaaaaaatacaaaaaaatacaaaaaaattagctgggcatgttggcatgcacctgtagtcccagctatttgggaggctgaggcacgagaattgcttgaatccgggaggtggaggttgcagtgagccaagatggggccactgcactctaacgtgggcaacagagaccctgtctcaaaaagaaaatattcctgttagccctaaaggctttacatgaggaatggtagaagtggtcttttgtttaaattagttgcattcagcatatatgaattgtcttaaatattttggggatactcccccgccttttaaacagggcataagatctggtaaactctctgtatatcttcctacctttcaaaatcgttcttagggttagtcaagtctggaatataattgctgactataaagttagcaattatgcttttaaggtgttgtcacatcaacctaaagagaaccatctatggaaggtatggttgaaacatctgtaggaacacagaactgggatttcactgagtttaccaaatcaactgtgtgaactgtttctgcactgcttgctaatggtttcatctaataaatgtttacttata

SEQ ID NO: 458719 - DNA, 2115 bp, Homo sapiens
gcgctgggaagagtaggttcagagtgcattccggaacccggggcgcggcgcactgcgcaggcggccggactccgctcagtttccggtgcggcgaacaccaaagtccgggaacttaagcattttcggtttctagggttgttacgaagctgcaggagcgagatggaggtggacgcaccgggtgttgatggtcgagatggtctccgggagcggcgaggctttagcgagggagggaggcagaacttcgatgtgaggcctcagtctggggcaaatgggcttcccaaacactcctactggttggacctctggcttttcatccttttcgatgtggtggtgtttctctttgtgtattttttgccatgacttgttcgctgatatctaaattaagaagttggttcttgagtgaattctgaaaatggctacaaacttcttgaataaagaagacaggactctcaatagaagaatttcacatctccaagggacccttcctttcattttacactttgttactaatttgcagaactctattaattgggtaggatttcacccattcctagctaagttcttaaaattaaaccctttggttcgtgtttaaaaactttcaaacatctgatggctttacaggggctgaatataaaagcatttgtacttaaaggtcttgtgtattcattaagaaatatagtaatgtcttttaatgttttaagagttgatcagggtttactatgatgcaagtaataggatgattaataagggaaggtttttatgaattcaaaagtcaattattcaaaagcagggaaagattttgagagagggaacaaagtattcttagattgcgtagaagctgctaggttccagttttaatttttaggtttagttggactctgttatgaaaagataggttatgggtgggcgacaggttgatacagtcttagaaaaagcaggtaatatcaaagtattggaaagctagcatgcatgccctcttacctgggtatcttcccccttttttccttttaaactcttgagcctcctataacgaaggattatgtgtttcaaacctattttttttttactgtttcattaagtgtgcttgtgcccaaaatatttacttgtataatatctgtaacttgcttaaatacttcagcaaagtcagcatatttactcattcaacaaatatttgagccaggcattattttagacacagcagtgaacaaaacaaaaaggcattcttgccttcatggagcttacattcttattgttatttaaatctaaatgttataaaacaagaatttatattctagggttgatcagctagtatttaatcaaaaaggccacactcccatagcagctactctaagctgtagtagctaataaaaaatattaatgttggccgggcacagtggctcacgcctataatcccagcactttgggaggccaagggtggtagatcacttgaggtcaagagttgtgacaccagcctggccaacctggtgaaaccctatctctattaaaaaatacaaaaaaatacaaaaaaattagctgggcatgttggcatgcacctgtagtcccagctatttgggaggctgaggcacgagaattgcttgaatccgggaggtggaggttgcagtgagccaagatggggccactgcactctaacgtgggcaacagagaccctgtctcaaaaagaaaatattcctgttagccctaaaggctttacatgaggaatggtagaagtggtcttttgtttaaattagttgcattcagcatatatgaattgtcttaaatattttggggatactcccccgccttttaaacagggcataagatctggtaaactctctgtatatcttcctacctttcaaaatcgttcttagggttagtcaagtctggaatataattgctgactataaagttagcaattatgcttttaaggtgttgtcacatcaacctaaagagaaccatctatggaaggtatggttgaaacatctgtaggaacacagaactgggatttcactgagtttaccaaatcaactgtgtgaactgtttctgcactgcttgctaatggtttcatctaataaatgtttacttataaaaaaaaaagaagaaattctctcagggctg

SEQ ID NO: 458720 - DNA, 2037 bp, Homo sapiens
gcgctgggaagagtaggttcagagtgcattccggaacccggggcgcggcgcactgcgcaggcggccggactccgctcagtttccggtgcggcgaacaccaaagtccgggaacttaagcattttcggtttctagggttgttacgaagctgcaggagcgagatggaggtggacgcaccgggtgttgatggtcgagatggtctccgggagcggcgaggctttagcgagggagggaggcagaacttcgatgtgaggcctcagtctggggcaaatgggcttcccaaacactcctactggttggacctctggcttttcatccttttcgatgtggtggtgtttctctttgtgtattttttgccatgacttgttcgctgatatctaaattaagaagttggttcttgagtgaattctgaaaatggctacaaacttcttgaataaagaagacaggactctcaatagaagaatttcacatctccaagggacccttcctttcattttacactttgttactaatttgcagaactctattaattgggtaggatttcacccattcctagctaagttcttaaaattaaaccctttggttcgtgtttaaaaactttcaaacatctgatggctttacaggggctgaatataaaagcatttgtacttaaaggtcttgtgtattcattaagaaatatagtaatgtcttttaatgttttaagagttgatcagggtttactatgatgcaagtaataggatgattaataagggaaggtttttatgaattcaaaagtcaattattcaaaagcagggaaagattttgagagagggaacaaagtattcttagattgcgtagaagctgctaggttccagttttaatttttaggtttagttggactctgttatgaaaagataggttatgggtgggcgacaggttgatacagtcttagaaaaagcaggtaatatcaaagtattggaaagctagcatgcatgccctcttacctgggtatcttcccccttttttccttttaaactcttgagcctcctataacgaaggattatgtgtttcaaacctattttttttttactgtttcattaagtgtgcttgtgcccaaaatatttacttgtataatatctgtaacttgcttaaatacttcagcaaagtcagcatatttactcattcaacaaatatttgagccaggcattattttagacacagcagtgaacaaaacaaaaaggcattcttgccttcatggagcttacattcttattgttatttaaatctaaatgttataaaacaagaatttatattctagggttgatcagctagtatttaatcaaaaaggccacactcccatagcagctactctaagctgtagtagctaataaaaaatattaatgttggccgggcacagtggctcacgcctataatcccagcactttgggaggccaagggtggtagatcacttgaggtcaagagttgtgacaccagcctggccaacctggtgaaaccctatctctattaaaaaatacaaaaaaatacaaaaaaattagctgggcatgttggcatgcacctgtagtcccagctatttgggaggctgaggcacgagaattgcttgaatccgggaggtggaggttgcagtgagccaagatggggccactgcactctaacgtgggcaacagagaccctgtctcaaaaagaaaatattcctgttagccctaaaggctttacatgaggaatggtagaagtggtcttttgtttaaattagttgcattcagcatatatgaattgtcttaaatattttggggatactcccccgccttttaaacagggcataagatctggtaaactctctgtatatcttcctacctttcaaaatcgttcttagggttaggtctacctggggcaaaaagccggttagcgggggcaggcctcctagggagaggagggtggatggaattaagggtgttagtcatgttagcttgtttcaggtgcgagatagtagtagggtcgtggtgctggagtttaagtgagtagtaggatgcgtagtagttagt

SEQ ID NO: 458721 - DNA, 1928 bp, Homo sapiens
tcgctctacgaggatccccggaatacaccgcgcgagatggtctccgggagcggcgaggctttagcgagggagggaggcagaacttcgatgtgaggcctcagtctggggcaaatgggcttcccaaacactcctactggttggacctctggcttttcatccttttcgatgtggtggtgtttctctttgtgtattttttgccatgacttgttcgctgatatctaaattaagaagttggttcttgagtgaattctgaaaatggctacaaacttcttgaataaagaagacaggactctcaatagaagaatttcacatctccaagggacccttcctttcattttacactttgttactaatttgcagaactctattaattgggtaggatttcacccattcctagctaagttcttaaaattaaaccctttggttcgtgtttaaaaactttcaaacatctgatggctttacaggggctgaatataaaagcatttgtacttaaaggtcttgtgtattcattaagaaatatagtaatgtcttttaatgttttaagagttgatcagggtttactatgatgcaagtaataggatgattaataagggaaggtttttatgaattcaaaagtcaattattcaaaagcagggaaagattttgagagagggaacaaagtattcttagattgcgtagaagctgctaggttccagttttaatttttaggtttagttggactctgttatgaaaagataggttatgggtgggcgacaggttgatacagtcttagaaaaagcaggtaatatcaaagtattggaaagctagcatgcatgccctcttacctgggtatcttcccccttttttccttttaaactcttgagcctcctataacgaaggattatgtgtttcaaacctattttttttttactgtttcattaagtgtgcttgtgcccaaaatatttacttgtataatatctgtaacttgcttaaatacttcagcaaagtcagcatatttactcattcaacaaatatttgagccaggcattattttagacacagcagtgaacaaaacaaaaaggcattcttgccttcatggagcttacattcttattgttatttaaatctaaatgttataaaacaagaatttatattctagggttgatcagctagtatttaatcaaaaaggccacactcccatagcagctactctaagctgtagtagctaataaaaaatattaatgttggccgggcacagtggctcacgcctataatcccagcactttgggaggccaagggtggtagatcacttgaggtcaagagttgtgacaccagcctggccaacctggtgaaaccctatctctattaaaaaatacaaaaaaatacaaaaaaattagctgggcatgttggcatgcacctgtagtcccagctatttgggaggctgaggcacgagaattgcttgaatccgggaggtggaggttgcagtgagccaagatggggccactgcactctaacgtgggcaacagagaccctgtctcaaaaagaaaatattcctgttagccctaaaggctttacatgaggaatggtagaagtggtcttttgtttaaattagttgcattcagcatatatgaattgtcttaaatattttggggatactcccccgccttttaaacagggcataagatctggtaaactctctgtatatcttcctacctttcaaaatcgttcttagggttagtcaagtctggaatataattgctgactataaagttagcaattatgcttttaaggtgttgtcacatcaacctaaagagaaccatctatggaaggtatggttgaaacatctgtaggaacacagaactgggatttcactgagtttaccaaatcaactgtgtgaactgtttctgcactgcttgctaatggtttcatctaataaatgtttacttata

SEQ ID NO: 458722 - DNA, 742 bp, Homo sapiens
gcgctgggaagagtaggttcagagtgcattccggaacccggggcgcggcgcactgcgcaggcggccggactccgctcagtttccggtgcggcgaacaccaaagtccgggaacttaagcattttcggtttctagggttgttacgaagctgcaggagcgagatggaggtggacgcaccgggtgttgatggtcgagatggtctccgggagcggcgaggctttagcgagggagggaggcagaacttcgatgtgaggcctcagtctggggcaaatgggcttcccaaacactcctactggttggacctctggcttttcatccttttcgatgtggtggtgtttctctttgtgtattttttgccatgacttgttcgctgatatctaaattaagaagttggttcttgagtgaattctgaaaatggctacaaacttcttgaataaagaagacaggactctcaatagaagaatttcacatctccaagggacccttcctttcattttacactttgttactaatttgcagaactctattaattgggtaggatttcacccattcctagctaagttcttaaaattaaaccctttggttcgtgtttaaaaactttcaaacatctgatggctttacaggggtccagtcttccgggggtttctagggttgttacgaagctgtgggacgagatgaggtgggtgaggtgggtggggaggctgatgcgttatagccagtggtgttttttgagtgagagggggt

SEQ ID NO: 458723 - DNA, 970 bp, Homo sapiens
ccgcgcccccatccccatcccgtggagtggccggcgacaagatggcagcagcgtgtcggagcgtgaagggcctggtggcggtaataaccggaggagcctcgggcctgggcctggccacggcggagcgacttgtggggcagggagcctctgctgtgcttctggacctgcccaactcgggtggggaggcccaagccaagaagttaggaaacaactgcgttttcgccccagccgacgtgacctctgagaaggatgtgcaaacagctctggctctagcaaaaggaaagtttggccgtgtggatgtagctgtcaactgtgcaggcatcgcggtggctagcaagacgtacaacttaaagaagggccagacccataccttggaagacttccagcgagttcttgatgtgaatctcatgggcaccttcaatgtgatccgcctggtggctggtgagatgggccagaatgaaccagaccagggaggccaacgtggggtcatcatcaacactgccagtgtggctgccttcgagggtcaggttggacaagctgcatactctgcttccaaggggggaatagtgggcatgacactgcccattgctcgggatctggctcccataggtatccgggtgatgaccattgccccaggtctgtttggcaccccactgctgaccagcctcccagagaaagtgtgcaacttcttggccagccaagtgcccttccctagccgactgggtgaccctgctgagtatgctcacctcgtacaggccatcatcgagaacccattcctcaatggagaggtcatccggctggatggggccattcgtatgcagccttgaagggagaaggcagagaaaacacacgctcctctgcccttcctttccctggggtactactctccagcttgggaggaagcccagtagccattttgtaactgcctaccagtcgccctctgtgcctaataaagtctctttttctcaca

SEQ ID NO: 458724 - DNA, 943 bp, Homo sapiens
ccgcgcccccatccccatcccgtggagtggccggcgacaagatggcagcagcgtgtcggagcgtgaagggcctggtggcggtaataaccggaggagcctcgggcctgggcctggccacggcggagcgacttgtggggcagggagcctctgctgtgcttctggacctgcccaactcgggtggggaggcccaagccaagaagttaggaaacaactgcgttttcgccccagccgacgtgacctctgagaaggatgtgcaaacagctctggctctagcaaaaggaaagtttggccgtgtggatgtagctgtcaactgtgcaggcatcgcggtggctagcaagacgtacaacttaaagaagggccagacccataccttggaagacttccagcgagttcttgatgtgaatctcatgggcaccttcaatgtgatccgcctggtggctggtgagatgggccagaatgaaccagaccagggaggccaacgtggggtcatcatcaacactgccagtgtggctgccttcgagggtcaggttggacaagctgcatactctgcttccaaggggggaatagtgggcatgacactgcccattgctcgggatctggctcccataggtctgtttggcaccccactgctgaccagcctcccagagaaagtgtgcaacttcttggccagccaagtgcccttccctagccgactgggtgaccctgctgagtatgctcacctcgtacaggccatcatcgagaacccattcctcaatggagaggtcatccggctggatggggccattcgtatgcagccttgaagggagaaggcagagaaaacacacgctcctctgcccttcctttccctggggtactactctccagcttgggaggaagcccagtagccattttgtaactgcctaccagtcgccctctgtgcctaataaagtctctttttctcaca

SEQ ID NO: 458725 - DNA, 1010 bp, Homo sapiens
  misc_feature (993)..(993): n is a, c, g, or t
  misc_feature (996)..(996): n is a, c, g, or t
ccgcgcccccatccccatcccgtggagtggccggcgacaagatggcagcagcgtgtcggagcgtgaagggcctggtggcggtaataaccggaggagcctcgggcctgggcctggccacggcggagcgacttgtggggcagggagcctctgctgtgcttctggacctgcccaactcgggtggggaggcccaagccaagaagttaggaaacaactgcgttttcgccccagccgacgtgacctctgagaaggatgtgcaaacagctctggctctagcaaaaggaaagtttggccgtgtggatgtagctgtcaactgtgcaggcatcgcggtggctagcaagacgtacaacttaaagaagggccagacccataccttggaagacttccagcgagttcttgatgtgaatctcatgggcaccttcaatgtgatccgcctggtggctggtgagatgggccagaatgaaccagaccagggaggccaacgtggggtcatcatcaacactgccagtgtggctgccttcgagggtcaggttggacaagctgcatactctgcttccaaggggggaatagtgggcatgacactgcccattgctcgggatctggctcccataggtatccgggtgatgaccattgccccaggtctgtttggcaccccactgctgaccagcctcccagagaaagtgtgcaacttcttggccagccaagtgcccttccctagccgactgggtgaccctgctgagtatgctcacctcgtacaggccatcatcgagaacccattcctcaatggagaggtcatccggctggatggggccattcgtatgcagccttgaagggagaaggcagagaaaacacacgctcctctgcccttcctttccctggggtactactctccagcttgggaggaagcccagtagccattttgtaactgcctaccagtcgccctctgtgcctaataaagtctctttttctcacaaaaaaaaaaaaaaaaaaaaaaanaanaaaaaaaaaaaaaa

SEQ ID NO: 458726 - DNA, 936 bp, Homo sapiens
ccgcgcccccatccccatcccgtggagtggccggcgacaagatggcagcagcgtgtcggagcgtgaagggcctggtggcggtaataaccggaggagcctcgggcctgggcctggccacggcggagcgacttgtggggcagggagcctctgctgtgcttctggacctgcccaactcgggtggggaggcccaagccaagaagttaggaaacaactgcgttttcgccccagccgacgtgacctctgagaaggatgtgcaaacagctctggctctagcaaaaggaaagtttggccgtgtggatgtagctgtcaactgtgcaggcatcgcggtggctagcaagacgtacaacttaaagaagggccagacccataccttggaagacttccagcgagttcttgatgtgaatctcatgggcaccttcaatgtgatccgcctggtggctggtgagatgggccagaatgaaccagaccagggaggcccacctaagcagcagcagccttttatctttgggccccagagaagcaccaagaagtagggctaaagtaaggaagaaccaggtaatcatgaaagcaagggtgagtctctgaatttggctatattgtttgtctgtttggcaccccactgctgaccagcctcccagagaaagtgtgcaacttcttggccagccaagtgcccttccctagccgactgggtgaccctgctgagtatgctcacctcgtacaggccatcatcgagaacccattcctcaatggagaggtcatccggctggatggggccattcgtatgcagccttgaagggagaaggcagagaaaacacacgctcctctgcccttcctttccctggggtactactctccagcttgggaggaagcccagtagccattttgtaactgcctaccagtcgccctctgtgcctaataaagtctctttttctcaca

SEQ ID NO: 458727 - DNA, 811 bp, Homo sapiens
ccgcgcccccatccccatcccgtggagtggccggcgacaagatggcagcagcgtgtcggagcgtgaagggcctggtggcggtaataaccggaggagcctcgggcctgggcctggccacggcggagcgacttgtggggcagggagcctctgctgtgcttctggacctgcccaactcgggtggggaggcccaagccaagaagttaggaaacaactgcgttttcgccccagccgacgtgacctctgagaaggatgtgcaaacagctctggctctagcaaaaggaaagtttggccgtgtggatgtagctgtcaactgtgcaggcatcgcggtggctagcaagacgtacaacttaaagaagggccagacccataccttggaagacttccagcgagttcttgatgtgaatctcatgggcaccttcaatgtgatccgcctggtggctggtgagatgggccagaatgaaccagaccagggaggccgtctgtttggcaccccactgctgaccagcctcccagagaaagtgtgcaacttcttggccagccaagtgcccttccctagccgactgggtgaccctgctgagtatgctcacctcgtacaggccatcatcgagaacccattcctcaatggagaggtcatccggctggatggggccattcgtatgcagccttgaagggagaaggcagagaaaacacacgctcctctgcccttcctttccctggggtactactctccagcttgggaggaagcccagtagccattttgtaactgcctaccagtcgccctctgtgcctaataaagtctctttttctcaca

SEQ ID NO: 458728 - DNA, 650 bp, Homo sapiens
ccgcgcccccatccccatcccgtggagtggccggcgacaagatggcagcagcgtgtcggagcgtgaagggcctggtggcggtaataaccggaggagcctcgggcctgggcctggccacggcggagcgacttgtggggcagggagcctctgctgtgcttctggacctgcccaactcgggtggggaggcccaagccaagaagttaggaaacaactgcgttttcgccccagccgacgtgacctctgagaaggatgtgcaaacagctctggctctagcaaaaggaaagtttggccgtgtggatgtagctgtcaactgtgcaggcatcgcggtggctagcaagacgtacaacttaaagaagggccagacccataccttggaagacttccagcgagttcttgatgtgaatctcatgggcaccttcaatgtgatccgcctggtggctggtgagatgggccagaatgaaccagaccagggaggccaacgtggggtcatcatcaacactgccagtgtggctgccttcgagggtcagacacgctcctctgcccttcctttccctggggtactactctccagcttgggaggaagcccagtagccattttgtaactgcctaccagtcgccctctgtgcctaataaagtctctttttctcaca

SEQ ID NO: 458729 - DNA, 532 bp, Homo sapiens
ccgcgcccccatccccatcccgtggagtggccggcgacaagatggcagcagcgtgtcggagcgtgaagggcctggtggcggtaataaccggaggagcctcgggcctgggcctggccacggcggagcgacttgtggggcagggagcctctgctgtgcttctggacctgcccaactcgggtggggaggcccaagccaagaagttaggaaacaactgcgttttcgccccagccgacgtgacctctgagaaggatgtgcaaacagctctggctctagcaaaaggaaagtttggccctgctgagtatgctcacctcgtacaggccatcatcgagaacccattcctcaatggagaggtcatccggctggatggggccattcgtatgcagccttgaagggagaaggcagagaaaacacacgctcctctgcccttcctttccctggggtactactctccagcttgggaggaagcccagtagccattttgtaactgcctaccagtcgccctctgtgcctaataaagtctctttttctcaca

SEQ ID NO: 458730 - DNA, 471 bp, Homo sapiens
acctttctcttggcctctcccttctcacaaatctcttctcacccaaggactgggcatgccctgccctgccctccctcaggtttagtgggaagagtgggtgctgggagatgaataccttctccacttctctctttgaaggtgacctctgagaaggatgtgcaaacagctctggctctagcaaaaggaaagtttggccgtgtggatgtagctgtcaactgtgcaggcatcgcggtggctagcaagacgtacaacttaaagaagggccagacccataccttggaagacttccagcgagttcttgatgtaaggccttggaagttctccagggatagtggtagtaagaagtatctggctgtggaggaccccaaagtttttaggggacaaaggcttcttctgcctcaggtcctatagcatgtctccatctgtcctacaggtgaatctcatgggcaccttcaatgtgatccgcctggt

SEQ ID NO: 458731 - DNA, 1008 bp, Homo sapiens
ccgcgcccccatccccatcccgtggagtggccggcgacaagatggcagcagcgtgtcggagcgtgaagggcctggtggcggtaataaccggaggagcctcgggcctgggcctggccacggcggagcgacttgtggggcagggagcctctgctgtgcttctggacctgcccaactcgggtggggaggcccaagccaagaagttaggaaacaactgcgttttcgccccagccgacgtgacctctgagaaggatgtgcaaacagctctggctctagcaaaaggaaagtttggccgtgtggatgtagctgtcaactgtgcaggcatcgcggtggctagcaagacgtacaacttaaagaagggccagacccataccttggaagacttccagcgagttcttgatgtgaatctcatgggcaccttcaatgtgatccgcctggtggctggtgagatgggccagaatgaaccagaccagggaggccaacgtggggtcatcatcaacactgccagtgtggctgccttcgagggtcaggttggacaagctgcatactctgcttccaaggggggaatagtgggcatgacactgcccattgctcgggatctggctcccataggtatccgggtgatgaccattgccccaggtctgtttggcaccccactgctgaccagcctcccagagaaagtgtgcaacttcttggccagccaagtgcccttccctagccgactgggtgaccctgctgagtatgctcacctcgtacaggccatcatcgagaacccattcctcaatggagaggtcatccggctggatggggccattcgtatgcagccttgaagggagaaggcagagaaaacacacgctcctctgcccttcctttccctggggtactactctccagcttgggaggaagcccagtagccattttgtaactgcctaccagtcgccctctgtgcctaataaagtctctttttctcacaaaaaaaaaaaaaccgagggactaacgggggcgaaaagc

SEQ ID NO: 458732 - DNA, 532 bp, Homo sapiens
  misc_feature (470)..(470): n is a, c, g, or t
ccgcgcccccatccccatcccgtggagtggccggcgacaagatggcagcagcgtgtcggagcgtgaagggcctggtggcggtaataaccggaggagcctcgggcctgggcctggccacggcggagcgacttgtggggcagggagcctctgctgtgcttctggacctgcccaactcgggtggggaggcccaagccaagaagttaggaaacaactgcgttttcgccccagccgacgtgacctctgagaaggatgtgcaaacagctctggctctagcaaaaggaaagtttggccgtgtggatgtagctgtcaactgtgcaggcatcgcggtggctagcaagacgtacaacttaaagaagggccagacccataccttggaagacttccagcgagttcttgatgtgaaatcttccatggggccacctttccaatggtgaatccccgcctgggtgggctgggtgaagatggggccncaaaaatggaacccagtacccagggtaggggcccaacggtgggggttcattcattcaaacac

SEQ ID NO: 458733 - DNA, 1111 bp, Homo sapiens
ccgcgcccccatccccatcccgtggagtggccggcgacaagatggcagcagcgtgtcggagcgtgaaggtagaaggttctttgcctctgttgcttgccttcctttacgggccgggacagcgcggccgtggaactaggagaaagagatcggtttcgagggaaagggtcatgcttatgtaggcctggtattgtggccgttgggctcaagagggcctggtggcggtaataaccggaggagcctcgggcctgggcctggccacggcggagcgacttgtggggcagggagcctctgctgtgcttctggacctgcccaactcgggtggggaggcccaagccaagaagttaggaaacaactgcgttttcgccccagccgacgtgacctctgagaaggatgtgcaaacagctctggctctagcaaaaggaaagtttggccgtgtggatgtagctgtcaactgtgcaggcatcgcggtggctagcaagacgtacaacttaaagaagggccagacccataccttggaagacttccagcgagttcttgatgtgaatctcatgggcaccttcaatgtgatccgcctggtggctggtgagatgggccagaatgaaccagaccagggaggccaacgtggggtcatcatcaacactgccagtgtggctgccttcgagggtcaggttggacaagctgcatactctgcttccaaggggggaatagtgggcatgacactgcccattgctcgggatctggctcccataggtatccgggtgatgaccattgccccaggtctgtttggcaccccactgctgaccagcctcccagagaaagtgtgcaacttcttggccagccaagtgcccttccctagccgactgggtgaccctgctgagtatgctcacctcgtacaggccatcatcgagaacccattcctcaatggagaggtcatccggctggatggggccattcgtatgcagccttgaagggagaaggcagagaaaacacacgctcctctgcccttcctttccctggggtactactctccagcttgggaggaagcccagtagccattttgtaactgcctaccagtcgccctctgtgcctaataaagtctctttttctcaca

SEQ ID NO: 458734 - DNA, 1171 bp, Homo sapiens
ccgcgcccccatccccatcccgtggagtggccggcgacaagatggcagcagcgtgtcggagcgtgaagggcctggtggcggtaataaccggaggagcctcgggcctgggcctggccacggcggagcgacttgtggggcagggagcctctgctgtgcttctggacctgcccaactcgggtggggaggcccaagccaagaagttaggaaacaactgcgttttcgccccagccgacgtgacctctgagaaggatgtgcaaacagctctggctctagcaaaaggaaagtttggccgtgtggatgtagctgtcaactgtgcaggcatcgcggtggctagcaagacgtacaacttaaagaagggccagacccataccttggaagacttccagcgagttcttgatgtgaatctcatgggcaccttcaatgtgatccgcctggtggctggtgagatgggccagaatgaaccagaccagggaggccaacgtggggtcatcatcaacactgccagtgtggctgccttcgagggtcaggttggacaagctgcatactctgcttccaaggggggaatagtgggcatgacactgcccattgctcgggatctggctcccataggtatccgggtgatgaccattgccccaggtagacatatcccctctctccatcatacctgggattgggtgggatccatggacagttgagaggggaaggtatccaccacctaagcagcagcagccttttatctttgggccccagagaagcaccaagaagtagggctaaagtaaggaagaaccaggtaatcatgaaagcaagggtgagtctctgaatttggctatattgtttgtctgtttggcaccccactgctgaccagcctcccagagaaagtgtgcaacttcttggccagccaagtgcccttccctagccgactgggtgaccctgctgagtatgctcacctcgtacaggccatcatcgagaacccattcctcaatggagaggtcatccggctggatggggccattcgtatgcagccttgaagggagaaggcagagaaaacacacgctcctctgcccttcctttccctggggtactactctccagcttgggaggaagcccagtagccattttgtaactgcctaccagtcgccctctgtgcctaataaagtctctttttctcaca

SEQ ID NO: 458735 - DNA, 1067 bp, Homo sapiens
ccgcgcccccatccccatcccgtggagtggccggcgacaagatggcagcagcgtgtcggagcgtgaagggcctggtggcggtaataaccggaggagcctcgggcctgggcctggccacggcggagcgacttgtggggcagggagcctctgctgtgcttctggacctgcccaactcgggtggggaggcccaagccaagaagttaggaaacaactgcgttttcgccccagccgacgtgacctctgagaaggatgtgcaaacagctctggctctagcaaaaggaaagtttggccgtgtggatgtagctgtcaactgtgcaggcatcgcggtggctagcaagacgtacaacttaaagaagggccagacccataccttggaagacttccagcgagttcttgatgtgaatctcatgggcaccttcaatgtgatccgcctggtggctggtgagatgggccagaatgaaccagaccagggaggccaacgtggggtcatcatcaacactgccagtgtggctgccttcgagggtcaggtctgtttggcaccccactgctgaccagcctcccagagaaagtgtgcaacttcttggccagccaagtgcccttccctagccgactgggtgaccctgctgagtatgctcacctcgtacaggccatcatcgagaacccattcctcaatggagaggtcatccggctggatggggccattcgtatgcagccttgaagggagaaggcagagaaaacacacgctcctctgcccttcctttccctggggtactactctccagcttgggaggaagcccagtagccattttgtaactgcctaccagtcgccctctgtgcctaataaagtctctttttctcacaaaaaaacaccacacacagcaaaacaaacactccggggcaacaaaatgccggcggcgcgcaaacagagacggcacgggacagcgcgccctggccacaaagcaggacccatgaccaaagttcctgctccccacggcggccaactcgcccgggcccccaaataggagaagccgcaatatagttcgaaaacccggggttaaccgcagaag

SEQ ID NO: 458736 - DNA, 597 bp, Homo sapiens
  misc_feature (580)..(580): n is a, c, g, or t
  misc_feature (583)..(583): n is a, c, g, or t
gggatctggctcccataggtatccgggtgatgaccattgccccaggtctgtttagcaaaaggaaagtttggccgtgtggatgtagctgtcaactgtgcaggcatcgcggtggctagcaagacgtacaacttaaagaagggccagacccataccttggaagacttccagcgagttcttgatgtgaatctcatgggcaccttcaatgtgatccgcctggtggctggtgagatgggccagaatgaaccagaccagggaggccagaaagtgtgcaacttcttggccagccaagtgcccttccctagccgactgggtgaccctgctgagtatgctcacctcgtacaggccatcatcgagaacccattcctcaatggagaggtcatccggctggatggggccattcgtatgcagccttgaagggagaaggcagagaaaacacacgctcctctgcccttcctttccctggggtactactctccagcttgggaggaagcccagtagccattttgtaactgcctaccagtcgccctctgtgcctaataaagtctctttttctcacaaaaaaaaaaaaaaaaaaaaaaanaanaaaaaaaaaaaaaa

SEQ ID NO: 458737 - DNA, 215 bp, Homo sapiens
agtttgctggaagtggatcatatgtttaagagtgaacagatgttaagacgactctgctttgttaaaaacttctgttttgcagtgagcagaaacaggttgggctaaaagactgaacatgaaataagcttcacaaagaatttaatgactgttgaagaagaagagagtacaaacaaataggagagaggagaggccagtgaaagatcactgtggaaagg

SEQ ID NO: 458738 - DNA, 1495 bp, Homo sapiens
  misc_feature (1470)..(1470): n is a, c, g, or t
taaagaaggaaaaacttgaatttatattatgaaattaaggttttacttttatttagcaatcatttcacccattgggggattaatttttaaaaagattagtacttagctgagctttagattctctaagaattatccctttttcaaaatggcttgataaaacaccacttcctgtccagggaggaagttattttagctcaaggactgaaatatttagcagatctttagacaaaaggaacaaattacatttctctctggcttaaaaagggtgcttgagccagagggggttaagaagccctcccccctccccctgttggggtggtctggaggggcagggaggtgtgggggtgggggtccttaggctccctgggatggaggatctgtctctctctctctctctcctttttttttttttggtggagatgaaggggtgggtctatggtacatcacctgagttgtggggtaaatgtagagagtgtcaatcaaaggcagagctctcagagctgggaaggaggctctagatggcggctgtgccttagagagagcgcgctctgctccctgcctttgcctcactttacgcaactttccctaactttcgggcagcctcagggggcccccgtagccccctgcctttcctagggacttactggggtcgattcgaacctttttttgggagaaaagcagcttttaggagctttcttttcgtgccttgttggaaagaagcagccgtactgagagcccaggtcgttgttttttccagcttagaagccatggcgcacctccatttttgtgcgctctcctaatgaggttttttttctttcggacctgttttagtattaattattgctttatttttttgaccagttaacatatttgagggttattttatttatttttcgttttttaacggaggattttgcctttatttttaattatttgggatctgatatttttctactagtagataggactcttggtttggacatactacatggatcagtcactcagcctctgaagaagcttcgggttcagactcaggcagtcagtcggaaagtgagcagggaagtgatccaggaagtggacatggcagcgagtcgaacagcagctctgaatcttctgagagtcagtcggaatctgagagcgaatcagcaggttccaaatcccagccagtcctcccagaagccaaagagaagccagcctctaagaaggaacggatagctgatgtgaagaagatgtgggaagaatatcctgatgtttatggggtcaggcggtcaaaccgaagcagacaagaaccatcgcgatttaatattaaggaagaggcaagtagcgggtctgagagtgggagcccaaaaagaagaggccagaggcagctgaaaaaacaagaaaatggaacaggacctcagagatgacaggacaaggcacagtcagagagtagcagacaaaaaaataaagcagagactgtcccagagacangccaacctcgtgtaaaagagcggag

SEQ ID NO: 458739 - DNA, 1746 bp, Homo sapiens
gtcttgctttgtcacccagggtagagtgcagtggcgcgatctgggctcacagcagcttccacctcctgggttcaagtgattctcctgccgcagcctcccaaatagctaggattacaggcacctgccaccacacctggctagtttttgtatttttagaagagacagggtttcaccatgttggccaggctggtgtcaaactcctgacctcaggtgacaggtctgcctcagcctcccaaagtgctggaattatgagcatgagccactgtgcctggccaatacatacgtacatttaaatactagcaacctaatcagttattagctgactttgtataggtatataatctctttggtactcagtttccatccgtgaaatgagaataataaacttacgttgaagggttgctatgagaattaaatgagaggatatcagtaaagagcttctgcctctacagttgtaactggttattactggaaagtttagacttctctgagtcccttgaggctatttgcttgaaaacaagcttctaagtatagacagtgatgaaccactgggggcagtgcttctttttccagaaagtacataagtagatataaaatttgtagcaaaaattcatagccctgttttgtttcctaggatgatggcttggaaaaaagtccaatgaaaaaaaaacagaagaagaaagagaacaaggagaacaaggagaaacaaatgagttctaggaaagacaaagaaggggacaaggaaagaaagaagtcaaaagataagaaagagaaggtaatgatgcccttctgttcatgcagatatccacagcctttgcaattcgccatttggatttagaagtagaatgagatttgagggccctggaataattgtctttttatgggtatgttcaagaaggatgggtggggccgttgatgggatacctgcacctgtccttgcagagagaggggaacctgcaagtttggggtgttctttaaaaaagaaggcctttacttggtcttttatgacatatttcagggggaaatgtttgaatgagataggacaggtgagagaaatcggcatttacatgtaaatacgaaatacgttctcagattcatattagaggagcacaatccacaactgaatttgaatacttgaagagtttgagtcaaaaacaaatattagcaagagttattggaatataaatggatgaaaagccttgctattataacctttacattaggggttttatgaagttcattctaaaccaaagaatttggtacagtgttgcagtgtatacttgctgacctctgaacacagtaaaatcattgccaaaacacaaacaactgctgtaattctaatatccagttgataactctaatagatttcttgataagtgcctttgaaacttttactttgaaattttatattaaatataaaataaacttctatttaagaacaaatataaaaatcagattaggctgtttgggtagtttttcctcctcacttagcagtatatcacaactttccaagtgattaaatgttaaagtcatttttacagccttggcaacgtagggagacctcgtctctacaaaataaaaacaagcaaaaatctagctgggcattgcggcatgtgcctacgggcccagttgcatgggaggcagaggtgagaggattgcttaggcccaggagctcgaggctgcagtgagccatggttgtgtcacacttcactccagcttgggcaacagaggaagaccttgtctcaa

SEQ ID NO: 458740 - DNA, 625 bp, Homo sapiens
ccatcatatttacccattttaataacacaacataggtaagaaacctaaatcgcacggtaggattgcacaaatgacaatgactccttgtaactcttttttaaaagcctaaaagtggtgatgccaaatcttcgagtaaatcaaagcgatctcagggtcctgtccatattacagcaggaagtgaacctgtccccattggagaggatgaggatgatgatctggaccaggagacattcagcatatgtaaggagaggatgaggcccgtgaaaaaggcactgaaacagctcgacaaacctgacaaggggctcaacgtgcaagaacagctggaacacacccggaactgcctgctgaaaatcggagaccggatagccgagtgccttaaagcctactcagatcaggagcacatcaaactctggaggaggtaaccactttggcctcgtctgcccagtttgatttgactgagtgtgggagtggattctgttttcttttaataaaaggtggcatagccacctaagaaatctttctcccagcacaactcatctattggcaatatacctgcaggctttaactccctttccatgaaataggccattccactgagaccagccttttgaaggggtaggacgat

SEQ ID NO: 458741 - DNA, 474 bp, Homo sapiens
gcctactactactaaattcgcggccgcgtcgatgctttaaagagtcatcatgttgtttggttatgcttttgagtgtcttgatttgtattttaatcatcattttctctccttttccaggccaaattaaagaagcggaagcctcgggtaaagaaggaaaacaaagtgcccaggctgaaagaggagcatggaattgagctttcatctcctaggcattcagataatccatcagaagagggagaagtgaaagtatgaagtggggtttcggttgagggttatttatttattttagctatacttatcatgccagctggaataaaatcatctgaaatgtgtttggtttacgagtggattaaatggaaatagaatatgtaagtcttcgcttaatctgtcagcgaggatagtttaagtcagcaactgcaaatttgtacataatggaagtaaatgaaggggactatgacatttttgttgttgttg

SEQ ID NO: 458742 - DNA, 417 bp, Homo sapiens
ccctctgcctttggtctgaaagactgggatgatgatgagatccaagcttcggtgctggcagtgtcccaacaggaaaacctagacagtatgaagaagaaaaggaccagggaaaaggagaggtccaacaatcaagatatccggagttcaggttaatgtgaaatccattatccaacatgaagaggagtttgagatgctgcataaatctatccctgtggaccctgaagaaaaaaaaaaatactgcttaacctgtcgtgtcaaagctgcacattttgatgtagagtggggggtggaagatgattctcgcctgttgctggggatttatgaacatggctatggaaactgggagttaattaaaacagacccagagcttaaattaactgacaaactgcctcgttccccaccactgctaaagtgcgg

SEQ ID NO: 458743 - DNA, 292 bp, Homo sapiens
taacaataagccagagatatattcagagagactaagaggtcagggttcgttgatacatgttttctgtggaacttctgcagattttcatttaactaatgtgaaactggtatttttcaggaaaaggaccagggaaaaggagaggtccaacaatcaagatatccggagttcaggttaatgtgaaatccattatccaacatgaagaggagtttgagatgctgcataaatctatccctgtgccccacaagcgggggccgggcttggtgtcgtttgggaatgaccgtgttccctgcgt

SEQ ID NO: 458744 - DNA, 8903 bp, Homo sapiens
  misc_feature (8384)..(8387): n is a, c, g, or t
  misc_feature (8461)..(8461): n is a, c, g, or t
  misc_feature (8468)..(8468): n is a, c, g, or t
taaagaaggaaaaacttgaatttatattatgaaattaaggttttacttttatttagcaatcatttcacccattgggggattaatttttaaaaagattagtacttagctgagctttagattctctaagaattatccctttttcaaaatggcttgataaaacaccacttcctgtccagggaggaagttattttagctcaaggactgaaatatttagcagatctttagacaaaaggaacaaattacatttctctctggcttaaaaagggtgcttgagccagagggggttaagaagccctcccccctccccctgttggggtggtctggaggggcagggaggtgtgggggtgggggtccttaggctccctgggatggaggatctgtctctctctctctctctcctttttttttttttggtggagatgaaggggtgggtctatggtacatcacctgagttgtggggtaaatgtagagagtgtcaatcaaaggcagagctctcagagctgggaaggaggctctagatggcggctgtgccttagagagagcgcgctctgctccctgcctttgcctcactttacgcaactttccctaactttcgggcagcctcagggggcccccgtagccccctgcctttcctagggacttactggggtcgattcgaacctttttttgggagaaaagcagcttttaggagctttcttttcgtgccttgttggaaagaagcagccgtactgagagcccaggtcgttgttttttccagcttagaagccatggcgcacctccatttttgtgcgctctcctaatgaggttttttttctttcggacctgttttagtattaattattgctttatttttttgaccagttaacatatttgagggttattttatttatttttcgttttttaacggaggattttgcctttatttttaattatttgggatctgatatttttctactagtagataggactcttggtttggacatactacatggatcagtaaatacctgggcacaggacttcaaagcaaacacagattccccctcccccttaatatttaagaattaaaagatgatgagaaataaggacaaaagccaagaggaggacagttcgctacacagcaatgcatcgagtcactcagcctctgaagaagcttcgggttcagactcaggcagtcagtcggaaagtgagcagggaagtgatccaggaagtggacatggcagcgagtcgaacagcagctctgaatcttctgagagtcagtcggaatctgagagcgaatcagcaggttccaaatcccagccagtcctcccagaagccaaagagaagccagcctctaagaaggaacggatagctgatgtgaagaagatgtgggaagaatatcctgatgtttatggggtcaggcggtcaaaccgaagcagacaagaaccatcgcgatttaatattaaggaagaggcaagtagcgggtctgagagtgggagcccaaaaagaagaggccagaggcagctgaaaaaacaagaaaaatggaaacaggaaccctcagaagatgaacaggaacaaggcaccagtgcagagagtgagccagaacaaaaaaaagtaaaagccagaagacctgtccccagaagaacagtgcccaaacctcgtgttaaaaagcagccgaagactcagcgtggaaagagaaaaaagcaagattcttctgatgaggatgatgatgatgacgaagctcccaaaaggcagactcgtcgaagagcggctaaaaacgttagttacaaagaagatgatgactttgagactgactcagatgatctcattgaaatgactggagaaggagttgatgaacagcaagataatagtgaaactattgaaaaggtcttagattcaagactgggaaagaaaggagccactggagcatctactactgtatatgcgattgaagctaatggcgaccctagtggtgactttgacactgaaaaggatgaaggtgaaatccagtacctcatcaagtggaagggttggtcttacatccacagcacatgggagagtgaagaatccttacagcaacagaaagtgaagggcctaaaaaaactagagaacttcaagaaaaaagaggacgaaatcaaacaatggttagggaaagtttctcctgaagatgtagaatatttcaattgccaacaggagctggcttcagagttgaataaacagtatcagatagtagaaagagtaatagctgtgaagacaagtaaatctacattgggtcaaacagattttccagctcatagtcggaagccggcaccctcaaatgagcccgaatatctatgtaaatggatgggactcccctattcagagtgtagctgggaagatgaagccctcattggaaagaaattccagaattgcattgacagcttccacagtaggaacaactcaaaaaccatcccaacaagagaatgcaaggccctgaagcagagaccacgatttgtagctttaaagaaacaacctgcatatttaggaggggagaatctggaacttcgagattatcagctagaaggtctaaactggctagctcattcctggtgcaaaaataatagtgtaatccttgctgatgaaatgggcctaggaaagaccatccagaccatatcattcctctcctacctgttccaccaacaccagctgtatggcccctttcttatagtcgtccctttatccaccctcacctcatggcagagagagtttgaaatctgggcaccagagattaacgtagtggtttacataggtgacctgatgagcagaaatacgatacgggaatatgaatggattcattcccaaaccaaaagattgaagttcaacgcacttataacaacatatgagatcctcttgaaagataagactgtgctgggcagtattaactgggcctttctgggagtggatgaagcccatcggttgaagaatgatgactctttattgtataaaactctgattgatttcaagtccaaccataggctcctgattacggggacccctcttcagaattccctcaaagagctctggtccttgctgcactttattatgccggagaagtttgaattttgggaagattttgaagaagaccatgggaaggggagagagaatggctaccagagtcttcataaggtgctagagcctttccttctccggagagtcaaaaaagatgtggagaaatcccttcctgctaaagtggaacagattctcagggtggagatgtcagcccttcagaaacagtattacaagtggattctgaccaggaattacaaggctcttgccaaaggaacaagaggcagcacatctggttttcttaatattgtgatggaactgaaaaaatgttgcaaccactgctatctgattaaaccccctgaagaaaatgaaagggaaaatggacaggagattcttctgtccctcataaggagcagtgggaagttgattttattagacaaactgttgacaagacttcgagaaagggggaatcgagtgcttatcttctctcagatggtgagaatgttggatatcctggctgaatacctaactattaaacactatcctttccagcgtctggatggttccatcaagggagaaatccgaaaacaggcactggaccacttcaatgcagatgggtctgaggacttctgtttcctgctctcgacaagggctggtggcctgggaatcaatttggcttcagcggacacagtcgtcatctttgactctgactggaacccccagaatgacttgcaggcacaagcccgagcgcatagaattggtcagaagaagcaggtaaatatttaccgcttagttacaaaggggactgtggaggaggagatcatagaacgggccaaaaagaagatggtattagatcatctggtgattcagcgcatggacaccactggccggacgatcctggaaaacaactcaggaaggtccaactcaaatccttttaataaagaagagctgacagctattttgaaatttggagcagaggatctcttcaaagaactggaaggggaggaatcagaacctcaggaaatggatatagatgaaattttgcggttggctgaaacgagagagaatgaagtgtcaacaagtgcaacagatgaacttctatcacagtttaaggttgccaactttgcaacaatggaagatgaagaagagctagaagagcgtcctcacaaggactgggatgagatcattccagaggaacaaaggaaaaaagtagaggaggaagagcggcagaaggagctagaagaaatttatatgctgcctcgaattcggagttccactaaaaaggctcagacaaatgacagtgactctgacactgagtctaagaggcaggcccagagatcctctgcttctgagagtgaaacggaagactctgatgatgacaagaagccaaagcgcagagggcgtccgaggagtgtgcggaaggacctcgtggagggatttactgatgcagagatccgaaggttcatcaaggcttataagaagtttggtctccctcttgaacggctggagtgcatagcacgtgatgctgagctggtagataagtcggtggcagatctgaagcgcctgggtgaactgatccacaacagctgtgtgtcagcaatgcaggaatacgaagagcagctgaaagaaaatgccagcgagggaaaaggaccagggaaaaggagaggtccaacaatcaagatatccggagttcaggttaatgtgaaatccattatccaacatgaagaggagtttgagatgctgcataaatctatccctgtggaccctgaagaaaaaaaaaaatactgcttaacctgtcgtgtcaaagctgcacattttgatgtagagtggggggtggaagatgattctcgcctgttgctggggatttatgaacatggctatggaaactgggagttaattaaaacagacccagagcttaaattaactgacaaaattctgccggtggagacagataaaaagcctcaggggaagcagctacagacccgagcggattacttgttgaagctgctcagaaagggtctggagaagaagggggctgtgacaggtggggaagaggccaaattaaagaagcggaagcctcgggtaaagaaggaaaacaaagtgcccaggctgaaagaggagcatggaattgagctttcatctcctaggcattcagataatccatcagaagagggagaagtgaaagatgatggcttggaaaaaagtccaatgaaaaaaaaacagaagaagaaagagaacaaggagaacaaggagaaacaaatgagttctaggaaagacaaagaaggggacaaggaaagaaagaagtcaaaagataagaaagagaagcctaaaagtggtgatgccaaatcttcgagtaaatcaaagcgatctcagggtcctgtccatattacagcaggaagtgaacctgtccccattggagaggatgaggatgatgatctggaccaggagacattcagcatatgtaaggagaggatgaggcccgtgaaaaaggcactgaaacagctcgacaaacctgacaaggggctcaacgtgcaagaacagctggaacacacccggaactgcctgctgaaaatcggagaccggatagccgagtgccttaaagcctactcagatcaggagcacatcaaactctggaggaggaacctatggatttttgtttccaagtttacagaatttgatgctcgaaaactgcataagttatacaagatggctcataagaaaaggtctcaagaagaagaggagcaaaagaagaaagacgacgtgactgggggtaagaaaccatttcgtccagaggcctcaggctccagccgggactctctgatatctcagtcccatacctcacacaaccttcaccctcagaagcctcatttgcctgcctcccatggcccacagatgcatggacacccaagagataactacaatcaccccaacaagagacacttcagtaatgcagatcgaggagactggcagagggaaagaaagttcaactatggtggtggcaacaacaatccaccatggggaagcgacaggcaccatcagtatgagcagcactggtacaaggaccaccattatggggaccggcgacatatggatgcccaccgttccggaagctatcgacccaacaacatgtccagaaagaggccttatgaccagtacagcagtgaccgagaccaccggggacacagagattattatgacaggtatgcaaaaggctgtgagacaccaggtgccaacctttgccaggagctgtttctagggagaaagtgacgtatacatgaatgtatttatctatcaaattactgaagatctcatcatgcatgtgtcagccacagcgaatcccatgtcttggttataggttttatgttttgttttctgggtcatagggagcacatttcacctgtgcaggaaaagagttttctgccgtcttttgaggaaatctagtgaagaggtcgccataaaatattagagtcaacaaccaaaattattaagctctgtgcgaggctgtcagccacactaggtatcagggatcccgagatgggtaccagcccacagtccttacctgccacgagcccataattgaagagtcaaagtcttctgaagctgcaccctctttacttcagtacaatgccaccagtagtacgatgagccaaagctttacattgtgagagtagcaagtccagggagagctaaagaggttttatctgtatttcctaatttcaaatcttggataatttaacctcatagcagctttggttttccctgggctgatgatgtgcgtcatttgcactgtaccttgaatttacagtgggaaaatttcatataaacgtgtcaaagtcgtgctttgtttttggaagatctggtaacagcagcccgcattagcagagagctgtagctgagtagctgccacctcgttgggagactgcccctcgctcccacccttctctattgtctggacccagtgggcatcttgccctgcgttcttctagtaggtctgtatttctatttgatgtcactttccttttgcctgaaggactttttctgctggtgataaactctttcagtgtttgtatatatgcctgaaaaagtattttgccttcatttttgaaagtagtttttgctgagtgtatacatttttggctttacagtttctttcagtgctttaaagatgtacctctgctatttacttgcattgttttgtgatgaaaaatctgtcatccttatctttgttcctctttacataatgttccttttaaaaaaaatcactgattatgatgtgccttggtgtatttttccttggtttcttgtgcttggaaatttttgaacttcttggatctgtgggtttattgtttccataaaatttggaaatttttacaatcttcttcaaatattttttctgatcccccactctctcttcttctttggagattctcattacacctatattagcttgcttgaagttgtctcacagctcacttgtattctgttgacttttaaaaaattatgctttctgtttcactgtggatagtttctattgctacctcttcaagttcactaatactttccttttcaatgtcaagactgctgtgaggcccatccagtgtactttgcattttatacattgtagttctaaaagttcggaaagttgtttttgggtctttttatatatgttctgtgtctaaccttttaaaacctggaacacagatataacaatggttttgatgtccttgtctgcgaatcttatcacttgggtcagtttcagttgatacctcctcactgtgggtcttgctcccctggtgctttctgtgcctagtaatttttgtcagatgccagatgtaacatttaccttgttgggtgctggatatttctgtattcctgtaagtattctggagctttgttatgagttgcaggttatttggaagcagtttcctttttcaggtcttgctgttaagattcgttaggtagaaccagagcagtgctcagtcaagggctaatgattgcccacccccaaggtaaagagcctcattgcactctacccaattgcgttagtctgttttgcaggaatacctgaggctgggtaatttatagagaaaagagttttatttggcgcacagttccgcaggctgtacaagcatagcaccagcatctggttggcttctggagaggcctcagggagcttttactcatggtggaaggtgaagtggcagtaggcgtcccatggcaagagagggagcaagagagagaggaggaggtgccagcctcttttaaagcaccagctctcacgtgaactcagagaactcactcattatcacaaggacagcaccaagccatttatgagggatctgcccaaacacctcccactacannnnggaagagcccgagcgtggctttatcttgcactcatgcaaaagaaactggcagattatctgaaagtgcctatagncaataancatctcttaagcgagttctatgagcctgaggctttaatgatggaggaagaagggatggtgattgttggtctgctggtgggactcaatgttctcgatgccaatctctgcttgaaaggagaagacttggattctcaggttggagtaatagatttttccctctaccttaaggatgtgcaggatcttgatggtggcaaggagcatgaaagaattactgatgtccttgatcaaaaaattatgtggaagaacttaaccggcacttgagctgcacagttggggatcttcaaaccaagatagatggcttggaaaagactaactcaaagcttcaagaagagctttcagctgcaacagaccgaatttgctcacttcaagaagaacagcagcagttaagagaacaaaatgaattaattcgagaaagaagtgaaaagagtgtagaga

SEQ ID NO: 458745 - DNA, 6317 bp, Homo sapiens
taaagaaggaaaaacttgaatttatattatgaaattaaggttttacttttatttagcaatcatttcacccattgggggattaatttttaaaaagattagtacttagctgagctttagattctctaagaattatccctttttcaaaatggcttgataaaacaccacttcctgtccagggaggaagttattttagctcaaggactgaaatatttagcagatctttagacaaaaggaacaaattacatttctctctggcttaaaaagggtgcttgagccagagggggttaagaagccctcccccctccccctgttggggtggtctggaggggcagggaggtgtgggggtgggggtccttaggctccctgggatggaggatctgtctctctctctctctctcctttttttttttttggtggagatgaaggggtgggtctatggtacatcacctgagttgtggggtaaatgtagagagtgtcaatcaaaggcagagctctcagagctgggaaggaggctctagatggcggctgtgccttagagagagcgcgctctgctccctgcctttgcctcactttacgcaactttccctaactttcgggcagcctcagggggcccccgtagccccctgcctttcctagggacttactggggtcgattcgaacctttttttgggagaaaagcagcttttaggagctttcttttcgtgccttgttggaaagaagcagccgtactgagagcccaggtcgttgttttttccagcttagaagccatggcgcacctccatttttgtgcgctctcctaatgaggttttttttctttcggacctgttttagtattaattattgctttatttttttgaccagttaacatatttgagggttattttatttatttttcgttttttaacggaggattttgcctttatttttaattatttgggatctgatatttttctactagtagataggactcttggtttggacatactacatggatcagtaaatacctgggcacaggacttcaaagcaaacacagattccccctcccccttaatatttaagaattaaaagatgatgagaaataaggacaaaagccaagaggaggacagttcgctacacagcaatgcatcgagtcactcagcctctgaagaagcttcgggttcagactcaggcagtcagtcggaaagtgagcagggaagtgatccaggaagtggacatggcagcgagtcgaacagcagctctgaatcttctgagagtcagtcggaatctgagagcgaatcagcaggttccaaatcccagccagtcctcccagaagccaaagagaagccagcctctaagaaggaacggatagctgatgtgaagaagatgtgggaagaatatcctgatgtttatggggtcaggcggtcaaaccgaagcagacaagaaccatcgcgatttaatattaaggaagaggcaagtagcgggtctgagagtgggagcccaaaaagaagaggccagaggcagctgaaaaaacaagaaaaatggaaacaggaaccctcagaagatgaacaggaacaaggcaccagtgcagagagtgagccagaacaaaaaaaagtaaaagccagaagacctgtccccagaagaacagtgcccaaacctcgtgttaaaaagcagccgaagactcagcgtggaaagagaaaaaagcaagattcttctgatgaggatgatgatgatgacgaagctcccaaaaggcagactcgtcgaagagcggctaaaaacgttagttacaaagaagatgatgactttgagactgactcagatgatctcattgaaatgactggagaaggagttgatgaacagcaagataatagtgaaactattgaaaaggtcttagattcaagactgggaaagaaaggagccactggagcatctactactgtatatgcgattgaagctaatggcgaccctagtggtgactttgacactgaaaaggatgaaggtgaaatccagtacctcatcaagtggaagggttggtcttacatccacagcacatgggagagtgaagaatccttacagcaacagaaagtgaagggcctaaaaaaactagagaacttcaagaaaaaagaggacgaaatcaaacaatggttagggaaagtttctcctgaagatgtagaatatttcaattgccaacaggagctggcttcagagttgaataaacagtatcagatagtagaaagagtaatagctgtgaagacaagtaaatctacattgggtcaaacagattttccagctcatagtcggaagccggcaccctcaaatgagcccgaatatctatgtaaatggatgggactcccctattcagagtgtagctgggaagatgaagccctcattggaaagaaattccagaattgcattgacagcttccacagtaggaacaactcaaaaaccatcccaacaagagaatgcaaggccctgaagcagagaccacgatttgtagctttaaagaaacaacctgcatatttaggaggggagaatctggaacttcgagattatcagctagaaggtctaaactggctagctcattcctggtgcaaaaataatagtgtaatccttgctgatgaaatgggcctaggaaagaccatccagaccatatcattcctctcctacctgttccaccaacaccagctgtatggcccctttcttatagtcgtccctttatccaccctcacctcatggcagagagagtttgaaatctgggcaccagagattaacgtagtggtttacataggtgacctgatgagcagaaatacgatacgggaatatgaatggattcattcccaaaccaaaagattgaagttcaacgcacttataacaacatatgagatcctcttgaaagataagactgtgctgggcagtattaactgggcctttctgggagtggatgaagcccatcggttgaagaatgatgactctttattgtataaaactctgattgatttcaagtccaaccataggctcctgattacggggacccctcttcagaattccctcaaagagctctggtccttgctgcactttattatgccggagaagtttgaattttgggaagattttgaagaagaccatgggaaggggagagagaatggctaccagagtcttcataaggtgctagagcctttccttctccggagagtcaaaaaagatgtggagaaatcccttcctgctaaagtggaacagattctcagggtggagatgtcagcccttcagaaacagtattacaagtggattctgaccaggaattacaaggctcttgccaaaggaacaagaggcagcacatctggttttcttaatattgtgatggaactgaaaaaatgttgcaaccactgctatctgattaaaccccctgaagaaaatgaaagggaaaatggacaggagattcttctgtccctcataaggagcagtgggaagttgattttattagacaaactgttgacaagacttcgagaaagggggaatcgagtgcttatcttctctcagatggtgagaatgttggatatcctggctgaatacctaactattaaacactatcctttccagcgtctggatggttccatcaagggagaaatccgaaaacaggcactggaccacttcaatgcagatgggtctgaggacttctgtttcctgctctcgacaagggctggtggcctgggaatcaatttggcttcagcggacacagtcgtcatctttgactctgactggaacccccagaatgacttgcaggcacaagcccgagcgcatagaattggtcagaagaagcaggtaaatatttaccgcttagttacaaaggggactgtggaggaggagatcatagaacgggccaaaaagaagatggtattagatcatctggtgattcagcgcatggacaccactggccggacgatcctggaaaacaactcaggaaggtccaactcaaatccttttaataaagaagagctgacagctattttgaaatttggagcagaggatctcttcaaagaactggaaggggaggaatcagaacctcaggaaatggatatagatgaaattttgcggttggctgaaacgagagagaatgaagtgtcaacaagtgcaacagatgaacttctatcacagtttaaggttgccaactttgcaacaatggaagatgaagaagagctagaagagcgtcctcacaaggactgggatgagatcattccagaggaacaaaggaaaaaagtagaggaggaagagcggcagaaggagctagaagaaatttatatgctgcctcgaattcggagttccactaaaaaggctcagacaaatgacagtgactctgacactgagtctaagaggcaggcccagagatcctctgcttctgagagtgaaacggaagactctgatgatgacaagaagccaaagcgcagagggcgtccgaggagtgtgcggaaggacctcgtggagggatttactgatgcagagatccgaaggttcatcaaggcttataagaagtttggtctccctcttgaacggctggagtgcatagcacgtgatgctgagctggtagataagtcggtggcagatctgaagcgcctgggtgaactgatccacaacagctgtgtgtcagcaatgcaggaatacgaagagcagctgaaagaaaatgccagcgagggaaaaggaccagggaaaaggagaggtccaacaatcaagatatccggagttcaggttaatgtgaaatccattatccaacatgaagaggagtttgagatgctgcataaatctatccctgtggaccctgaagaaaaaaaaaaatactgcttaacctgtcgtgtcaaagctgcacattttgatgtagagtggggggtggaagatgattctcgcctgttgctggggatttatgaacatggctatggaaactgggagttaattaaaacagacccagagcttaaattaactgacaaaattctgccggtggagacagataaaaagcctcaggggaagcagctacagacccgagcggattacttgttgaagctgctcagaaagggtctggagaagaagggggctgtgacaggtggggaagaggccaaattaaagaagcggaagcctcgggtaaagaaggaaaacaaagtgcccaggctgaaagaggagcatggaattgagctttcatctcctaggcattcagataatccatcagaagagggagaagtgaaagatgatggcttggaaaaaagtccaatgaaaaaaaaacagaagaagaaagagaacaaggagaacaaggagaaacaaatgagttctaggaaagacaaagaaggggacaaggaaagaaagaagtcaaaagataagaaagagaaggtaatgatgcccttctgttcatgcagatatccacagcctttgcaattcgccatttggatttagaagtagaatgagatttgagggccctggaataattgtctttttatgggtatgttcaagaaggatgggtggggccgttgatgggatacctgcacctgtccttgcagagagaggggaacctgcaagtttggggtgttctttaaaaaagaaggcctttacttggtcttttatgacatatttcagggggaaatgtttgaatgagataggacaggtgagagaaatcggcatttacatgtaaatacgaaatacgttctcagattcatattagaggagcacaatccacaactgaatttgaatacttgaagagtttgagtcaaaaacaaatattagcaagagttattggaatataaatggatgaaaagccttgctattataacctttacattaggggttttatgaagttcattctaaaccaaagaatttggtacagtgttgcagtgtatacttgctgacctctgaacacagtaaaatcattgccaaaacacaaacaactgctgtaattctaatatccagttgataactctaatagatttcttgataagtgcctttgaaacttttactttgaaattttatattaaatataaaataaacttctatttaagaacaaatataaaaatcagattaggctgtttgggtagtttttcctcctcacttagcagtatatcacaactttccaagtgattaaatgttaaagtcatttttacagccttggcaacgtagggagacctcgtctctacaaaataaaaacaagcaaaaatctagctgggcattgcggcatgtgcctacgggcccagttgcatgggaggcagaggtgagaggattgcttaggcccaggagctcgaggctgcagtgagccatggttgtgtcacacttcactccagcttgggcaacagaggaagaccttgtctcaa

SEQ ID NO: 458746 - DNA, 5953 bp, Homo sapiens
taaagaaggaaaaacttgaatttatattatgaaattaaggttttacttttatttagcaatcatttcacccattgggggattaatttttaaaaagattagtacttagctgagctttagattctctaagaattatccctttttcaaaatggcttgataaaacaccacttcctgtccagggaggaagttattttagctcaaggactgaaatatttagcagatctttagacaaaaggaacaaattacatttctctctggcttaaaaagggtgcttgagccagagggggttaagaagccctcccccctccccctgttggggtggtctggaggggcagggaggtgtgggggtgggggtccttaggctccctgggatggaggatctgtctctctctctctctctcctttttttttttttggtggagatgaaggggtgggtctatggtacatcacctgagttgtggggtaaatgtagagagtgtcaatcaaaggcagagctctcagagctgggaaggaggctctagatggcggctgtgccttagagagagcgcgctctgctccctgcctttgcctcactttacgcaactttccctaactttcgggcagcctcagggggcccccgtagccccctgcctttcctagggacttactggggtcgattcgaacctttttttgggagaaaagcagcttttaggagctttcttttcgtgccttgttggaaagaagcagccgtactgagagcccaggtcgttgttttttccagcttagaagccatggcgcacctccatttttgtgcgctctcctaatgaggttttttttctttcggacctgttttagtattaattattgctttatttttttgaccagttaacatatttgagggttattttatttatttttcgttttttaacggaggattttgcctttatttttaattatttgggatctgatatttttctactagtagataggactcttggtttggacatactacatggatcagtaaatacctgggcacaggacttcaaagcaaacacagattccccctcccccttaatatttaagaattaaaagatgatgagaaataaggacaaaagccaagaggaggacagttcgctacacagcaatgcatcgagtcactcagcctctgaagaagcttcgggttcagactcaggcagtcagtcggaaagtgagcagggaagtgatccaggaagtggacatggcagcgagtcgaacagcagctctgaatcttctgagagtcagtcggaatctgagagcgaatcagcaggttccaaatcccagccagtcctcccagaagccaaagagaagccagcctctaagaaggaacggatagctgatgtgaagaagatgtgggaagaatatcctgatgtttatggggtcaggcggtcaaaccgaagcagacaagaaccatcgcgatttaatattaaggaagaggcaagtagcgggtctgagagtgggagcccaaaaagaagaggccagaggcagctgaaaaaacaagaaaaatggaaacaggaaccctcagaagatgaacaggaacaaggcaccagtgcagagagtgagccagaacaaaaaaaagtaaaagccagaagacctgtccccagaagaacagtgcccaaacctcgtgttaaaaagcagccgaagactcagcgtggaaagagaaaaaagcaagattcttctgatgaggatgatgatgatgacgaagctcccaaaaggcagactcgtcgaagagcggctaaaaacgttagttacaaagaagatgatgactttgagactgactcagatgatctcattgaaatgactggagaaggagttgatgaacagcaagataatagtgaaactattgaaaaggtcttagattcaagactgggaaagaaaggagccactggagcatctactactgtatatgcgattgaagctaatggcgaccctagtggtgactttgacactgaaaaggatgaaggtgaaatccagtacctcatcaagtggaagggttggtcttacatccacagcacatgggagagtgaagaatccttacagcaacagaaagtgaagggcctaaaaaaactagagaacttcaagaaaaaagaggacgaaatcaaacaatggttagggaaagtttctcctgaagatgtagaatatttcaattgccaacaggagctggcttcagagttgaataaacagtatcagatagtagaaagagtaatagctgtgaagacaagtaaatctacattgggtcaaacagattttccagctcatagtcggaagccggcaccctcaaatgagcccgaatatctatgtaaatggatgggactcccctattcagagtgtagctgggaagatgaagccctcattggaaagaaattccagaattgcattgacagcttccacagtaggaacaactcaaaaaccatcccaacaagagaatgcaaggccctgaagcagagaccacgatttgtagctttaaagaaacaacctgcatatttaggaggggagaatctggaacttcgagattatcagctagaaggtctaaactggctagctcattcctggtgcaaaaataatagtgtaatccttgctgatgaaatgggcctaggaaagaccatccagaccatatcattcctctcctacctgttccaccaacaccagctgtatggcccctttcttatagtcgtccctttatccaccctcacctcatggcagagagagtttgaaatctgggcaccagagattaacgtagtggtttacataggtgacctgatgagcagaaatacgatacgggaatatgaatggattcattcccaaaccaaaagattgaagttcaacgcacttataacaacatatgagatcctcttgaaagataagactgtgctgggcagtattaactgggcctttctgggagtggatgaagcccatcggttgaagaatgatgactctttattgtataaaactctgattgatttcaagtccaaccataggctcctgattacggggacccctcttcagaattccctcaaagagctctggtccttgctgcactttattatgccggagaagtttgaattttgggaagattttgaagaagaccatgggaaggggagagagaatggctaccagagtcttcataaggtgctagagcctttccttctccggagagtcaaaaaagatgtggagaaatcccttcctgctaaagtggaacagattctcagggtggagatgtcagcccttcagaaacagtattacaagtggattctgaccaggaattacaaggctcttgccaaaggaacaagaggcagcacatctggttttcttaatattgtgatggaactgaaaaaatgttgcaaccactgctatctgattaaaccccctgaagaaaatgaaagggaaaatggacaggagattcttctgtccctcataaggagcagtgggaagttgattttattagacaaactgttgacaagacttcgagaaagggggaatcgagtgcttatcttctctcagatggtgagaatgttggatatcctggctgaatacctaactattaaacactatcctttccagcgtctggatggttccatcaagggagaaatccgaaaacaggcactggaccacttcaatgcagatgggtctgaggacttctgtttcctgctctcgacaagggctggtggcctgggaatcaatttggcttcagcggacacagtcgtcatctttgactctgactggaacccccagaatgacttgcaggcacaagcccgagcgcatagaattggtcagaagaagcaggtaaatatttaccgcttagttacaaaggggactgtggaggaggagatcatagaacgggccaaaaagaagatggtattagatcatctggtgattcagcgcatggacaccactggccggacgatcctggaaaacaactcaggaaggtccaactcaaatccttttaataaagaagagctgacagctattttgaaatttggagcagaggatctcttcaaagaactggaaggggaggaatcagaacctcaggaaatggatatagatgaaattttgcggttggctgaaacgagagagaatgaagtgtcaacaagtgcaacagatgaacttctatcacagtttaaggttgccaactttgcaacaatggaagatgaagaagagctagaagagcgtcctcacaaggactgggatgagatcattccagaggaacaaaggaaaaaagtagaggaggaagagcggcagaaggagctagaagaaatttatatgctgcctcgaattcggagttccactaaaaaggctcagacaaatgacagtgactctgacactgagtctaagaggcaggcccagagatcctctgcttctgagagtgaaacggaagactctgatgatgacaagaagccaaagcgcagagggcgtccgaggagtgtgcggaaggacctcgtggagggatttactgatgcagagatccgaaggttcatcaaggcttataagaagtttggtctccctcttgaacggctggagtgcatagcacgtgatgctgagctggtagataagtcggtggcagatctgaagcgcctgggtgaactgatccacaacagctgtgtgtcagcaatgcaggaatacgaagagcagctgaaagaaaatgccagcgagggaaaaggaccagggaaaaggagaggtccaacaatcaagatatccggagttcaggttaatgtgaaatccattatccaacatgaagaggagtttgagatgctgcataaatctatccctgtggaccctgaagaaaaaaaaaaatactgcttaacctgtcgtgtcaaagctgcacattttgatgtagagtggggggtggaagatgattctcgcctgttgctggggatttatgaacatggctatggaaactgggagttaattaaaacagacccagagcttaaattaactgacaaaattctgccggtggagacagataaaaagcctcaggggaagcagctacagacccgagcggattacttgttgaagctgctcagaaagggtctggagaagaagggggctgtgacaggtggggaagaggccaaattaaagaagcggaagcctcgggtaaagaaggaaaacaaagtgcccaggctgaaagaggagcatggaattgagctttcatctcctaggcattcagataatccatcagaagagggagaagtgaaagatgatggcttggaaaaaagtccaatgaaaaaaaaacagaagaagaaagagaacaaggagaacaaggagaaacaaatgagttctaggaaagacaaagaaggggacaaggaaagaaagaagtcaaaagataagaaagagaagcctaaaagtggtgatgccaaatcttcgagtaaatcaaagcgatctcagggtcctgtccatattacagcaggaagtgaacctgtccccattggagaggatgaggatgatgatctggaccaggagacattcagcatatgtaaggagaggatgaggcccgtgaaaaaggcactgaaacagctcgacaaacctgacaaggggctcaacgtgcaagaacagctggaacacacccggaactgcctgctgaaaatcggagaccggatagccgagtgccttaaagcctactcagatcaggagcacatcaaactctggaggaggaacctatggatttttgtttccaagtttacagaatttgatgctcgaaaactgcataagttatacaagatggctcataagaaaaggtctcaagaagaagaggtaaagtacaaattcagtcctaattcatacaaacaaataccaattccacagaaaaatctcttaatttttgtttttccatggggagatgatcacagaatcatgggttattgctggtgctaatagtcaaacaataagaccagatgggtgaaatagccaatgtattggagcctaacatggttgaaattctgacaaa

SEQ ID NO: 458747 - DNA, 9245 bp, Homo sapiens
  misc_feature (8726)..(8729): n is a, c, g, or t
  misc_feature (8803)..(8803): n is a, c, g, or t
  misc_feature (8810)..(8810): n is a, c, g, or t
taaagaaggaaaaacttgaatttatattatgaaattaaggttttacttttatttagcaatcatttcacccattgggggattaatttttaaaaagattagtacttagctgagctttagattctctaagaattatccctttttcaaaatggcttgataaaacaccacttcctgtccagggaggaagttattttagctcaaggactgaaatatttagcagatctttagacaaaaggaacaaattacatttctctctggcttaaaaagggtgcttgagccagagggggttaagaagccctcccccctccccctgttggggtggtctggaggggcagggaggtgtgggggtgggggtccttaggctccctgggatggaggatctgtctctctctctctctctcctttttttttttttggtggagatgaaggggtgggtctatggtacatcacctgagttgtggggtaaatgtagagagtgtcaatcaaaggcagagctctcagagctgggaaggaggctctagatggcggctgtgccttagagagagcgcgctctgctccctgcctttgcctcactttacgcaactttccctaactttcgggcagcctcagggggcccccgtagccccctgcctttcctagggacttactggggtcgattcgaacctttttttgggagaaaagcagcttttaggagctttcttttcgtgccttgttggaaagaagcagccgtactgagagcccaggtcgttgttttttccagcttagaagccatggcgcacctccatttttgtgcgctctcctaatgaggttttttttctttcggacctgttttagtattaattattgctttatttttttgaccagttaacatatttgagggttattttatttatttttcgttttttaacggaggattttgcctttatttttaattatttgggatctgatatttttctactagtagataggactcttggtttggacatactacatggatcaggtaagttcacgatcattggtgataattttaaagatttatttgtttaagtttgccttgttttctgtaaatacgagaaattcttggatgacgcaataagatacagagattgttatttgtatctagtgtgctactttgagaaagtttccttattgatagtgatgcttccactgttcggtttatcctggtgttttttcttttaaggaaaaaatagaaatatttagttttttggtgcttaccgttgttgtgttataacaatatcgttaacatcgtcaggactttgttcctgataataaaaagcatcgatagaagccgggaccttacctttctttcaacttttgacagtaaatacctgggcacaggacttcaaagcaaacacagattccccctcccccttaatatttaagaattaaaagatgatgagaaataaggacaaaagccaagaggaggacagttcgctacacagcaatgcatcgagtcactcagcctctgaagaagcttcgggttcagactcaggcagtcagtcggaaagtgagcagggaagtgatccaggaagtggacatggcagcgagtcgaacagcagctctgaatcttctgagagtcagtcggaatctgagagcgaatcagcaggttccaaatcccagccagtcctcccagaagccaaagagaagccagcctctaagaaggaacggatagctgatgtgaagaagatgtgggaagaatatcctgatgtttatggggtcaggcggtcaaaccgaagcagacaagaaccatcgcgatttaatattaaggaagaggcaagtagcgggtctgagagtgggagcccaaaaagaagaggccagaggcagctgaaaaaacaagaaaaatggaaacaggaaccctcagaagatgaacaggaacaaggcaccagtgcagagagtgagccagaacaaaaaaaagtaaaagccagaagacctgtccccagaagaacagtgcccaaacctcgtgttaaaaagcagccgaagactcagcgtggaaagagaaaaaagcaagattcttctgatgaggatgatgatgatgacgaagctcccaaaaggcagactcgtcgaagagcggctaaaaacgttagttacaaagaagatgatgactttgagactgactcagatgatctcattgaaatgactggagaaggagttgatgaacagcaagataatagtgaaactattgaaaaggtcttagattcaagactgggaaagaaaggagccactggagcatctactactgtatatgcgattgaagctaatggcgaccctagtggtgactttgacactgaaaaggatgaaggtgaaatccagtacctcatcaagtggaagggttggtcttacatccacagcacatgggagagtgaagaatccttacagcaacagaaagtgaagggcctaaaaaaactagagaacttcaagaaaaaagaggacgaaatcaaacaatggttagggaaagtttctcctgaagatgtagaatatttcaattgccaacaggagctggcttcagagttgaataaacagtatcagatagtagaaagagtaatagctgtgaagacaagtaaatctacattgggtcaaacagattttccagctcatagtcggaagccggcaccctcaaatgagcccgaatatctatgtaaatggatgggactcccctattcagagtgtagctgggaagatgaagccctcattggaaagaaattccagaattgcattgacagcttccacagtaggaacaactcaaaaaccatcccaacaagagaatgcaaggccctgaagcagagaccacgatttgtagctttaaagaaacaacctgcatatttaggaggggagaatctggaacttcgagattatcagctagaaggtctaaactggctagctcattcctggtgcaaaaataatagtgtaatccttgctgatgaaatgggcctaggaaagaccatccagaccatatcattcctctcctacctgttccaccaacaccagctgtatggcccctttcttatagtcgtccctttatccaccctcacctcatggcagagagagtttgaaatctgggcaccagagattaacgtagtggtttacataggtgacctgatgagcagaaatacgatacgggaatatgaatggattcattcccaaaccaaaagattgaagttcaacgcacttataacaacatatgagatcctcttgaaagataagactgtgctgggcagtattaactgggcctttctgggagtggatgaagcccatcggttgaagaatgatgactctttattgtataaaactctgattgatttcaagtccaaccataggctcctgattacggggacccctcttcagaattccctcaaagagctctggtccttgctgcactttattatgccggagaagtttgaattttgggaagattttgaagaagaccatgggaaggggagagagaatggctaccagagtcttcataaggtgctagagcctttccttctccggagagtcaaaaaagatgtggagaaatcccttcctgctaaagtggaacagattctcagggtggagatgtcagcccttcagaaacagtattacaagtggattctgaccaggaattacaaggctcttgccaaaggaacaagaggcagcacatctggttttcttaatattgtgatggaactgaaaaaatgttgcaaccactgctatctgattaaaccccctgaagaaaatgaaagggaaaatggacaggagattcttctgtccctcataaggagcagtgggaagttgattttattagacaaactgttgacaagacttcgagaaagggggaatcgagtgcttatcttctctcagatggtgagaatgttggatatcctggctgaatacctaactattaaacactatcctttccagcgtctggatggttccatcaagggagaaatccgaaaacaggcactggaccacttcaatgcagatgggtctgaggacttctgtttcctgctctcgacaagggctggtggcctgggaatcaatttggcttcagcggacacagtcgtcatctttgactctgactggaacccccagaatgacttgcaggcacaagcccgagcgcatagaattggtcagaagaagcaggtaaatatttaccgcttagttacaaaggggactgtggaggaggagatcatagaacgggccaaaaagaagatggtattagatcatctggtgattcagcgcatggacaccactggccggacgatcctggaaaacaactcaggaaggtccaactcaaatccttttaataaagaagagctgacagctattttgaaatttggagcagaggatctcttcaaagaactggaaggggaggaatcagaacctcaggaaatggatatagatgaaattttgcggttggctgaaacgagagagaatgaagtgtcaacaagtgcaacagatgaacttctatcacagtttaaggttgccaactttgcaacaatggaagatgaagaagagctagaagagcgtcctcacaaggactgggatgagatcattccagaggaacaaaggaaaaaagtagaggaggaagagcggcagaaggagctagaagaaatttatatgctgcctcgaattcggagttccactaaaaaggctcagacaaatgacagtgactctgacactgagtctaagaggcaggcccagagatcctctgcttctgagagtgaaacggaagactctgatgatgacaagaagccaaagcgcagagggcgtccgaggagtgtgcggaaggacctcgtggagggatttactgatgcagagatccgaaggttcatcaaggcttataagaagtttggtctccctcttgaacggctggagtgcatagcacgtgatgctgagctggtagataagtcggtggcagatctgaagcgcctgggtgaactgatccacaacagctgtgtgtcagcaatgcaggaatacgaagagcagctgaaagaaaatgccagcgagggaaaaggaccagggaaaaggagaggtccaacaatcaagatatccggagttcaggttaatgtgaaatccattatccaacatgaagaggagtttgagatgctgcataaatctatccctgtggaccctgaagaaaaaaaaaaatactgcttaacctgtcgtgtcaaagctgcacattttgatgtagagtggggggtggaagatgattctcgcctgttgctggggatttatgaacatggctatggaaactgggagttaattaaaacagacccagagcttaaattaactgacaaaattctgccggtggagacagataaaaagcctcaggggaagcagctacagacccgagcggattacttgttgaagctgctcagaaagggtctggagaagaagggggctgtgacaggtggggaagaggccaaattaaagaagcggaagcctcgggtaaagaaggaaaacaaagtgcccaggctgaaagaggagcatggaattgagctttcatctcctaggcattcagataatccatcagaagagggagaagtgaaagatgatggcttggaaaaaagtccaatgaaaaaaaaacagaagaagaaagagaacaaggagaacaaggagaaacaaatgagttctaggaaagacaaagaaggggacaaggaaagaaagaagtcaaaagataagaaagagaagcctaaaagtggtgatgccaaatcttcgagtaaatcaaagcgatctcagggtcctgtccatattacagcaggaagtgaacctgtccccattggagaggatgaggatgatgatctggaccaggagacattcagcatatgtaaggagaggatgaggcccgtgaaaaaggcactgaaacagctcgacaaacctgacaaggggctcaacgtgcaagaacagctggaacacacccggaactgcctgctgaaaatcggagaccggatagccgagtgccttaaagcctactcagatcaggagcacatcaaactctggaggaggaacctatggatttttgtttccaagtttacagaatttgatgctcgaaaactgcataagttatacaagatggctcataagaaaaggtctcaagaagaagaggagcaaaagaagaaagacgacgtgactgggggtaagaaaccatttcgtccagaggcctcaggctccagccgggactctctgatatctcagtcccatacctcacacaaccttcaccctcagaagcctcatttgcctgcctcccatggcccacagatgcatggacacccaagagataactacaatcaccccaacaagagacacttcagtaatgcagatcgaggagactggcagagggaaagaaagttcaactatggtggtggcaacaacaatccaccatggggaagcgacaggcaccatcagtatgagcagcactggtacaaggaccaccattatggggaccggcgacatatggatgcccaccgttccggaagctatcgacccaacaacatgtccagaaagaggccttatgaccagtacagcagtgaccgagaccaccggggacacagagattattatgacaggtatgcaaaaggctgtgagacaccaggtgccaacctttgccaggagctgtttctagggagaaagtgacgtatacatgaatgtatttatctatcaaattactgaagatctcatcatgcatgtgtcagccacagcgaatcccatgtcttggttataggttttatgttttgttttctgggtcatagggagcacatttcacctgtgcaggaaaagagttttctgccgtcttttgaggaaatctagtgaagaggtcgccataaaatattagagtcaacaaccaaaattattaagctctgtgcgaggctgtcagccacactaggtatcagggatcccgagatgggtaccagcccacagtccttacctgccacgagcccataattgaagagtcaaagtcttctgaagctgcaccctctttacttcagtacaatgccaccagtagtacgatgagccaaagctttacattgtgagagtagcaagtccagggagagctaaagaggttttatctgtatttcctaatttcaaatcttggataatttaacctcatagcagctttggttttccctgggctgatgatgtgcgtcatttgcactgtaccttgaatttacagtgggaaaatttcatataaacgtgtcaaagtcgtgctttgtttttggaagatctggtaacagcagcccgcattagcagagagctgtagctgagtagctgccacctcgttgggagactgcccctcgctcccacccttctctattgtctggacccagtgggcatcttgccctgcgttcttctagtaggtctgtatttctatttgatgtcactttccttttgcctgaaggactttttctgctggtgataaactctttcagtgtttgtatatatgcctgaaaaagtattttgccttcatttttgaaagtagtttttgctgagtgtatacatttttggctttacagtttctttcagtgctttaaagatgtacctctgctatttacttgcattgttttgtgatgaaaaatctgtcatccttatctttgttcctctttacataatgttccttttaaaaaaaatcactgattatgatgtgccttggtgtatttttccttggtttcttgtgcttggaaatttttgaacttcttggatctgtgggtttattgtttccataaaatttggaaatttttacaatcttcttcaaatattttttctgatcccccactctctcttcttctttggagattctcattacacctatattagcttgcttgaagttgtctcacagctcacttgtattctgttgacttttaaaaaattatgctttctgtttcactgtggatagtttctattgctacctcttcaagttcactaatactttccttttcaatgtcaagactgctgtgaggcccatccagtgtactttgcattttatacattgtagttctaaaagttcggaaagttgtttttgggtctttttatatatgttctgtgtctaaccttttaaaacctggaacacagatataacaatggttttgatgtccttgtctgcgaatcttatcacttgggtcagtttcagttgatacctcctcactgtgggtcttgctcccctggtgctttctgtgcctagtaatttttgtcagatgccagatgtaacatttaccttgttgggtgctggatatttctgtattcctgtaagtattctggagctttgttatgagttgcaggttatttggaagcagtttcctttttcaggtcttgctgttaagattcgttaggtagaaccagagcagtgctcagtcaagggctaatgattgcccacccccaaggtaaagagcctcattgcactctacccaattgcgttagtctgttttgcaggaatacctgaggctgggtaatttatagagaaaagagttttatttggcgcacagttccgcaggctgtacaagcatagcaccagcatctggttggcttctggagaggcctcagggagcttttactcatggtggaaggtgaagtggcagtaggcgtcccatggcaagagagggagcaagagagagaggaggaggtgccagcctcttttaaagcaccagctctcacgtgaactcagagaactcactcattatcacaaggacagcaccaagccatttatgagggatctgcccaaacacctcccactacannnnggaagagcccgagcgtggctttatcttgcactcatgcaaaagaaactggcagattatctgaaagtgcctatagncaataancatctcttaagcgagttctatgagcctgaggctttaatgatggaggaagaagggatggtgattgttggtctgctggtgggactcaatgttctcgatgccaatctctgcttgaaaggagaagacttggattctcaggttggagtaatagatttttccctctaccttaaggatgtgcaggatcttgatggtggcaaggagcatgaaagaattactgatgtccttgatcaaaaaattatgtggaagaacttaaccggcacttgagctgcacagttggggatcttcaaaccaagatagatggcttggaaaagactaactcaaagcttcaagaagagctttcagctgcaacagaccgaatttgctcacttcaagaagaacagcagcagttaagagaacaaaatgaattaattcgagaaagaagtgaaaagagtgtagaga

SEQ ID NO: 458748 - DNA, 5458 bp, Homo sapiens
  misc_feature (5360)..(5360): n is a, c, g, or t
taaagaaggaaaaacttgaatttatattatgaaattaaggttttacttttatttagcaatcatttcacccattgggggattaatttttaaaaagattagtacttagctgagctttagattctctaagaattatccctttttcaaaatggcttgataaaacaccacttcctgtccagggaggaagttattttagctcaaggactgaaatatttagcagatctttagacaaaaggaacaaattacatttctctctggcttaaaaagggtgcttgagccagagggggttaagaagccctcccccctccccctgttggggtggtctggaggggcagggaggtgtgggggtgggggtccttaggctccctgggatggaggatctgtctctctctctctctctcctttttttttttttggtggagatgaaggggtgggtctatggtacatcacctgagttgtggggtaaatgtagagagtgtcaatcaaaggcagagctctcagagctgggaaggaggctctagatggcggctgtgccttagagagagcgcgctctgctccctgcctttgcctcactttacgcaactttccctaactttcgggcagcctcagggggcccccgtagccccctgcctttcctagggacttactggggtcgattcgaacctttttttgggagaaaagcagcttttaggagctttcttttcgtgccttgttggaaagaagcagccgtactgagagcccaggtcgttgttttttccagcttagaagccatggcgcacctccatttttgtgcgctctcctaatgaggttttttttctttcggacctgttttagtattaattattgctttatttttttgaccagttaacatatttgagggttattttatttatttttcgttttttaacggaggattttgcctttatttttaattatttgggatctgatatttttctactagtagataggactcttggtttggacatactacatggatcagtaaatacctgggcacaggacttcaaagcaaacacagattccccctcccccttaatatttaagaattaaaagatgatgagaaataaggacaaaagccaagaggaggacagttcgctacacagcaatgcatcgagtcactcagcctctgaagaagcttcgggttcagactcaggcagtcagtcggaaagtgagcagggaagtgatccaggaagtggacatggcagcgagtcgaacagcagctctgaatcttctgagagtcagtcggaatctgagagcgaatcagcaggttccaaatcccagccagtcctcccagaagccaaagagaagccagcctctaagaaggaacggatagctgatgtgaagaagatgtgggaagaatatcctgatgtttatggggtcaggcggtcaaaccgaagcagacaagaaccatcgcgatttaatattaaggaagaggcaagtagcgggtctgagagtgggagcccaaaaagaagaggccagaggcagctgaaaaaacaagaaaaatggaaacaggaaccctcagaagatgaacaggaacaaggcaccagtgcagagagtgagccagaacaaaaaaaagtaaaagccagaagacctgtccccagaagaacagtgcccaaacctcgtgttaaaaagcagccgaagactcagcgtggaaagagaaaaaagcaagattcttctgatgaggatgatgatgatgacgaagctcccaaaaggcagactcgtcgaagagcggctaaaaacgttagttacaaagaagatgatgactttgagactgactcagatgatctcattgaaatgactggagaaggagttgatgaacagcaagataatagtgaaactattgaaaaggtcttagattcaagactgggaaagaaaggagccactggagcatctactactgtatatgcgattgaagctaatggcgaccctagtggtgactttgacactgaaaaggatgaaggtgaaatccagtacctcatcaagtggaagggttggtcttacatccacagcacatgggagagtgaagaatccttacagcaacagaaagtgaagggcctaaaaaaactagagaacttcaagaaaaaagaggacgaaatcaaacaatggttagggaaagtttctcctgaagatgtagaatatttcaattgccaacaggagctggcttcagagttgaataaacagtatcagatagtagaaagagtaatagctgtgaagacaagtaaatctacattgggtcaaacagattttccagctcatagtcggaagccggcaccctcaaatgagcccgaatatctatgtaaatggatgggactcccctattcagagtgtagctgggaagatgaagccctcattggaaagaaattccagaattgcattgacagcttccacagtaggaacaactcaaaaaccatcccaacaagagaatgcaaggccctgaagcagagaccacgatttgtagctttaaagaaacaacctgcatatttaggaggggagaatctggaacttcgagattatcagctagaaggtctaaactggctagctcattcctggtgcaaaaataatagtgtaatccttgctgatgaaatgggcctaggaaagaccatccagaccatatcattcctctcctacctgttccaccaacaccagctgtatggcccctttcttatagtcgtccctttatccaccctcacctcatggcagagagagtttgaaatctgggcaccagagattaacgtagtggtttacataggtgacctgatgagcagaaatacgatacgggaatatgaatggattcattcccaaaccaaaagattgaagttcaacgcacttataacaacatatgagatcctcttgaaagataagactgtgctgggcagtattaactgggcctttctgggagtggatgaagcccatcggttgaagaatgatgactctttattgtataaaactctgattgatttcaagtccaaccataggctcctgattacggggacccctcttcagaattccctcaaagagctctggtccttgctgcactttattatgccggagaagtttgaattttgggaagattttgaagaagaccatgggaaggggagagagaatggctaccagagtcttcataaggtgctagagcctttccttctccggagagtcaaaaaagatgtggagaaatcccttcctgctaaagtggaacagattctcagggtggagatgtcagcccttcagaaacagtattacaagtggattctgaccaggaattacaaggctcttgccaaaggaacaagaggcagcacatctggttttcttaatattgtgatggaactgaaaaaatgttgcaaccactgctatctgattaaaccccctgaagaaaatgaaagggaaaatggacaggagattcttctgtccctcataaggagcagtgggaagttgattttattagacaaactgttgacaagacttcgagaaagggggaatcgagtgcttatcttctctcagatggtgagaatgttggatatcctggctgaatacctaactattaaacactatcctttccagcgtctggatggttccatcaagggagaaatccgaaaacaggcactggaccacttcaatgcagatgggtctgaggacttctgtttcctgctctcgacaagggctggtggcctgggaatcaatttggcttcagcggacacagtcgtcatctttgactctgactggaacccccagaatgacttgcaggcacaagcccgagcgcatagaattggtcagaagaagcaggtaaatatttaccgcttagttacaaaggggactgtggaggaggagatcatagaacgggccaaaaagaagatggtattagatcatctggtgattcagcgcatggacaccactggccggacgatcctggaaaacaactcaggaaggtccaactcaaatccttttaataaagaagagctgacagctattttgaaatttggagcagaggatctcttcaaagaactggaaggggaggaatcagaacctcaggaaatggatatagatgaaattttgcggttggctgaaacgagagagaatgaagtgtcaacaagtgcaacagatgaacttctatcacagtttaaggttgccaactttgcaacaatggaagatgaagaagagctagaagagcgtcctcacaaggactgggatgagatcattccagaggaacaaaggaaaaaagtagaggaggaagagcggcagaaggagctagaagaaatttatatgctgcctcgaattcggagttccactaaaaaggctcagacaaatgacagtgactctgacactgagtctaagaggcaggcccagagatcctctgcttctgagagtgaaacggaagactctgatgatgacaagaagccaaagcgcagagggcgtccgaggagtgtgcggaaggacctcgtggagggatttactgatgcagagatccgaaggttcatcaaggcttataagaagtttggtctccctcttgaacggctggagtgcatagcacgtgatgctgagctggtagataagtcggtggcagatctgaagcgcctgggtgaactgatccacaacagctgtgtgtcagcaatgcaggaatacgaagagcagctgaaagaaaatgccagcgagggaaaaggaccagggaaaaggagaggtccaacaatcaagatatccggagttcaggttaatgtgaaatccattatccaacatgaagaggagtttgagatgctgcataaatctatccctgtggaccctgaagaaaaaaaaaaatactgcttaacctgtcgtgtcaaagctgcacattttgatgtagagtggggggtggaagatgattctcgcctgttgctggggatttatgaacatggctatggaaactgggagttaattaaaacagacccagagcttaaattaactgacaaaattctgccggtggagacagataaaaagcctcaggggaagcagctacagacccgagcggattacttgttgaagctgctcagaaagggtctggagaagaagggggctgtgacaggtggggaagaggccaaattaaagaagcggaagcctcgggtaaagaaggaaaacaaagtgcccaggctgaaagaggagcatggaattgagctttcatctcctaggcattcagataatccatcagaagagggagaagtgaaagatgatggcttggaaaaaagtccaatgaaaaaaaaacagaagaagaaagagaacaaggagaacaaggagaaacaaatgagttctaggaaagacaaagaaggggacaaggaaagaaagaagtcaaaagataagaaagagaaggaaaaggaccaggnaaaaggagaggtccaacaatcaagatatccggagttcaggttaatgtgaaatccattatccaacatgaagaggagtttgagatgctgcataaatctat

SEQ ID NO: 458749 - DNA, 5335 bp, Homo sapiens
taaagaaggaaaaacttgaatttatattatgaaattaaggttttacttttatttagcaatcatttcacccattgggggattaatttttaaaaagattagtacttagctgagctttagattctctaagaattatccctttttcaaaatggcttgataaaacaccacttcctgtccagggaggaagttattttagctcaaggactgaaatatttagcagatctttagacaaaaggaacaaattacatttctctctggcttaaaaagggtgcttgagccagagggggttaagaagccctcccccctccccctgttggggtggtctggaggggcagggaggtgtgggggtgggggtccttaggctccctgggatggaggatctgtctctctctctctctctcctttttttttttttggtggagatgaaggggtgggtctatggtacatcacctgagttgtggggtaaatgtagagagtgtcaatcaaaggcagagctctcagagctgggaaggaggctctagatggcggctgtgccttagagagagcgcgctctgctccctgcctttgcctcactttacgcaactttccctaactttcgggcagcctcagggggcccccgtagccccctgcctttcctagggacttactggggtcgattcgaacctttttttgggagaaaagcagcttttaggagctttcttttcgtgccttgttggaaagaagcagccgtactgagagcccaggtcgttgttttttccagcttagaagccatggcgcacctccatttttgtgcgctctcctaatgaggttttttttctttcggacctgttttagtattaattattgctttatttttttgaccagttaacatatttgagggttattttatttatttttcgttttttaacggaggattttgcctttatttttaattatttgggatctgatatttttctactagtagataggactcttggtttggacatactacatggatcagtaaatacctgggcacaggacttcaaagcaaacacagattccccctcccccttaatatttaagaattaaaagatgatgagaaataaggacaaaagccaagaggaggacagttcgctacacagcaatgcatcgagtcactcagcctctgaagaagcttcgggttcagactcaggcagtcagtcggaaagtgagcagggaagtgatccaggaagtggacatggcagcgagtcgaacagcagctctgaatcttctgagagtcagtcggaatctgagagcgaatcagcaggttccaaatcccagccagtcctcccagaagccaaagagaagccagcctctaagaaggaacggatagctgatgtgaagaagatgtgggaagaatatcctgatgtttatggggtcaggcggtcaaaccgaagcagacaagaaccatcgcgatttaatattaaggaagaggcaagtagcgggtctgagagtgggagcccaaaaagaagaggccagaggcagctgaaaaaacaagaaaaatggaaacaggaaccctcagaagatgaacaggaacaaggcaccagtgcagagagtgagccagaacaaaaaaaagtaaaagccagaagacctgtccccagaagaacagtgcccaaacctcgtgttaaaaagcagccgaagactcagcgtggaaagagaaaaaagcaagattcttctgatgaggatgatgatgatgacgaagctcccaaaaggcagactcgtcgaagagcggctaaaaacgttagttacaaagaagatgatgactttgagactgactcagatgatctcattgaaatgactggagaaggagttgatgaacagcaagataatagtgaaactattgaaaaggtcttagattcaagactgggaaagaaaggagccactggagcatctactactgtatatgcgattgaagctaatggcgaccctagtggtgactttgacactgaaaaggatgaaggtgaaatccagtacctcatcaagtggaagggttggtcttacatccacagcacatgggagagtgaagaatccttacagcaacagaaagtgaagggcctaaaaaaactagagaacttcaagaaaaaagaggacgaaatcaaacaatggttagggaaagtttctcctgaagatgtagaatatttcaattgccaacaggagctggcttcagagttgaataaacagtatcagatagtagaaagagtaatagctgtgaagacaagtaaatctacattgggtcaaacagattttccagctcatagtcggaagccggcaccctcaaatgagcccgaatatctatgtaaatggatgggactcccctattcagagtgtagctgggaagatgaagccctcattggaaagaaattccagaattgcattgacagcttccacagtaggaacaactcaaaaaccatcccaacaagagaatgcaaggccctgaagcagagaccacgatttgtagctttaaagaaacaacctgcatatttaggaggggagaatctggaacttcgagattatcagctagaaggtctaaactggctagctcattcctggtgcaaaaataatagtgtaatccttgctgatgaaatgggcctaggaaagaccatccagaccatatcattcctctcctacctgttccaccaacaccagctgtatggcccctttcttatagtcgtccctttatccaccctcacctcatggcagagagagtttgaaatctgggcaccagagattaacgtagtggtttacataggtgacctgatgagcagaaatacgatacgggaatatgaatggattcattcccaaaccaaaagattgaagttcaacgcacttataacaacatatgagatcctcttgaaagataagactgtgctgggcagtattaactgggcctttctgggagtggatgaagcccatcggttgaagaatgatgactctttattgtataaaactctgattgatttcaagtccaaccataggctcctgattacggggacccctcttcagaattccctcaaagagctctggtccttgctgcactttattatgccggagaagtttgaattttgggaagattttgaagaagaccatgggaaggggagagagaatggctaccagagtcttcataaggtgctagagcctttccttctccggagagtcaaaaaagatgtggagaaatcccttcctgctaaagtggaacagattctcagggtggagatgtcagcccttcagaaacagtattacaagtggattctgaccaggaattacaaggctcttgccaaaggaacaagaggcagcacatctggttttcttaatattgtgatggaactgaaaaaatgttgcaaccactgctatctgattaaaccccctgaagaaaatgaaagggaaaatggacaggagattcttctgtccctcataaggagcagtgggaagttgattttattagacaaactgttgacaagacttcgagaaagggggaatcgagtgcttatcttctctcagatggtgagaatgttggatatcctggctgaatacctaactattaaacactatcctttccagcgtctggatggttccatcaagggagaaatccgaaaacaggcactggaccacttcaatgcagatgggtctgaggacttctgtttcctgctctcgacaagggctggtggcctgggaatcaatttggcttcagcggacacagtcgtcatctttgactctgactggaacccccagaatgacttgcaggcacaagcccgagcgcatagaattggtcagaagaagcaggtaaatatttaccgcttagttacaaaggggactgtggaggaggagatcatagaacgggccaaaaagaagatggtattagatcatctggtgattcagcgcatggacaccactggccggacgatcctggaaaacaactcaggaaggtccaactcaaatccttttaataaagaagagctgacagctattttgaaatttggagcagaggatctcttcaaagaactggaaggggaggaatcagaacctcaggaaatggatatagatgaaattttgcggttggctgaaacgagagagaatgaagtgtcaacaagtgcaacagatgaacttctatcacagtttaaggttgccaactttgcaacaatggaagatgaagaagagctagaagagcgtcctcacaaggactgggatgagatcattccagaggaacaaaggaaaaaagtagaggaggaagagcggcagaaggagctagaagaaatttatatgctgcctcgaattcggagttccactaaaaaggctcagacaaatgacagtgactctgacactgagtctaagaggcaggcccagagatcctctgcttctgagagtgaaacggaagactctgatgatgacaagaagccaaagcgcagagggcgtccgaggagtgtgcggaaggacctcgtggagggatttactgatgcagagatccgaaggttcatcaaggcttataagaagtttggtctccctcttgaacggctggagtgcatagcacgtgatgctgagctggtagataagtcggtggcagatctgaagcgcctgggtgaactgatccacaacagctgtgtgtcagcaatgcaggaatacgaagagcagctgaaagaaaatgccagcgagggaaaaggaccagggaaaaggagaggtccaacaatcaagatatccggagttcaggttaatgtgaaatccattatccaacatgaagaggagtttgagatgctgcataaatctatccctgtggaccctgaagaaaaaaaaaaatactgcttaacctgtcgtgtcaaagctgcacattttgatgtagagtggggggtggaagatgattctcgcctgttgctggggatttatgaacatggctatggaaactgggagttaattaaaacagacccagagcttaaattaactgacaaaattctgccggtggagacagataaaaagcctcaggggaagcagctacagacccgagcggattacttgttgaagctgctcagaaagggtctggagaagaagggggctgtgacaggtggggaagaggccaaattaaagaagcggaagcctcgggtaaagaaggaaaacaaagtgcccaggctgaaagaggagcatggaattgagctttcatctcctaggcattcagataatccatcagaagagggagaagtgaaagatgatggcttggaaaaaagtccaatgaaaaaaaaacagaagaagaaagagaacaaggaaggagggaaggaaggagggaaggaaggagggaaggaaggagggaaggaaggagggaaggaaggagggtaag

SEQ ID NO: 458750 - DNA, 8770 bp, Homo sapiens
  misc_feature (8251)..(8254): n is a, c, g, or t
  misc_feature (8328)..(8328): n is a, c, g, or t
  misc_feature (8335)..(8335): n is a, c, g, or t
taaagaaggaaaaacttgaatttatattatgaaattaaggttttacttttatttagcaatcatttcacccattgggggattaatttttaaaaagattagtacttagctgagctttagattctctaagaattatccctttttcaaaatggcttgataaaacaccacttcctgtccagggaggaagttattttagctcaaggactgaaatatttagcagatctttagacaaaaggaacaaattacatttctctctggcttaaaaagggtgcttgagccagagggggttaagaagccctcccccctccccctgttggggtggtctggaggggcagggaggtgtgggggtgggggtccttaggctccctgggatggaggatctgtctctctctctctctctcctttttttttttttggtggagatgaaggggtgggtctatggtacatcacctgagttgtggggtaaatgtagagagtgtcaatcaaaggcagagctctcagagctgggaaggaggctctagatggcggctgtgccttagagagagcgcgctctgctccctgcctttgcctcactttacgcaactttccctaactttcgggcagcctcagggggcccccgtagccccctgcctttcctagggacttactggggtcgattcgaacctttttttgggagaaaagcagcttttaggagctttcttttcgtgccttgttggaaagaagcagccgtactgagagcccaggtcgttgttttttccagcttagaagccatggcgcacctccatttttgtgcgctctcctaatgaggttttttttctttcggacctgttttagtattaattattgctttatttttttgaccagttaacatatttgagggttattttatttatttttcgttttttaacggaggattttgcctttatttttaattatttgggatctgatatttttctactagtagataggactcttggtttggacatactacatggatcagtcactcagcctctgaagaagcttcgggttcagactcaggcagtcagtcggaaagtgagcagggaagtgatccaggaagtggacatggcagcgagtcgaacagcagctctgaatcttctgagagtcagtcggaatctgagagcgaatcagcaggttccaaatcccagccagtcctcccagaagccaaagagaagccagcctctaagaaggaacggatagctgatgtgaagaagatgtgggaagaatatcctgatgtttatggggtcaggcggtcaaaccgaagcagacaagaaccatcgcgatttaatattaaggaagaggcaagtagcgggtctgagagtgggagcccaaaaagaagaggccagaggcagctgaaaaaacaagaaaaatggaaacaggaaccctcagaagatgaacaggaacaaggcaccagtgcagagagtgagccagaacaaaaaaaagtaaaagccagaagacctgtccccagaagaacagtgcccaaacctcgtgttaaaaagcagccgaagactcagcgtggaaagagaaaaaagcaagattcttctgatgaggatgatgatgatgacgaagctcccaaaaggcagactcgtcgaagagcggctaaaaacgttagttacaaagaagatgatgactttgagactgactcagatgatctcattgaaatgactggagaaggagttgatgaacagcaagataatagtgaaactattgaaaaggtcttagattcaagactgggaaagaaaggagccactggagcatctactactgtatatgcgattgaagctaatggcgaccctagtggtgactttgacactgaaaaggatgaaggtgaaatccagtacctcatcaagtggaagggttggtcttacatccacagcacatgggagagtgaagaatccttacagcaacagaaagtgaagggcctaaaaaaactagagaacttcaagaaaaaagaggacgaaatcaaacaatggttagggaaagtttctcctgaagatgtagaatatttcaattgccaacaggagctggcttcagagttgaataaacagtatcagatagtagaaagagtaatagctgtgaagacaagtaaatctacattgggtcaaacagattttccagctcatagtcggaagccggcaccctcaaatgagcccgaatatctatgtaaatggatgggactcccctattcagagtgtagctgggaagatgaagccctcattggaaagaaattccagaattgcattgacagcttccacagtaggaacaactcaaaaaccatcccaacaagagaatgcaaggccctgaagcagagaccacgatttgtagctttaaagaaacaacctgcatatttaggaggggagaatctggaacttcgagattatcagctagaaggtctaaactggctagctcattcctggtgcaaaaataatagtgtaatccttgctgatgaaatgggcctaggaaagaccatccagaccatatcattcctctcctacctgttccaccaacaccagctgtatggcccctttcttatagtcgtccctttatccaccctcacctcatggcagagagagtttgaaatctgggcaccagagattaacgtagtggtttacataggtgacctgatgagcagaaatacgatacgggaatatgaatggattcattcccaaaccaaaagattgaagttcaacgcacttataacaacatatgagatcctcttgaaagataagactgtgctgggcagtattaactgggcctttctgggagtggatgaagcccatcggttgaagaatgatgactctttattgtataaaactctgattgatttcaagtccaaccataggctcctgattacggggacccctcttcagaattccctcaaagagctctggtccttgctgcactttattatgccggagaagtttgaattttgggaagattttgaagaagaccatgggaaggggagagagaatggctaccagagtcttcataaggtgctagagcctttccttctccggagagtcaaaaaagatgtggagaaatcccttcctgctaaagtggaacagattctcagggtggagatgtcagcccttcagaaacagtattacaagtggattctgaccaggaattacaaggctcttgccaaaggaacaagaggcagcacatctggttttcttaatattgtgatggaactgaaaaaatgttgcaaccactgctatctgattaaaccccctgaagaaaatgaaagggaaaatggacaggagattcttctgtccctcataaggagcagtgggaagttgattttattagacaaactgttgacaagacttcgagaaagggggaatcgagtgcttatcttctctcagatggtgagaatgttggatatcctggctgaatacctaactattaaacactatcctttccagcgtctggatggttccatcaagggagaaatccgaaaacaggcactggaccacttcaatgcagatgggtctgaggacttctgtttcctgctctcgacaagggctggtggcctgggaatcaatttggcttcagcggacacagtcgtcatctttgactctgactggaacccccagaatgacttgcaggcacaagcccgagcgcatagaattggtcagaagaagcaggtaaatatttaccgcttagttacaaaggggactgtggaggaggagatcatagaacgggccaaaaagaagatggtattagatcatctggtgattcagcgcatggacaccactggccggacgatcctggaaaacaactcaggaaggtccaactcaaatccttttaataaagaagagctgacagctattttgaaatttggagcagaggatctcttcaaagaactggaaggggaggaatcagaacctcaggaaatggatatagatgaaattttgcggttggctgaaacgagagagaatgaagtgtcaacaagtgcaacagatgaacttctatcacagtttaaggttgccaactttgcaacaatggaagatgaagaagagctagaagagcgtcctcacaaggactgggatgagatcattccagaggaacaaaggaaaaaagtagaggaggaagagcggcagaaggagctagaagaaatttatatgctgcctcgaattcggagttccactaaaaaggctcagacaaatgacagtgactctgacactgagtctaagaggcaggcccagagatcctctgcttctgagagtgaaacggaagactctgatgatgacaagaagccaaagcgcagagggcgtccgaggagtgtgcggaaggacctcgtggagggatttactgatgcagagatccgaaggttcatcaaggcttataagaagtttggtctccctcttgaacggctggagtgcatagcacgtgatgctgagctggtagataagtcggtggcagatctgaagcgcctgggtgaactgatccacaacagctgtgtgtcagcaatgcaggaatacgaagagcagctgaaagaaaatgccagcgagggaaaaggaccagggaaaaggagaggtccaacaatcaagatatccggagttcaggttaatgtgaaatccattatccaacatgaagaggagtttgagatgctgcataaatctatccctgtggaccctgaagaaaaaaaaaaatactgcttaacctgtcgtgtcaaagctgcacattttgatgtagagtggggggtggaagatgattctcgcctgttgctggggatttatgaacatggctatggaaactgggagttaattaaaacagacccagagcttaaattaactgacaaaattctgccggtggagacagataaaaagcctcaggggaagcagctacagacccgagcggattacttgttgaagctgctcagaaagggtctggagaagaagggggctgtgacaggtggggaagaggccaaattaaagaagcggaagcctcgggtaaagaaggaaaacaaagtgcccaggctgaaagaggagcatggaattgagctttcatctcctaggcattcagataatccatcagaagagggagaagtgaaagatgatggcttggaaaaaagtccaatgaaaaaaaaacagaagaagaaagagaacaaggagaacaaggagaaacaaatgagttctaggaaagacaaagaaggggacaaggaaagaaagaagtcaaaagataagaaagagaagcctaaaagtggtgatgccaaatcttcgagtaaatcaaagcgatctcagggtcctgtccatattacagcaggaagtgaacctgtccccattggagaggatgaggatgatgatctggaccaggagacattcagcatatgtaaggagaggatgaggcccgtgaaaaaggcactgaaacagctcgacaaacctgacaaggggctcaacgtgcaagaacagctggaacacacccggaactgcctgctgaaaatcggagaccggatagccgagtgccttaaagcctactcagatcaggagcacatcaaactctggaggaggaacctatggatttttgtttccaagtttacagaatttgatgctcgaaaactgcataagttatacaagatggctcataagaaaaggtctcaagaagaagaggagcaaaagaagaaagacgacgtgactgggggtaagaaaccatttcgtccagaggcctcaggctccagccgggactctctgatatctcagtcccatacctcacacaaccttcaccctcagaagcctcatttgcctgcctcccatggcccacagatgcatggacacccaagagataactacaatcaccccaacaagagacacttcagtaatgcagatcgaggagactggcagagggaaagaaagttcaactatggtggtggcaacaacaatccaccatggggaagcgacaggcaccatcagtatgagcagcactggtacaaggaccaccattatggggaccggcgacatatggatgcccaccgttccggaagctatcgacccaacaacatgtccagaaagaggccttatgaccagtacagcagtgaccgagaccaccggggacacagagattattatgacaggtatgcaaaaggctgtgagacaccaggtgccaacctttgccaggagctgtttctagggagaaagtgacgtatacatgaatgtatttatctatcaaattactgaagatctcatcatgcatgtgtcagccacagcgaatcccatgtcttggttataggttttatgttttgttttctgggtcatagggagcacatttcacctgtgcaggaaaagagttttctgccgtcttttgaggaaatctagtgaagaggtcgccataaaatattagagtcaacaaccaaaattattaagctctgtgcgaggctgtcagccacactaggtatcagggatcccgagatgggtaccagcccacagtccttacctgccacgagcccataattgaagagtcaaagtcttctgaagctgcaccctctttacttcagtacaatgccaccagtagtacgatgagccaaagctttacattgtgagagtagcaagtccagggagagctaaagaggttttatctgtatttcctaatttcaaatcttggataatttaacctcatagcagctttggttttccctgggctgatgatgtgcgtcatttgcactgtaccttgaatttacagtgggaaaatttcatataaacgtgtcaaagtcgtgctttgtttttggaagatctggtaacagcagcccgcattagcagagagctgtagctgagtagctgccacctcgttgggagactgcccctcgctcccacccttctctattgtctggacccagtgggcatcttgccctgcgttcttctagtaggtctgtatttctatttgatgtcactttccttttgcctgaaggactttttctgctggtgataaactctttcagtgtttgtatatatgcctgaaaaagtattttgccttcatttttgaaagtagtttttgctgagtgtatacatttttggctttacagtttctttcagtgctttaaagatgtacctctgctatttacttgcattgttttgtgatgaaaaatctgtcatccttatctttgttcctctttacataatgttccttttaaaaaaaatcactgattatgatgtgccttggtgtatttttccttggtttcttgtgcttggaaatttttgaacttcttggatctgtgggtttattgtttccataaaatttggaaatttttacaatcttcttcaaatattttttctgatcccccactctctcttcttctttggagattctcattacacctatattagcttgcttgaagttgtctcacagctcacttgtattctgttgacttttaaaaaattatgctttctgtttcactgtggatagtttctattgctacctcttcaagttcactaatactttccttttcaatgtcaagactgctgtgaggcccatccagtgtactttgcattttatacattgtagttctaaaagttcggaaagttgtttttgggtctttttatatatgttctgtgtctaaccttttaaaacctggaacacagatataacaatggttttgatgtccttgtctgcgaatcttatcacttgggtcagtttcagttgatacctcctcactgtgggtcttgctcccctggtgctttctgtgcctagtaatttttgtcagatgccagatgtaacatttaccttgttgggtgctggatatttctgtattcctgtaagtattctggagctttgttatgagttgcaggttatttggaagcagtttcctttttcaggtcttgctgttaagattcgttaggtagaaccagagcagtgctcagtcaagggctaatgattgcccacccccaaggtaaagagcctcattgcactctacccaattgcgttagtctgttttgcaggaatacctgaggctgggtaatttatagagaaaagagttttatttggcgcacagttccgcaggctgtacaagcatagcaccagcatctggttggcttctggagaggcctcagggagcttttactcatggtggaaggtgaagtggcagtaggcgtcccatggcaagagagggagcaagagagagaggaggaggtgccagcctcttttaaagcaccagctctcacgtgaactcagagaactcactcattatcacaaggacagcaccaagccatttatgagggatctgcccaaacacctcccactacannnnggaagagcccgagcgtggctttatcttgcactcatgcaaaagaaactggcagattatctgaaagtgcctatagncaataancatctcttaagcgagttctatgagcctgaggctttaatgatggaggaagaagggatggtgattgttggtctgctggtgggactcaatgttctcgatgccaatctctgcttgaaaggagaagacttggattctcaggttggagtaatagatttttccctctaccttaaggatgtgcaggatcttgatggtggcaaggagcatgaaagaattactgatgtccttgatcaaaaaattatgtggaagaacttaaccggcacttgagctgcacagttggggatcttcaaaccaagatagatggcttggaaaagactaactcaaagcttcaagaagagctttcagctgcaacagaccgaatttgctcacttcaagaagaacagcagcagttaagagaacaaaatgaattaattcgagaaagaagtgaaaagagtgtagaga

SEQ ID NO: 458751 - DNA, 4895 bp, Homo sapiens
taaagaaggaaaaacttgaatttatattatgaaattaaggttttacttttatttagcaatcatttcacccattgggggattaatttttaaaaagattagtacttagctgagctttagattctctaagaattatccctttttcaaaatggcttgataaaacaccacttcctgtccagggaggaagttattttagctcaaggactgaaatatttagcagatctttagacaaaaggaacaaattacatttctctctggcttaaaaagggtgcttgagccagagggggttaagaagccctcccccctccccctgttggggtggtctggaggggcagggaggtgtgggggtgggggtccttaggctccctgggatggaggatctgtctctctctctctctctcctttttttttttttggtggagatgaaggggtgggtctatggtacatcacctgagttgtggggtaaatgtagagagtgtcaatcaaaggcagagctctcagagctgggaaggaggctctagatggcggctgtgccttagagagagcgcgctctgctccctgcctttgcctcactttacgcaactttccctaactttcgggcagcctcagggggcccccgtagccccctgcctttcctagggacttactggggtcgattcgaacctttttttgggagaaaagcagcttttaggagctttcttttcgtgccttgttggaaagaagcagccgtactgagagcccaggtcgttgttttttccagcttagaagccatggcgcacctccatttttgtgcgctctcctaatgaggttttttttctttcggacctgttttagtattaattattgctttatttttttgaccagttaacatatttgagggttattttatttatttttcgttttttaacggaggattttgcctttatttttaattatttgggatctgatatttttctactagtagataggactcttggtttggacatactacatggatcagtaaatacctgggcacaggacttcaaagcaaacacagattccccctcccccttaatatttaagaattaaaagatgatgagaaataaggacaaaagccaagaggaggacagttcgctacacagcaatgcatcgagtcactcagcctctgaagaagcttcgggttcagactcaggcagtcagtcggaaagtgagcagggaagtgatccaggaagtggacatggcagcgagtcgaacagcagctctgaatcttctgagagtcagtcggaatctgagagcgaatcagcaggttccaaatcccagccagtcctcccagaagccaaagagaagccagcctctaagaaggaacggatagctgatgtgaagaagatgtgggaagaatatcctgatgtttatggggtcaggcggtcaaaccgaagcagacaagaaccatcgcgatttaatattaaggaagaggcaagtagcgggtctgagagtgggagcccaaaaagaagaggccagaggcagctgaaaaaacaagaaaaatggaaacaggaaccctcagaagatgaacaggaacaaggcaccagtgcagagagtgagccagaacaaaaaaaagtaaaagccagaagacctgtccccagaagaacagtgcccaaacctcgtgttaaaaagcagccgaagactcagcgtggaaagagaaaaaagcaagattcttctgatgaggatgatgatgatgacgaagctcccaaaaggcagactcgtcgaagagcggctaaaaacgttagttacaaagaagatgatgactttgagactgactcagatgatctcattgaaatgactggagaaggagttgatgaacagcaagataatagtgaaactattgaaaaggtcttagattcaagactgggaaagaaaggagccactggagcatctactactgtatatgcgattgaagctaatggcgaccctagtggtgactttgacactgaaaaggatgaaggtgaaatccagtacctcatcaagtggaagggttggtcttacatccacagcacatgggagagtgaagaatccttacagcaacagaaagtgaagggcctaaaaaaactagagaacttcaagaaaaaagaggacgaaatcaaacaatggttagggaaagtttctcctgaagatgtagaatatttcaattgccaacaggagctggcttcagagttgaataaacagtatcagatagtagaaagagtaatagctgtgaagacaagtaaatctacattgggtcaaacagattttccagctcatagtcggaagccggcaccctcaaatgagcccgaatatctatgtaaatggatgggactcccctattcagagtgtagctgggaagatgaagccctcattggaaagaaattccagaattgcattgacagcttccacagtaggaacaactcaaaaaccatcccaacaagagaatgcaaggccctgaagcagagaccacgatttgtagctttaaagaaacaacctgcatatttaggaggggagaatctggaacttcgagattatcagctagaaggtctaaactggctagctcattcctggtgcaaaaataatagtgtaatccttgctgatgaaatgggcctaggaaagaccatccagaccatatcattcctctcctacctgttccaccaacaccagctgtatggcccctttcttatagtcgtccctttatccaccctcacctcatggcagagagagtttgaaatctgggcaccagagattaacgtagtggtttacataggtgacctgatgagcagaaatacgatacgggaatatgaatggattcattcccaaaccaaaagattgaagttcaacgcacttataacaacatatgagatcctcttgaaagataagactgtgctgggcagtattaactgggcctttctgggagtggatgaagcccatcggttgaagaatgatgactctttattgtataaaactctgattgatttcaagtccaaccataggctcctgattacggggacccctcttcagaattccctcaaagagctctggtccttgctgcactttattatgccggagaagtttgaattttgggaagattttgaagaagaccatgggaaggggagagagaatggctaccagagtcttcataaggtgctagagcctttccttctccggagagtcaaaaaagatgtggagaaatcccttcctgctaaagtggaacagattctcagggtggagatgtcagcccttcagaaacagtattacaagtggattctgaccaggaattacaaggctcttgccaaaggaacaagaggcagcacatctggttttcttaatattgtgatggaactgaaaaaatgttgcaaccactgctatctgattaaaccccctgaagaaaatgaaagggaaaatggacaggagattcttctgtccctcataaggagcagtgggaagttgattttattagacaaactgttgacaagacttcgagaaagggggaatcgagtgcttatcttctctcagatggtgagaatgttggatatcctggctgaatacctaactattaaacactatcctttccagcgtctggatggttccatcaagggagaaatccgaaaacaggcactggaccacttcaatgcagatgggtctgaggacttctgtttcctgctctcgacaagggctggtggcctgggaatcaatttggcttcagcggacacagtcgtcatctttgactctgactggaacccccagaatgacttgcaggcacaagcccgagcgcatagaattggtcagaagaagcaggtaaatatttaccgcttagttacaaaggggactgtggaggaggagatcatagaacgggccaaaaagaagatggtattagatcatctggtgattcagcgcatggacaccactggccggacgatcctggaaaacaactcaggaaggtccaactcaaatccttttaataaagaagagctgacagctattttgaaatttggagcagaggatctcttcaaagaactggaaggggaggaatcagaacctcaggaaatggatatagatgaaattttgcggttggctgaaacgagagagaatgaagtgtcaacaagtgcaacagatgaacttctatcacagtttaaggttgccaactttgcaacaatggaagatgaagaagagctagaagagcgtcctcacaaggactgggatgagatcattccagaggaacaaaggaaaaaagtagaggaggaagagcggcagaaggagctagaagaaatttatatgctgcctcgaattcggagttccactaaaaaggctcagacaaatgacagtgactctgacactgagtctaagaggcaggcccagagatcctctgcttctgagagtgaaacggaagactctgatgatgacaagaagccaaagcgcagagggcgtccgaggagtgtgcggaaggacctcgtggagggatttactgatgcagagatccgaaggttcatcaaggcttataagaagtttggtctccctcttgaacggctggagtgcatagcacgtgatgctgagctggtagataagtcggtggcagatctgaagcgcctgggtgaactgatccacaacagctgtgtgtcagcaatgcaggaatacgaagagcagctgaaagaaaatgccagcgagggaaaaggaccagggaaaaggagaggtccaacaatcaagatatccggagttcaggttaatgtgaaatccattatccaacatgaagaggagtttgagatgctgcataaatctatccctgtggaccctgaagaaaaaaaaaaatactgcttaacctgtcgtgtcaaagctgcacattttgatgtagagtggggggtggaagaagttgattgttgatgcatgaaaagctttttagg

SEQ ID NO: 458752 - DNA, 5433 bp, Homo sapiens
taaagaaggaaaaacttgaatttatattatgaaattaaggttttacttttatttagcaatcatttcacccattgggggattaatttttaaaaagattagtacttagctgagctttagattctctaagaattatccctttttcaaaatggcttgataaaacaccacttcctgtccagggaggaagttattttagctcaaggactgaaatatttagcagatctttagacaaaaggaacaaattacatttctctctggcttaaaaagggtgcttgagccagagggggttaagaagccctcccccctccccctgttggggtggtctggaggggcagggaggtgtgggggtgggggtccttaggctccctgggatggaggatctgtctctctctctctctctcctttttttttttttggtggagatgaaggggtgggtctatggtacatcacctgagttgtggggtaaatgtagagagtgtcaatcaaaggcagagctctcagagctgggaaggaggctctagatggcggctgtgccttagagagagcgcgctctgctccctgcctttgcctcactttacgcaactttccctaactttcgggcagcctcagggggcccccgtagccccctgcctttcctagggacttactggggtcgattcgaacctttttttgggagaaaagcagcttttaggagctttcttttcgtgccttgttggaaagaagcagccgtactgagagcccaggtcgttgttttttccagcttagaagccatggcgcacctccatttttgtgcgctctcctaatgaggttttttttctttcggacctgttttagtattaattattgctttatttttttgaccagttaacatatttgagggttattttatttatttttcgttttttaacggaggattttgcctttatttttaattatttgggatctgatatttttctactagtagataggactcttggtttggacatactacatggatcagtaaatacctgggcacaggacttcaaagcaaacacagattccccctcccccttaatatttaagaattaaaagatgatgagaaataaggacaaaagccaagaggaggacagttcgctacacagcaatgcatcgagtcactcagcctctgaagaagcttcgggttcagactcaggcagtcagtcggaaagtgagcagggaagtgatccaggaagtggacatggcagcgagtcgaacagcagctctgaatcttctgagagtcagtcggaatctgagagcgaatcagcaggttccaaatcccagccagtcctcccagaagccaaagagaagccagcctctaagaaggaacggatagctgatgtgaagaagatgtgggaagaatatcctgatgtttatggggtcaggcggtcaaaccgaagcagacaagaaccatcgcgatttaatattaaggaagaggcaagtagcgggtctgagagtgggagcccaaaaagaagaggccagaggcagctgaaaaaacaagaaaaatggaaacaggaaccctcagaagatgaacaggaacaaggcaccagtgcagagagtgagccagaacaaaaaaaagtaaaagccagaagacctgtccccagaagaacagtgcccaaacctcgtgttaaaaagcagccgaagactcagcgtggaaagagaaaaaagcaagattcttctgatgaggatgatgatgatgacgaagctcccaaaaggcagactcgtcgaagagcggctaaaaacgttagttacaaagaagatgatgactttgagactgactcagatgatctcattgaaatgactggagaaggagttgatgaacagcaagataatagtgaaactattgaaaaggtcttagattcaagactgggaaagaaaggagccactggagcatctactactgtatatgcgattgaagctaatggcgaccctagtggtgactttgacactgaaaaggatgaaggtgaaatccagtacctcatcaagtggaagggttggtcttacatccacagcacatgggagagtgaagaatccttacagcaacagaaagtgaagggcctaaaaaaactagagaacttcaagaaaaaagaggacgaaatcaaacaatggttagggaaagtttctcctgaagatgtagaatatttcaattgccaacaggagctggcttcagagttgaataaacagtatcagatagtagaaagagtaatagctgtgaagacaagtaaatctacattgggtcaaacagattttccagctcatagtcggaagccggcaccctcaaatgagcccgaatatctatgtaaatggatgggactcccctattcagagtgtagctgggaagatgaagccctcattggaaagaaattccagaattgcattgacagcttccacagtaggaacaactcaaaaaccatcccaacaagagaatgcaaggccctgaagcagagaccacgatttgtagctttaaagaaacaacctgcatatttaggaggggagaatctggaacttcgagattatcagctagaaggtctaaactggctagctcattcctggtgcaaaaataatagtgtaatccttgctgatgaaatgggcctaggaaagaccatccagaccatatcattcctctcctacctgttccaccaacaccagctgtatggcccctttcttatagtcgtccctttatccaccctcacctcatggcagagagagtttgaaatctgggcaccagagattaacgtagtggtttacataggtgacctgatgagcagaaatacgatacgggaatatgaatggattcattcccaaaccaaaagattgaagttcaacgcacttataacaacatatgagatcctcttgaaagataagactgtgctgggcagtattaactgggcctttctgggagtggatgaagcccatcggttgaagaatgatgactctttattgtataaaactctgattgatttcaagtccaaccataggctcctgattacggggacccctcttcagaattccctcaaagagctctggtccttgctgcactttattatgccggagaagtttgaattttgggaagattttgaagaagaccatgggaaggggagagagaatggctaccagagtcttcataaggtgctagagcctttccttctccggagagtcaaaaaagatgtggagaaatcccttcctgctaaagtggaacagattctcagggtggagatgtcagcccttcagaaacagtattacaagtggattctgaccaggaattacaaggctcttgccaaaggaacaagaggcagcacatctggttttcttaatattgtgatggaactgaaaaaatgttgcaaccactgctatctgattaaaccccctgaagaaaatgaaagggaaaatggacaggagattcttctgtccctcataaggagcagtgggaagttgattttattagacaaactgttgacaagacttcgagaaagggggaatcgagtgcttatcttctctcagatggtgagaatgttggatatcctggctgaatacctaactattaaacactatcctttccagcgtctggatggttccatcaagggagaaatccgaaaacaggcactggaccacttcaatgcagatgggtctgaggacttctgtttcctgctctcgacaagggctggtggcctgggaatcaatttggcttcagcggacacagtcgtcatctttgactctgactggaacccccagaatgacttgcaggcacaagcccgagcgcatagaattggtcagaagaagcaggtaaatatttaccgcttagttacaaaggggactgtggaggaggagatcatagaacgggccaaaaagaagatggtattagatcatctggtgattcagcgcatggacaccactggccggacgatcctggaaaacaactcaggaaggtccaactcaaatccttttaataaagaagagctgacagctattttgaaatttggagcagaggatctcttcaaagaactggaaggggaggaatcagaacctcaggaaatggatatagatgaaattttgcggttggctgaaacgagagagaatgaagtgtcaacaagtgcaacagatgaacttctatcacagtttaaggttgccaactttgcaacaatggaagatgaagaagagctagaagagcgtcctcacaaggactgggatgagatcattccagaggaacaaaggaaaaaagtagaggaggaagagcggcagaaggagctagaagaaatttatatgctgcctcgaattcggagttccactaaaaaggctcagacaaatgacagtgactctgacactgagtctaagaggcaggcccagagatcctctgcttctgagagtgaaacggaagactctgatgatgacaagaagccaaagcgcagagggcgtccgaggagtgtgcggaaggacctcgtggagggatttactgatgcagagatccgaaggttcatcaaggcttataagaagtttggtctccctcttgaacggctggagtgcatagcacgtgatgctgagctggtagataagtcggtggcagatctgaagcgcctgggtgaactgatccacaacagctgtgtgtcagcaatgcaggaatacgaagagcagctgaaagaaaatgccagcgagggaaaaggaccagggaaaaggagaggtccaacaatcaagatatccggagttcaggttaatgtgaaatccattatccaacatgaagaggagtttgagatgctgcataaatctatccctgtggaccctgaagaaaaaaaaaaatactgcttaacctgtcgtgtcaaagctgcacattttgatgtagagtggggggtggaagatgattctcgcctgttgctggggatttatgaacatggctatggaaactgggagttaattaaaacagacccagagcttaaattaactgacaaaattctgccggtggagacagataaaaagcctcaggggaagcagctacagacccgagcggattacttgttgaagctgctcagaaagggtctggagaagaagggggctgtgacaggtggggaagaggccaaattaaagaagcggaagcctcgggtaaagaaggaaaacaaagtgcccaggctgaaagaggagcatggaattgagctttcatctcctaggcattcagataatccatcagaagagggagaagtgaaagtatgaagtggggtttcggttgagggttatttatttattttagctatacttatcatgccagctggaataaaatcatctgaaatgtgtttggtttacgagtggattaaatggaaatagaatatgtaagtcttcgcttaatctgtcagcgaggatagtttaagtcagcaactgcaaatttgtacataatggaagtaaatgaaggggactatgacatttttgttgttgttg

SEQ ID NO: 458753 - DNA, 3220 bp, Homo sapiens
taaagaaggaaaaacttgaatttatattatgaaattaaggttttacttttatttagcaatcatttcacccattgggggattaatttttaaaaagattagtacttagctgagctttagattctctaagaattatccctttttcaaaatggcttgataaaacaccacttcctgtccagggaggaagttattttagctcaaggactgaaatatttagcagatctttagacaaaaggaacaaattacatttctctctggcttaaaaagggtgcttgagccagagggggttaagaagccctcccccctccccctgttggggtggtctggaggggcagggaggtgtgggggtgggggtccttaggctccctgggatggaggatctgtctctctctctctctctcctttttttttttttggtggagatgaaggggtgggtctatggtacatcacctgagttgtggggtaaatgtagagagtgtcaatcaaaggcagagctctcagagctgggaaggaggctctagatggcggctgtgccttagagagagcgcgctctgctccctgcctttgcctcactttacgcaactttccctaactttcgggcagcctcagggggcccccgtagccccctgcctttcctagggacttactggggtcgattcgaacctttttttgggagaaaagcagcttttaggagctttcttttcgtgccttgttggaaagaagcagccgtactgagagcccaggtcgttgttttttccagcttagaagccatggcgcacctccatttttgtgcgctctcctaatgaggttttttttctttcggacctgttttagtattaattattgctttatttttttgaccagttaacatatttgagggttattttatttatttttcgttttttaacggaggattttgcctttatttttaattatttgggatctgatatttttctactagtagataggactcttggtttggacatactacatggatcagtaaatacctgggcacaggacttcaaagcaaacacagattccccctcccccttaatatttaagaattaaaagatgatgagaaataaggacaaaagccaagaggaggacagttcgctacacagcaatgcatcgagtcactcagcctctgaagaagcttcgggttcagactcaggcagtcagtcggaaagtgagcagggaagtgatccaggaagtggacatggcagcgagtcgaacagcagctctgaatcttctgagagtcagtcggaatctgagagcgaatcagcaggttccaaatcccagccagtcctcccagaagccaaagagaagccagcctctaagaaggaacggatagctgatgtgaagaagatgtgggaagaatatcctgatgtttatggggtcaggcggtcaaaccgaagcagacaagaaccatcgcgatttaatattaaggaagaggcaagtagcgggtctgagagtgggagcccaaaaagaagaggccagaggcagctgaaaaaacaagaaaaatggaaacaggaaccctcagaagatgaacaggaacaaggcaccagtgcagagagtgagccagaacaaaaaaaagtaaaagccagaagacctgtccccagaagaacagtgcccaaacctcgtgttaaaaagcagccgaagactcagcgtggaaagagaaaaaagcaagattcttctgatgaggatgatgatgatgacgaagctcccaaaaggcagactcgtcgaagagcggctaaaaacgttagttacaaagaagatgatgactttgagactgactcagatgatctcattgaaatgactggagaaggagttgatgaacagcaagataatagtgaaactattgaaaaggtcttagattcaagactgggaaagaaaggagccactggagcatctactactgtatatgcgattgaagctaatggcgaccctagtggtgactttgacactgaaaaggatgaaggtgaaatccagtacctcatcaagtggaagggttggtcttacatccacagcacatgggagagtgaagaatccttacagcaacagaaagtgaagggcctaaaaaaactagagaacttcaagaaaaaagaggacgaaatcaaacaatggttagggaaagtttctcctgaagatgtagaatatttcaattgccaacaggagctggcttcagagttgaataaacagtatcagatagtagaaagagtaatagctgtgaagacaagtaaatctacattgggtcaaacagattttccagctcatagtcggaagccggcaccctcaaatgagcccgaatatctatgtaaatggatgggactcccctattcagagtgtagctgggaagatgaagccctcattggaaagaaattccagaattgcattgacagcttccacagtaggaacaactcaaaaaccatcccaacaagagaatgcaaggccctgaagcagagaccacgatttgtagctttaaagaaacaacctgcatatttaggaggggagaatctggaacttcgagattatcagctagaaggtctaaactggctagctcattcctggtgcaagtaggtagaaaaatatgagtgcaattttccttactgtttctggcttctttattgttagatgtcaagaattttttttttcttttttcacacccttattgtatctcaaccaagaaatctttatgctgcatattacagaaataaaagatgattgagagaaatgcttcctgggagtttttatgtatgtgtaataccattttattctgatctaaagaatactttatttcattatttggtgggtaatttgtcatagccagaaacctgtatcatcatatgttactcatgagtgtatatagcaagttaagtcactcaaatctttaatgtggaaggagttactcagaagaaagaagaagatgtctttttcacatgtattttctttctaggccagggaagcctttaaattaatttcctacagtagtgctgtagagagtgtgattcccctcccttcactccactccctacctatatagtctgtaggattatcctgttcagaggaaggttgaacctgtgaaagtatcctttttataagaccacgttaatcttgggggggtgaaaaaaagatgagacagtgatagcactggaggtttaaaggtacttttgggaagtacttacaaatttccttcaccaatttcaagtagttcctaattactaag

SEQ ID NO: 458754 - DNA, 2760 bp, Homo sapiens
taaagaaggaaaaacttgaatttatattatgaaattaaggttttacttttatttagcaatcatttcacccattgggggattaatttttaaaaagattagtacttagctgagctttagattctctaagaattatccctttttcaaaatggcttgataaaacaccacttcctgtccagggaggaagttattttagctcaaggactgaaatatttagcagatctttagacaaaaggaacaaattacatttctctctggcttaaaaagggtgcttgagccagagggggttaagaagccctcccccctccccctgttggggtggtctggaggggcagggaggtgtgggggtgggggtccttaggctccctgggatggaggatctgtctctctctctctctctcctttttttttttttggtggagatgaaggggtgggtctatggtacatcacctgagttgtggggtaaatgtagagagtgtcaatcaaaggcagagctctcagagctgggaaggaggctctagatggcggctgtgccttagagagagcgcgctctgctccctgcctttgcctcactttacgcaactttccctaactttcgggcagcctcagggggcccccgtagccccctgcctttcctagggacttactggggtcgattcgaacctttttttgggagaaaagcagcttttaggagctttcttttcgtgccttgttggaaagaagcagccgtactgagagcccaggtcgttgttttttccagcttagaagccatggcgcacctccatttttgtgcgctctcctaatgaggttttttttctttcggacctgttttagtattaattattgctttatttttttgaccagttaacatatttgagggttattttatttatttttcgttttttaacggaggattttgcctttatttttaattatttgggatctgatatttttctactagtagataggactcttggtttggacatactacatggatcagtaaatacctgggcacaggacttcaaagcaaacacagattccccctcccccttaatatttaagaattaaaagatgatgagaaataaggacaaaagccaagaggaggacagttcgctacacagcaatgcatcgagtcactcagcctctgaagaagcttcgggttcagactcaggcagtcagtcggaaagtgagcagggaagtgatccaggaagtggacatggcagcgagtcgaacagcagctctgaatcttctgagagtcagtcggaatctgagagcgaatcagcaggttccaaatcccagccagtcctcccagaagccaaagagaagccagcctctaagaaggaacggatagctgatgtgaagaagatgtgggaagaatatcctgatgtttatggggtcaggcggtcaaaccgaagcagacaagaaccatcgcgatttaatattaaggaagaggcaagtagcgggtctgagagtgggagcccaaaaagaagaggccagaggcagctgaaaaaacaagaaaaatggaaacaggaaccctcagaagatgaacaggaacaaggcaccagtgcagagagtgagccagaacaaaaaaaagtaaaagccagaagacctgtccccagaagaacagtgcccaaacctcgtgttaaaaagcagccgaagactcagcgtggaaagagaaaaaagcaagattcttctgatgaggatgatgatgatgacgaagctcccaaaaggcagactcgtcgaagagcggctaaaaacgttagttacaaagaagatgatgactttgagactgactcagatgatctcattgaaatgactggagaaggagttgatgaacagcaagataatagtgaaactattgaaaaggtcttagattcaagactgggaaagaaaggagccactggagcatctactactgtatatgcgattgaagctaatggcgaccctagtggtgactttgacactgaaaaggatgaaggtgaaatccagtacctcatcaagtggaagggttggtcttacatccacagcacatgggagagtgaagaatccttacagcaacagaaagtgaagggcctaaccacacacacctagagaacttcacgcacacacacgaggacgcacctcaaaccaatggttcagggacaagtttctccctgaagactgtagaactatgtacaacttggccgaaccagcgacgctcgggtttcacagacgttcgacacttaaaccacggatcccccatacgctagcacacgaacgtaactagtcgtgacacacacacatccaaccctacactagaggtcacacccagatactccagctcccatactcccgaacccggcacactcaacaataagccgaccaatactacagtccactatggcatgcgtacacccataatacaaaaatcgcatccttgcgacaacaacacacacaccaactggcactaaaaatatctaccacactgaccctcgtaaccaactcccaacatcaaggagacaactcaaaaactcatactcaacactaactaaacacacaccacatattactatcaaacgccacaacacggcgacatcacacataacactcacaaatacaaacaagataaatagacaaatatccacacacactcaacaaaccatcactaaccttacacatacagcaaaatcaataaccacttaacaaaacacataaccacccaaccaccaaccacaaccgacatacacacatcaccctctaacacctctactaccacaaacacga

SEQ ID NO: 458755 - DNA, 2612 bp, Homo sapiens
taaagaaggaaaaacttgaatttatattatgaaattaaggttttacttttatttagcaatcatttcacccattgggggattaatttttaaaaagattagtacttagctgagctttagattctctaagaattatccctttttcaaaatggcttgataaaacaccacttcctgtccagggaggaagttattttagctcaaggactgaaatatttagcagatctttagacaaaaggaacaaattacatttctctctggcttaaaaagggtgcttgagccagagggggttaagaagccctcccccctccccctgttggggtggtctggaggggcagggaggtgtgggggtgggggtccttaggctccctgggatggaggatctgtctctctctctctctctcctttttttttttttggtggagatgaaggggtgggtctatggtacatcacctgagttgtggggtaaatgtagagagtgtcaatcaaaggcagagctctcagagctgggaaggaggctctagatggcggctgtgccttagagagagcgcgctctgctccctgcctttgcctcactttacgcaactttccctaactttcgggcagcctcagggggcccccgtagccccctgcctttcctagggacttactggggtcgattcgaacctttttttgggagaaaagcagcttttaggagctttcttttcgtgccttgttggaaagaagcagccgtactgagagcccaggtcgttgttttttccagcttagaagccatggcgcacctccatttttgtgcgctctcctaatgaggttttttttctttcggacctgttttagtattaattattgctttatttttttgaccagttaacatatttgagggttattttatttatttttcgttttttaacggaggattttgcctttatttttaattatttgggatctgatatttttctactagtagataggactcttggtttggacatactacatggatcagtaaatacctgggcacaggacttcaaagcaaacacagattccccctcccccttaatatttaagaattaaaagatgatgagaaataaggacaaaagccaagaggaggacagttcgctacacagcaatgcatcgagtgagctatcaactttcttcctttttgtctttttttttgggggagaaacctcagcttacaattgtttaccttgacagacatggattgctgtctgttttattgtgtttttctaatttggattcgttttttaaagcatgaccttgagattgctaatatgccacaccctaattttttggtagcaatttatgaaagttgagttgtgacttaaggcctcttacagcagtcaaaaggtaaggtacctttattcaaaggggcctttactgtaatgtacagtttttctgtcagtaaatttcagtttttaggtttttgtactgcagaaaaatgaccttgtcggtttagccattgctgcattgcaccattttacatacaaggcaaattttttctttgaagaatccaggatatctaaacttgtaactgagggccatagagaagccttgtagtagtaaattatagtaaatagacatatcagaaagttatatgaatgaaaaaatgtacatttaaaaacaaaatcacttaaaggaccctttgactgatgcctctcagtttatatttttatgtgactttatatttcttttgatacacttgacattttaggaaattttgatgtgatttatcaaaacctttacttgatggttagagttcctgcatttatgaaatcaaatctgtaataacagaaatcctggaatactcttaatatatacttctattttgtgtttgttactgtgattaatatttgcagttgtatattttacatttaaattattttaaggtttgcatttgtatgcttaagacattgatttcctgttggtagatgtattttatcctcacaatttagatgtagctgctttaaatttattgatgtatttcgacagagtcgtctggaatgctttatcttctgaagcttaaaaatgtactgtttgtgcaaatcatgatctgtttcacattccttggagtaccttgttagtgatgaagtaataaagcctctaagatgtttttgttgtatgacctctgtatattaatttttaaaagtacatatgaatgcattttttgatgtgttctttatgcattttcatattataaattttaaatcatgcagtttaacaaggatgtgattcattatgtggttttccttcccaatttttacttttctaatttttataaataatacacttttctattaggctagtgaatttgaaagttttgaacatgatgtgttactaatatgctgaattctatttattttatttgactgaaagcatattgagccttgctttagaaaataagttaccaaatttttttgcattgagttgtcacccagtttgtagtgctgtcttaattgaattgcccatgtaaattactagattaaattgaggacagaaaagttttttactcatcctaagctgtttttttctggaaagtaatgacaatttgaagaaatgagaacctccagatatatttggcaaattattaaagattcagcact

SEQ ID NO: 458756 - DNA, 2123 bp, Homo sapiens
taaagaaggaaaaacttgaatttatattatgaaattaaggttttacttttatttagcaatcatttcacccattgggggattaatttttaaaaagattagtacttagctgagctttagattctctaagaattatccctttttcaaaatggcttgataaaacaccacttcctgtccagggaggaagttattttagctcaaggactgaaatatttagcagatctttagacaaaaggaacaaattacatttctctctggcttaaaaagggtgcttgagccagagggggttaagaagccctcccccctccccctgttggggtggtctggaggggcagggaggtgtgggggtgggggtccttaggctccctgggatggaggatctgtctctctctctctctctcctttttttttttttggtggagatgaaggggtgggtctatggtacatcacctgagttgtggggtaaatgtagagagtgtcaatcaaaggcagagctctcagagctgggaaggaggctctagatggcggctgtgccttagagagagcgcgctctgctccctgcctttgcctcactttacgcaactttccctaactttcgggcagcctcagggggcccccgtagccccctgcctttcctagggacttactggggtcgattcgaacctttttttgggagaaaagcagcttttaggagctttcttttcgtgccttgttggaaagaagcagccgtactgagagcccaggtcgttgttttttccagcttagaagccatggcgcacctccatttttgtgcgctctcctaatgaggttttttttctttcggacctgttttagtattaattattgctttatttttttgaccagttaacatatttgagggttattttatttatttttcgttttttaacggaggattttgcctttatttttaattatttgggatctgatatttttctactagtagataggactcttggtttggacatactacatggatcagtaaatacctgggcacaggacttcaaagcaaacacagattccccctcccccttaatatttaagaattaaaagatgatgagaaataaggacaaaagccaagaggaggacagttcgctacacagcaatgcatcgagtgagctatcaactttcttcctttttgtctttttttttgggggagaaacctcagcttacaattgtttaccttgacagacatggattgctgtctgttttattgtgtttttctaatttggattcgttttttaaagcatgaccttgagattgctaatatgccacaccctaattttttggtagcaatttatgaaagttgagttgtgacttaaggcctcttacagcagtcaaaaggtaaggtacctttattcaaaggggcctttactgtaatgtacagtttttctgtcagtaaatttcagtttttaggtttttgtactgcagaaaaatgaccttgtcggtttagccattgctgcattgcaccattttacatacaaggcaaattttttctttgaagaatccaggatatctaaacttgtaactgagggccatagagaagccttgtagtagtaaattatagtaaatagacatatcagaaagttatatgaatgaaaaaatgtacatttaaaaacaaaatcacttaaaggaccctttgactgatgcctctcagtttatatttttatgtgactttatatttcttttgatacacttgacattttaggaaattttgatgtgatttatcaaaacctttacttgatggttagagttcctgcatttatgaaatcaaatctgtaataacagaaatcctggaatactcttaatatatacttctattttgtgtttgttactgtgattaatatttgcagttgtatattttacatttaaattattttaaggtttgcatttgtatgcttaagacattgatttcctgttggtagatgtattttatcctcacaatttagatgtagctgctttaaatttattgatgtatttcgacagagtcgtctggaatgctttatcttctgaagcttaaaaatgtactgtttgtgcaaatcatgatctgtttcacattccttggagtaccttgttagtgatgaagtaataaagcctctaagatgttt

SEQ ID NO: 458757 - DNA, 2910 bp, Homo sapiens
taaagaaggaaaaacttgaatttatattatgaaattaaggttttacttttatttagcaatcatttcacccattgggggattaatttttaaaaagattagtacttagctgagctttagattctctaagaattatccctttttcaaaatggcttgataaaacaccacttcctgtccagggaggaagttattttagctcaaggactgaaatatttagcagatctttagacaaaaggaacaaattacatttctctctggcttaaaaagggtgcttgagccagagggggttaagaagccctcccccctccccctgttggggtggtctggaggggcagggaggtgtgggggtgggggtccttaggctccctgggatggaggatctgtctctctctctctctctcctttttttttttttggtggagatgaaggggtgggtctatggtacatcacctgagttgtggggtaaatgtagagagtgtcaatcaaaggcagagctctcagagctgggaaggaggctctagatggcggctgtgccttagagagagcgcgctctgctccctgcctttgcctcactttacgcaactttccctaactttcgggcagcctcagggggcccccgtagccccctgcctttcctagggacttactggggtcgattcgaacctttttttgggagaaaagcagcttttaggagctttcttttcgtgccttgttggaaagaagcagccgtactgagagcccaggtcgttgttttttccagcttagaagccatggcgcacctccatttttgtgcgctctcctaatgaggttttttttctttcggacctgttttagtattaattattgctttatttttttgaccagttaacatatttgagggttattttatttatttttcgttttttaacggaggattttgcctttatttttaattatttgggatctgatatttttctactagtagataggactcttggtttggacatactacatggatcaggtaagttcacgatcattggtgataattttaaagatttatttgtttaagtttgccttgttttctgtaaatacgagaaattcttggatgacgcaataagatacagagattgttatttgtatctagtgtgctactttgagaaagtttccttattgatagtgatgcttccactgttcggtttatcctggtgttttttcttttaaggaaaaaatagaaatatttagttttttggtgcttaccgttgttgtgttataacaatatcgttaacatcgtcaggactttgttcctgataataaaaagcatcgatagaagccgggaccttacctttctttcaacttttgacagtaaatacctgggcacaggacttcaaagcaaacacagattccccctcccccttaatatttaagaattaaaagatgatgagaaataaggactgagctatcaactttcttcctttttgtctttttttttgggggagaaacctcagcttacaattgtttaccttgacagacatggattgctgtctgttttattgtgtttttctaatttggattcgttttttaaagcatgaccttgagattgctaatatgccacaccctaattttttggtagcaatttatgaaagttgagttgtgacttaaggcctcttacagcagtcaaaaggtaaggtacctttattcaaaggggcctttactgtaatgtacagtttttctgtcagtaaatttcagtttttaggtttttgtactgcagaaaaatgaccttgtcggtttagccattgctgcattgcaccattttacatacaaggcaaattttttctttgaagaatccaggatatctaaacttgtaactgagggccatagagaagccttgtagtagtaaattatagtaaatagacatatcagaaagttatatgaatgaaaaaatgtacatttaaaaacaaaatcacttaaaggaccctttgactgatgcctctcagtttatatttttatgtgactttatatttcttttgatacacttgacattttaggaaattttgatgtgatttatcaaaacctttacttgatggttagagttcctgcatttatgaaatcaaatctgtaataacagaaatcctggaatactcttaatatatacttctattttgtgtttgttactgtgattaatatttgcagttgtatattttacatttaaattattttaaggtttgcatttgtatgcttaagacattgatttcctgttggtagatgtattttatcctcacaatttagatgtagctgctttaaatttattgatgtatttcgacagagtcgtctggaatgctttatcttctgaagcttaaaaatgtactgtttgtgcaaatcatgatctgtttcacattccttggagtaccttgttagtgatgaagtaataaagcctctaagatgtttttgttgtatgacctctgtatattaatttttaaaagtacatatgaatgcattttttgatgtgttctttatgcattttcatattataaattttaaatcatgcagtttaacaaggatgtgattcattatgtggttttccttcccaatttttacttttctaatttttataaataatacacttttctattaggctagtgaatttgaaagttttgaacatgatgtgttactaatatgctgaattctatttattttatttgactgaaagcatattgagccttgctttagaaaataagttaccaaatttttttgcattgagttgtcacccagtttgtagtgctgtcttaattgaattgcccatgtaaattactagattaaattgaggacagaaaagttttttactcatcctaagctgtttttttctggaaagtaatgacaatttgaagaaatgagaacctccagatatatttggcaaattattaaagattcagcact

SEQ ID NO: 458758 - DNA, 2954 bp, Homo sapiens
taaagaaggaaaaacttgaatttatattatgaaattaaggttttacttttatttagcaatcatttcacccattgggggattaatttttaaaaagattagtacttagctgagctttagattctctaagaattatccctttttcaaaatggcttgataaaacaccacttcctgtccagggaggaagttattttagctcaaggactgaaatatttagcagatctttagacaaaaggaacaaattacatttctctctggcttaaaaagggtgcttgagccagagggggttaagaagccctcccccctccccctgttggggtggtctggaggggcagggaggtgtgggggtgggggtccttaggctccctgggatggaggatctgtctctctctctctctctcctttttttttttttggtggagatgaaggggtgggtctatggtacatcacctgagttgtggggtaaatgtagagagtgtcaatcaaaggcagagctctcagagctgggaaggaggctctagatggcggctgtgccttagagagagcgcgctctgctccctgcctttgcctcactttacgcaactttccctaactttcgggcagcctcagggggcccccgtagccccctgcctttcctagggacttactggggtcgattcgaacctttttttgggagaaaagcagcttttaggagctttcttttcgtgccttgttggaaagaagcagccgtactgagagcccaggtcgttgttttttccagcttagaagccatggcgcacctccatttttgtgcgctctcctaatgaggttttttttctttcggacctgttttagtattaattattgctttatttttttgaccagttaacatatttgagggttattttatttatttttcgttttttaacggaggattttgcctttatttttaattatttgggatctgatatttttctactagtagataggactcttggtttggacatactacatggatcaggtaagttcacgatcattggtgataattttaaagatttatttgtttaagtttgccttgttttctgtaaatacgagaaattcttggatgacgcaataagatacagagattgttatttgtatctagtgtgctactttgagaaagtttccttattgatagtgatgcttccactgttcggtttatcctggtgttttttcttttaaggaaaaaatagaaatatttagttttttggtgcttaccgttgttgtgttataacaatatcgttaacatcgtcaggactttgttcctgataataaaaagcatcgatagaagccgggaccttacctttctttcaacttttgacagtaaatacctgggcacaggacttcaaagcaaacacagattccccctcccccttaatatttaagaattaaaagatgatgagaaataaggacaaaagccaagaggaggacagttcgctacacagcaatgcatcgagtgagctatcaactttcttcctttttgtctttttttttgggggagaaacctcagcttacaattgtttaccttgacagacatggattgctgtctgttttattgtgtttttctaatttggattcgttttttaaagcatgaccttgagattgctaatatgccacaccctaattttttggtagcaatttatgaaagttgagttgtgacttaaggcctcttacagcagtcaaaaggtaaggtacctttattcaaaggggcctttactgtaatgtacagtttttctgtcagtaaatttcagtttttaggtttttgtactgcagaaaaatgaccttgtcggtttagccattgctgcattgcaccattttacatacaaggcaaattttttctttgaagaatccaggatatctaaacttgtaactgagggccatagagaagccttgtagtagtaaattatagtaaatagacatatcagaaagttatatgaatgaaaaaatgtacatttaaaaacaaaatcacttaaaggaccctttgactgatgcctctcagtttatatttttatgtgactttatatttcttttgatacacttgacattttaggaaattttgatgtgatttatcaaaacctttacttgatggttagagttcctgcatttatgaaatcaaatctgtaataacagaaatcctggaatactcttaatatatacttctattttgtgtttgttactgtgattaatatttgcagttgtatattttacatttaaattattttaaggtttgcatttgtatgcttaagacattgatttcctgttggtagatgtattttatcctcacaatttagatgtagctgctttaaatttattgatgtatttcgacagagtcgtctggaatgctttatcttctgaagcttaaaaatgtactgtttgtgcaaatcatgatctgtttcacattccttggagtaccttgttagtgatgaagtaataaagcctctaagatgtttttgttgtatgacctctgtatattaatttttaaaagtacatatgaatgcattttttgatgtgttctttatgcattttcatattataaattttaaatcatgcagtttaacaaggatgtgattcattatgtggttttccttcccaatttttacttttctaatttttataaataatacacttttctattaggctagtgaatttgaaagttttgaacatgatgtgttactaatatgctgaattctatttattttatttgactgaaagcatattgagccttgctttagaaaataagttaccaaatttttttgcattgagttgtcacccagtttgtagtgctgtcttaattgaattgcccatgtaaattactagattaaattgaggacagaaaagttttttactcatcctaagctgtttttttctggaaagtaatgacaatttgaagaaatgagaacctccagatatatttggcaaattattaaagattcagcact

SEQ ID NO: 458759 - DNA, 4332 bp, Homo sapiens
  misc_feature (3813)..(3816): n is a, c, g, or t
  misc_feature (3890)..(3890): n is a, c, g, or t
  misc_feature (3897)..(3897): n is a, c, g, or t
gtcttgctttgtcacccagggtagagtgcagtggcgcgatctgggctcacagcagcttccacctcctgggttcaagtgattctcctgccgcagcctcccaaatagctaggattacaggcacctgccaccacacctggctagtttttgtatttttagaagagacagggtttcaccatgttggccaggctggtgtcaaactcctgacctcaggtgacaggtctgcctcagcctcccaaagtgctggaattatgagcatgagccactgtgcctggccaatacatacgtacatttaaatactagcaacctaatcagttattagctgactttgtataggtatataatctctttggtactcagtttccatccgtgaaatgagaataataaacttacgttgaagggttgctatgagaattaaatgagaggatatcagtaaagagcttctgcctctacagttgtaactggttattactggaaagtttagacttctctgagtcccttgaggctatttgcttgaaaacaagcttctaagtatagacagtgatgaaccactgggggcagtgcttctttttccagaaagtacataagtagatataaaatttgtagcaaaaattcatagccctgttttgtttcctaggatgatggcttggaaaaaagtccaatgaaaaaaaaacagaagaagaaagagaacaaggagaacaaggagaaacaaatgagttctaggaaagacaaagaaggggacaaggaaagaaagaagtcaaaagataagaaagagaagcctaaaagtggtgatgccaaatcttcgagtaaatcaaagcgatctcagggtcctgtccatattacagcaggaagtgaacctgtccccattggagaggatgaggatgatgatctggaccaggagacattcagcatatgtaaggagaggatgaggcccgtgaaaaaggcactgaaacagctcgacaaacctgacaaggggctcaacgtgcaagaacagctggaacacacccggaactgcctgctgaaaatcggagaccggatagccgagtgccttaaagcctactcagatcaggagcacatcaaactctggaggaggaacctatggatttttgtttccaagtttacagaatttgatgctcgaaaactgcataagttatacaagatggctcataagaaaaggtctcaagaagaagaggagcaaaagaagaaagacgacgtgactgggggtaagaaaccatttcgtccagaggcctcaggctccagccgggactctctgatatctcagtcccatacctcacacaaccttcaccctcagaagcctcatttgcctgcctcccatggcccacagatgcatggacacccaagagataactacaatcaccccaacaagagacacttcagtaatgcagatcgaggagactggcagagggaaagaaagttcaactatggtggtggcaacaacaatccaccatggggaagcgacaggcaccatcagtatgagcagcactggtacaaggaccaccattatggggaccggcgacatatggatgcccaccgttccggaagctatcgacccaacaacatgtccagaaagaggccttatgaccagtacagcagtgaccgagaccaccggggacacagagattattatgacaggtatgcaaaaggctgtgagacaccaggtgccaacctttgccaggagctgtttctagggagaaagtgacgtatacatgaatgtatttatctatcaaattactgaagatctcatcatgcatgtgtcagccacagcgaatcccatgtcttggttataggttttatgttttgttttctgggtcatagggagcacatttcacctgtgcaggaaaagagttttctgccgtcttttgaggaaatctagtgaagaggtcgccataaaatattagagtcaacaaccaaaattattaagctctgtgcgaggctgtcagccacactaggtatcagggatcccgagatgggtaccagcccacagtccttacctgccacgagcccataattgaagagtcaaagtcttctgaagctgcaccctctttacttcagtacaatgccaccagtagtacgatgagccaaagctttacattgtgagagtagcaagtccagggagagctaaagaggttttatctgtatttcctaatttcaaatcttggataatttaacctcatagcagctttggttttccctgggctgatgatgtgcgtcatttgcactgtaccttgaatttacagtgggaaaatttcatataaacgtgtcaaagtcgtgctttgtttttggaagatctggtaacagcagcccgcattagcagagagctgtagctgagtagctgccacctcgttgggagactgcccctcgctcccacccttctctattgtctggacccagtgggcatcttgccctgcgttcttctagtaggtctgtatttctatttgatgtcactttccttttgcctgaaggactttttctgctggtgataaactctttcagtgtttgtatatatgcctgaaaaagtattttgccttcatttttgaaagtagtttttgctgagtgtatacatttttggctttacagtttctttcagtgctttaaagatgtacctctgctatttacttgcattgttttgtgatgaaaaatctgtcatccttatctttgttcctctttacataatgttccttttaaaaaaaatcactgattatgatgtgccttggtgtatttttccttggtttcttgtgcttggaaatttttgaacttcttggatctgtgggtttattgtttccataaaatttggaaatttttacaatcttcttcaaatattttttctgatcccccactctctcttcttctttggagattctcattacacctatattagcttgcttgaagttgtctcacagctcacttgtattctgttgacttttaaaaaattatgctttctgtttcactgtggatagtttctattgctacctcttcaagttcactaatactttccttttcaatgtcaagactgctgtgaggcccatccagtgtactttgcattttatacattgtagttctaaaagttcggaaagttgtttttgggtctttttatatatgttctgtgtctaaccttttaaaacctggaacacagatataacaatggttttgatgtccttgtctgcgaatcttatcacttgggtcagtttcagttgatacctcctcactgtgggtcttgctcccctggtgctttctgtgcctagtaatttttgtcagatgccagatgtaacatttaccttgttgggtgctggatatttctgtattcctgtaagtattctggagctttgttatgagttgcaggttatttggaagcagtttcctttttcaggtcttgctgttaagattcgttaggtagaaccagagcagtgctcagtcaagggctaatgattgcccacccccaaggtaaagagcctcattgcactctacccaattgcgttagtctgttttgcaggaatacctgaggctgggtaatttatagagaaaagagttttatttggcgcacagttccgcaggctgtacaagcatagcaccagcatctggttggcttctggagaggcctcagggagcttttactcatggtggaaggtgaagtggcagtaggcgtcccatggcaagagagggagcaagagagagaggaggaggtgccagcctcttttaaagcaccagctctcacgtgaactcagagaactcactcattatcacaaggacagcaccaagccatttatgagggatctgcccaaacacctcccactacannnnggaagagcccgagcgtggctttatcttgcactcatgcaaaagaaactggcagattatctgaaagtgcctatagncaataancatctcttaagcgagttctatgagcctgaggctttaatgatggaggaagaagggatggtgattgttggtctgctggtgggactcaatgttctcgatgccaatctctgcttgaaaggagaagacttggattctcaggttggagtaatagatttttccctctaccttaaggatgtgcaggatcttgatggtggcaaggagcatgaaagaattactgatgtccttgatcaaaaaattatgtggaagaacttaaccggcacttgagctgcacagttggggatcttcaaaccaagatagatggcttggaaaagactaactcaaagcttcaagaagagctttcagctgcaacagaccgaatttgctcacttcaagaagaacagcagcagttaagagaacaaaatgaattaattcgagaaagaagtgaaaagagtgtagaga

SEQ ID NO: 458760 - DNA, 3369 bp, Homo sapiens
  misc_feature (2850)..(2853): n is a, c, g, or t
  misc_feature (2927)..(2927): n is a, c, g, or t
  misc_feature (2934)..(2934): n is a, c, g, or t
ggtacttagcagtaatggtcaaactcagcataaattccactgagttcccccagcaaatagcctaacagtggaatttatgagccttttttttgttaggaggtagtaaacgccagttcagaagtttaagaaggacaagaaggagctgtttagaggtgatagcctttattcttctctggggaattaagcctgggatcttgagcttctttggtttccttttactctttaggagcaaaagaagaaagacgacgtgactgggggtaagaaaccatttcgtccagaggcctcaggctccagccgggactctctgatatctcagtcccatacctcacacaaccttcaccctcagaagcctcatttgcctgcctcccatggcccacagatgcatggacacccaagagataactacaatcaccccaacaagagacacttcagtaatgcagatcgaggagactggcagagggaaagaaagttcaactatggtggtggcaacaacaatccaccatggggaagcgacaggcaccatcagtatgagcagcactggtacaaggaccaccattatggggaccggcgacatatggatgcccaccgttccggaagctatcgacccaacaacatgtccagaaagaggccttatgaccagtacagcagtgaccgagaccaccggggacacagagattattatgacaggtatgcaaaaggctgtgagacaccaggtgccaacctttgccaggagctgtttctagggagaaagtgacgtatacatgaatgtatttatctatcaaattactgaagatctcatcatgcatgtgtcagccacagcgaatcccatgtcttggttataggttttatgttttgttttctgggtcatagggagcacatttcacctgtgcaggaaaagagttttctgccgtcttttgaggaaatctagtgaagaggtcgccataaaatattagagtcaacaaccaaaattattaagctctgtgcgaggctgtcagccacactaggtatcagggatcccgagatgggtaccagcccacagtccttacctgccacgagcccataattgaagagtcaaagtcttctgaagctgcaccctctttacttcagtacaatgccaccagtagtacgatgagccaaagctttacattgtgagagtagcaagtccagggagagctaaagaggttttatctgtatttcctaatttcaaatcttggataatttaacctcatagcagctttggttttccctgggctgatgatgtgcgtcatttgcactgtaccttgaatttacagtgggaaaatttcatataaacgtgtcaaagtcgtgctttgtttttggaagatctggtaacagcagcccgcattagcagagagctgtagctgagtagctgccacctcgttgggagactgcccctcgctcccacccttctctattgtctggacccagtgggcatcttgccctgcgttcttctagtaggtctgtatttctatttgatgtcactttccttttgcctgaaggactttttctgctggtgataaactctttcagtgtttgtatatatgcctgaaaaagtattttgccttcatttttgaaagtagtttttgctgagtgtatacatttttggctttacagtttctttcagtgctttaaagatgtacctctgctatttacttgcattgttttgtgatgaaaaatctgtcatccttatctttgttcctctttacataatgttccttttaaaaaaaatcactgattatgatgtgccttggtgtatttttccttggtttcttgtgcttggaaatttttgaacttcttggatctgtgggtttattgtttccataaaatttggaaatttttacaatcttcttcaaatattttttctgatcccccactctctcttcttctttggagattctcattacacctatattagcttgcttgaagttgtctcacagctcacttgtattctgttgacttttaaaaaattatgctttctgtttcactgtggatagtttctattgctacctcttcaagttcactaatactttccttttcaatgtcaagactgctgtgaggcccatccagtgtactttgcattttatacattgtagttctaaaagttcggaaagttgtttttgggtctttttatatatgttctgtgtctaaccttttaaaacctggaacacagatataacaatggttttgatgtccttgtctgcgaatcttatcacttgggtcagtttcagttgatacctcctcactgtgggtcttgctcccctggtgctttctgtgcctagtaatttttgtcagatgccagatgtaacatttaccttgttgggtgctggatatttctgtattcctgtaagtattctggagctttgttatgagttgcaggttatttggaagcagtttcctttttcaggtcttgctgttaagattcgttaggtagaaccagagcagtgctcagtcaagggctaatgattgcccacccccaaggtaaagagcctcattgcactctacccaattgcgttagtctgttttgcaggaatacctgaggctgggtaatttatagagaaaagagttttatttggcgcacagttccgcaggctgtacaagcatagcaccagcatctggttggcttctggagaggcctcagggagcttttactcatggtggaaggtgaagtggcagtaggcgtcccatggcaagagagggagcaagagagagaggaggaggtgccagcctcttttaaagcaccagctctcacgtgaactcagagaactcactcattatcacaaggacagcaccaagccatttatgagggatctgcccaaacacctcccactacannnnggaagagcccgagcgtggctttatcttgcactcatgcaaaagaaactggcagattatctgaaagtgcctatagncaataancatctcttaagcgagttctatgagcctgaggctttaatgatggaggaagaagggatggtgattgttggtctgctggtgggactcaatgttctcgatgccaatctctgcttgaaaggagaagacttggattctcaggttggagtaatagatttttccctctaccttaaggatgtgcaggatcttgatggtggcaaggagcatgaaagaattactgatgtccttgatcaaaaaattatgtggaagaacttaaccggcacttgagctgcacagttggggatcttcaaaccaagatagatggcttggaaaagactaactcaaagcttcaagaagagctttcagctgcaacagaccgaatttgctcacttcaagaagaacagcagcagttaagagaacaaaatgaattaattcgagaaagaagtgaaaagagtgtagaga

SEQ ID NO: 458761 - DNA, 356 bp, Homo sapiens
gaaaaaagcaagattcttctgatgaggatgatgatgatgacgaagctcccaaaaggcagactcgtcgaagagcggctaaaaacgttaggtaagttgtaccccagaagtgtttcactggtgtgatgtgataaagtagttggttagattttggttctcataagtccggggttgtgcacttaatagataaaaataacagcctatgtcctgaagttgttttcagaaatctggttagctttcttgcaaaaagagtggtattgagccaaggggaataggaaaagagtagcaatagctcatttgaagccttcattcctaaaaaacaccacaagttcgtgtcctgtccaatggtgacttagtgg

SEQ ID NO: 458762 - DNA, 393 bp, Homo sapiens
caaaaaaagaaatttgagtttttatgctttgatgccgaatatgtgaattgtggctagcgttttaacatagtagcagtaagaacattttctcagacttgggcttttgtttttcaggccctgaagcagagaccacgatttgtagctttaaagaaacaacctgcatatttaggaggggagaatctggaacttcgagattatcagctagaaggtctaaactggctagctcattcctggtgcaagtaggtagaaaaatatgagtgcaattttccttactgtttctggcttctttattgttagatgtcaagaattttttttttcttttttcacacccttattgtatctcaaccaagaaatctttatgctgcatattacagaaataaaagatgattgaga

SEQ ID NO: 458763 - DNA, 309 bp, Homo sapiens
acttatttcaagttgaagtattttggtgcttcatccacaaagggagtcttcagataattgcattcttgggaagctttttaatatctggtgtaatatactctctttcaagtgtacttaatccttttgcagccactggagcatctactactgtatatgcgattgaagctaatggcgaccctagtggtgactttgacactgaaaaggatgaaggtgaaatccagtacctcatcaagtggaagggttggtcttacatccacagcacatgggagagtgaagaatccttacagcaacagaaagtgaagggcctaa

SEQ ID NO: 458764 - DNA, 334 bp, Homo sapiens
gtggttcaggcataagcataacagttccttttcctacaggtaaatatttaccgcttagttacaaaggggactgtggaggaggagatcatagaacgggccaaaaagaagatggtattagatcatctggtgattcagcgcatggacaccactggccggacgatcctggaaaacaactcaggaaggtccaagtaagtgccaggaagattgggaggtaggcagaatcaaattgattctacatcactgttggatataataggattttctaccacagacattagtctgttcattacctggaagatgccaggccagaaccacaaataggatagcattttca

SEQ ID NO: 458765 - DNA, 327 bp, Homo sapiens
cacttgttacagtgtgactttgcctcgatctttctcaggctcagacaaatgacagtgactctgacactgagtctaagaggcaggcccagagatcctctgcttctgagagtgaaacggaagactctgatgatgacaagaagccaaagcgcagagggcgtccgaggagtgtgcggaaggacctcgtggagggatttactgatgcagagatccgaaggttggtggaggctctgttctcactgagcttgtttgaaagtgcgtactgtaagtcttgggttgactggatcctggacatcgtgacagggtaggcagaggctaatacctacaaaa

SEQ ID NO: 458766 - DNA, 2723 bp, Homo sapiens
taaagaaggaaaaacttgaatttatattatgaaattaaggttttacttttatttagcaatcatttcacccattgggggattaatttttaaaaagattagtacttagctgagctttagattctctaagaattatccctttttcaaaatggcttgataaaacaccacttcctgtccagggaggaagttattttagctcaaggactgaaatatttagcagatctttagacaaaaggaacaaattacatttctctctggcttaaaaagggtgcttgagccagagggggttaagaagccctcccccctccccctgttggggtggtctggaggggcagggaggtgtgggggtgggggtccttaggctccctgggatggaggatctgtctctctctctctctctcctttttttttttttggtggagatgaaggggtgggtctatggtacatcacctgagttgtggggtaaatgtagagagtgtcaatcaaaggcagagctctcagagctgggaaggaggctctagatggcggctgtgccttagagagagcgcgctctgctccctgcctttgcctcactttacgcaactttccctaactttcgggcagcctcagggggcccccgtagccccctgcctttcctagggacttactggggtcgattcgaacctttttttgggagaaaagcagcttttaggagctttcttttcgtgccttgttggaaagaagcagccgtactgagagcccaggtcgttgttttttccagcttagaagccatggcgcacctccatttttgtgcgctctcctaatgaggttttttttctttcggacctgttttagtattaattattgctttatttttttgaccagttaacatatttgagggttattttatttatttttcgttttttaacggaggattttgcctttatttttaattatttgggatctgatatttttctactagtagataggactcttggtttggacatactacatggatcagtaaatacctgggcacaggacttcaaagcaaacacagattccccctcccccttaatatttaagaattaaaagatgatgagaaataaggacaaaagccaagaggaggacagttcgctacacagcaatgcatcgagtcactcagcctctgaagaagcttcgggttcagactcaggcagtcagtcggaaagtgagcagggaagtgatccaggaagtggacatggcagcgagtcgaacagcagctctgaatcttctgagagtcagtcggaatctgagagcgaatcagcaggttccaaatcccagccagtcctcccagaagccaaagagaagccagcctctaagaaggaacggatagctgatgtgaagaagatgtgggaagaatatcctgatgtttatggggtcaggcggtcaaaccgaagcagacaagaaccatcgcgatttaatattaaggaagaggcaagtagcgggtctgagagtgggagcccaaaaagaagaggccagaggcagctgaaaaaacaagaaaaatggaaacaggaaccctcagaagatgaacaggaacaaggcaccagtgcagagagtgagccagaacaaaaaaaagtaaaagccagaagacctgtccccagaagaacagtgcccaaacctcgtgttaaaaagcagccgaagactcagcgtggaaagagaaaaaagcaagattcttctgatgaggatgatgatgatgacgaagctcccaaaaggcagactcgtcgaagagcggctaaaaacgttagttacaaagaagatgatgactttgagactgactcagatgatctcattgaaatgactggagaaggagttgatgaacagcaagataatagtgaaactattgaaaaggtcttagattcaagactgggaaagaaaggagccactggagcatctactactgtatatgcgattgaagctaatggcgaccctagtggtgactttgacactgaaaaggatgaaggtgaaatccagtacctcatcaagtggaagggttggtcttacatccacagcacatgggagagtgaagaatccttacagcaacagaaagtgaagggcctaaaaaaactagagaacttcaagaaaaaagaggacgaaatcaaacaatggttagggaaagtttctcctgaagatgtagaatatttcaattgccaacaggagctggcttcagagttgaataaacagtatcagatagtagaaagagtaatagctgtgaagacaagtaaatctacattgggtcaaacagattttccagctcatagtcggaagccggcaccctcaaatgagcccgaatatctatgtaaatggatgggactcccctattcagagtgtagctgggaagatgaagccctcattggaaagaaattccagaattgcattgacagcttccacagtaggaacaactcaaaaaccatcccaacaagagaatgcaaggccctgaagcagagaccacgatttgtagctttaaagaaacaacctgcatatttaggaggggagaatctggaacttcgagattatcagctagaaggtctaaactggctagctcattcctggtgcaagtaggtagaaaaatatgagtgcaattttccttactgtttctggcttctttattgttagatgtcaagaattttttttttcttttttcacacccttattgtatctcaaccaagaaatctttatgctgcatattacagaaataaaagatgattgag

SEQ ID NO: 458767 - DNA, 9027 bp, Homo sapiens
  misc_feature (8508)..(8511): n is a, c, g, or t
  misc_feature (8585)..(8585): n is a, c, g, or t
  misc_feature (8592)..(8592): n is a, c, g, or t
taaagaaggaaaaacttgaatttatattatgaaattaaggttttacttttatttagcaatcatttcacccattgggggattaatttttaaaaagattagtacttagctgagctttagattctctaagaattatccctttttcaaaatggcttgataaaacaccacttcctgtccagggaggaagttattttagctcaaggactgaaatatttagcagatctttagacaaaaggaacaaattacatttctctctggcttaaaaagggtgcttgagccagagggggttaagaagccctcccccctccccctgttggggtggtctggaggggcagggaggtgtgggggtgggggtccttaggctccctgggatggaggatctgtctctctctctctctctcctttttttttttttggtggagatgaaggggtgggtctatggtacatcacctgagttgtggggtaaatgtagagagtgtcaatcaaaggcagagctctcagagctgggaaggaggctctagatggcggctgtgccttagagagagcgcgctctgctccctgcctttgcctcactttacgcaactttccctaactttcgggcagcctcagggggcccccgtagccccctgcctttcctagggacttactggggtcgattcgaacctttttttgggagaaaagcagcttttaggagctttcttttcgtgccttgttggaaagaagcagccgtactgagagcccaggtcgttgttttttccagcttagaagccatggcgcacctccatttttgtgcgctctcctaatgaggttttttttctttcggacctgttttagtattaattattgctttatttttttgaccagttaacatatttgagggttattttatttatttttcgttttttaacggaggattttgcctttatttttaattatttgggatctgatatttttctactagtagataggactcttggtttggacatactacatggatcagtaaatacctgggcacaggacttcaaagcaaacacagattccccctcccccttaatatttaagaattaaaagatgatgagaaataaggacaaaagccaagaggaggacagttcgctacacagcaatgcatcgagtcactcagcctctgaagaagcttcgggttcagactcaggcagtcagtcggaaagtgagcagggaagtgatccaggaagtggacatggcagcgagtcgaacagcagctctgaatcttctgagagtcagtcggaatctgagagcgaatcagcaggttccaaatcccagccagtcctcccagaagccaaagagaagccagcctctaagaaggaacggatagctgatgtgaagaagatgtgggaagaatatcctgatgtttatggggtcaggcggtcaaaccgaagcagacaagaaccatcgcgatttaatattaaggaagaggcaagtagcgggtctgagagtgggagcccaaaaagaagaggccagaggcagctgaaaaaacaagaaaaatggaaacaggaaccctcagaagatgaacaggaacaaggcaccagtgcagagagtgagccagaacaaaaaaaagtaaaagccagaagacctgtccccagaagaacagtgcccaaacctcgtgttaaaaagcagccgaagactcagcgtggaaagagaaaaaagcaagattcttctgatgaggatgatgatgatgacgaagctcccaaaaggcagactcgtcgaagagcggctaaaaacgttagttacaaagaagatgatgactttgagactgactcagatgatctcattgaaatgactggagaaggagttgatgaacagcaagataatagtgaaactattgaaaaggtcttagattcaagactgggaaagaaaggagccactggagcatctactactgtatatgcgattgaagctaatggcgaccctagtggtgactttgacactgaaaaggatgaaggtgaaatccagtacctcatcaagtggaagggttggtcttacatccacagcacatgggagagtgaagaatccttacagcaacagaaagtgaagggcctaaaaaaactagagaacttcaagaaaaaagaggacgaaatcaaacaatggttagggaaagtttctcctgaagatgtagaatatttcaattgccaacaggagctggcttcagagttgaataaacagtatcagatagtagaaagagtaatagctgtgaagacaagtaaatctacattgggtcaaacagattttccagctcatagtcggaagccggcaccctcaaatgagcccgaatatctatgtaaatggatgggactcccctattcagagtgtagctgggaagatgaagccctcattggaaagaaattccagaattgcattgacagcttccacagtaggaacaactcaaaaaccatcccaacaagagaatgcaaggccctgaagcagagaccacgatttgtagctttaaagaaacaacctgcatatttaggaggggagaatctggaacttcgagattatcagctagaaggtctaaactggctagctcattcctggtgcaaaaataatagtgtaatccttgctgatgaaatgggcctaggaaagaccatccagaccatatcattcctctcctacctgttccaccaacaccagctgtatggcccctttcttatagtcgtccctttatccaccctcacctcatggcagagagagtttgaaatctgggcaccagagattaacgtagtggtttacataggtgacctgatgagcagaaatacgatacgggaatatgaatggattcattcccaaaccaaaagattgaagttcaacgcacttataacaacatatgagatcctcttgaaagataagactgtgctgggcagtattaactgggcctttctgggagtggatgaagcccatcggttgaagaatgatgactctttattgtataaaactctgattgatttcaagtccaaccataggctcctgattacggggacccctcttcagaattccctcaaagagctctggtccttgctgcactttattatgccggagaagtttgaattttgggaagattttgaagaagaccatgggaaggggagagagaatggctaccagagtcttcataaggtgctagagcctttccttctccggagagtcaaaaaagatgtggagaaatcccttcctgctaaagtggaacagattctcagggtggagatgtcagcccttcagaaacagtattacaagtggattctgaccaggaattacaaggctcttgccaaaggaacaagaggcagcacatctggttttcttaatattgtgatggaactgaaaaaatgttgcaaccactgctatctgattaaaccccctgaagaaaatgaaagggaaaatggacaggagattcttctgtccctcataaggagcagtgggaagttgattttattagacaaactgttgacaagacttcgagaaagggggaatcgagtgcttatcttctctcagatggtgagaatgttggatatcctggctgaatacctaactattaaacactatcctttccagcgtctggatggttccatcaagggagaaatccgaaaacaggcactggaccacttcaatgcagatgggtctgaggacttctgtttcctgctctcgacaagggctggtggcctgggaatcaatttggcttcagcggacacagtcgtcatctttgactctgactggaacccccagaatgacttgcaggcacaagcccgagcgcatagaattggtcagaagaagcaggtaaatatttaccgcttagttacaaaggggactgtggaggaggagatcatagaacgggccaaaaagaagatggtattagatcatctggtgattcagcgcatggacaccactggccggacgatcctggaaaacaactcaggaaggtccaactcaaatccttttaataaagaagagctgacagctattttgaaatttggagcagaggatctcttcaaagaactggaaggggaggaatcagaacctcaggaaatggatatagatgaaattttgcggttggctgaaacgagagagaatgaagtgtcaacaagtgcaacagatgaacttctatcacagtttaaggttgccaactttgcaacaatggaagatgaagaagagctagaagagcgtcctcacaaggactgggatgagatcattccagaggaacaaaggaaaaaagtagaggaggaagagcggcagaaggagctagaagaaatttatatgctgcctcgaattcggagttccactaaaaaggctcagacaaatgacagtgactctgacactgagtctaagaggcaggcccagagatcctctgcttctgagagtgaaacggaagactctgatgatgacaagaagccaaagcgcagagggcgtccgaggagtgtgcggaaggacctcgtggagggatttactgatgcagagatccgaaggttcatcaaggcttataagaagtttggtctccctcttgaacggctggagtgcatagcacgtgatgctgagctggtagataagtcggtggcagatctgaagcgcctgggtgaactgatccacaacagctgtgtgtcagcaatgcaggaatacgaagagcagctgaaagaaaatgccagcgagggaaaaggaccagggaaaaggagaggtccaacaatcaagatatccggagttcaggttaatgtgaaatccattatccaacatgaagaggagtttgagatgctgcataaatctatccctgtggaccctgaagaaaaaaaaaaatactgcttaacctgtcgtgtcaaagctgcacattttgatgtagagtggggggtggaagatgattctcgcctgttgctggggatttatgaacatggctatggaaactgggagttaattaaaacagacccagagcttaaattaactgacaaactttaacctagctccagggattccctgctcctggaaggaggaaatccacgacggctgggatgctctagcagatgaagccacaagcccctcctacctgagttgttctaccctgttaacagcacagattctgccggtggagacagataaaaagcctcaggggaagcagctacagacccgagcggattacttgttgaagctgctcagaaagggtctggagaagaagggggctgtgacaggtggggaagaggccaaattaaagaagcggaagcctcgggtaaagaaggaaaacaaagtgcccaggctgaaagaggagcatggaattgagctttcatctcctaggcattcagataatccatcagaagagggagaagtgaaagatgatggcttggaaaaaagtccaatgaaaaaaaaacagaagaagaaagagaacaaggagaacaaggagaaacaaatgagttctaggaaagacaaagaaggggacaaggaaagaaagaagtcaaaagataagaaagagaagcctaaaagtggtgatgccaaatcttcgagtaaatcaaagcgatctcagggtcctgtccatattacagcaggaagtgaacctgtccccattggagaggatgaggatgatgatctggaccaggagacattcagcatatgtaaggagaggatgaggcccgtgaaaaaggcactgaaacagctcgacaaacctgacaaggggctcaacgtgcaagaacagctggaacacacccggaactgcctgctgaaaatcggagaccggatagccgagtgccttaaagcctactcagatcaggagcacatcaaactctggaggaggaacctatggatttttgtttccaagtttacagaatttgatgctcgaaaactgcataagttatacaagatggctcataagaaaaggtctcaagaagaagaggagcaaaagaagaaagacgacgtgactgggggtaagaaaccatttcgtccagaggcctcaggctccagccgggactctctgatatctcagtcccatacctcacacaaccttcaccctcagaagcctcatttgcctgcctcccatggcccacagatgcatggacacccaagagataactacaatcaccccaacaagagacacttcagtaatgcagatcgaggagactggcagagggaaagaaagttcaactatggtggtggcaacaacaatccaccatggggaagcgacaggcaccatcagtatgagcagcactggtacaaggaccaccattatggggaccggcgacatatggatgcccaccgttccggaagctatcgacccaacaacatgtccagaaagaggccttatgaccagtacagcagtgaccgagaccaccggggacacagagattattatgacaggtatgcaaaaggctgtgagacaccaggtgccaacctttgccaggagctgtttctagggagaaagtgacgtatacatgaatgtatttatctatcaaattactgaagatctcatcatgcatgtgtcagccacagcgaatcccatgtcttggttataggttttatgttttgttttctgggtcatagggagcacatttcacctgtgcaggaaaagagttttctgccgtcttttgaggaaatctagtgaagaggtcgccataaaatattagagtcaacaaccaaaattattaagctctgtgcgaggctgtcagccacactaggtatcagggatcccgagatgggtaccagcccacagtccttacctgccacgagcccataattgaagagtcaaagtcttctgaagctgcaccctctttacttcagtacaatgccaccagtagtacgatgagccaaagctttacattgtgagagtagcaagtccagggagagctaaagaggttttatctgtatttcctaatttcaaatcttggataatttaacctcatagcagctttggttttccctgggctgatgatgtgcgtcatttgcactgtaccttgaatttacagtgggaaaatttcatataaacgtgtcaaagtcgtgctttgtttttggaagatctggtaacagcagcccgcattagcagagagctgtagctgagtagctgccacctcgttgggagactgcccctcgctcccacccttctctattgtctggacccagtgggcatcttgccctgcgttcttctagtaggtctgtatttctatttgatgtcactttccttttgcctgaaggactttttctgctggtgataaactctttcagtgtttgtatatatgcctgaaaaagtattttgccttcatttttgaaagtagtttttgctgagtgtatacatttttggctttacagtttctttcagtgctttaaagatgtacctctgctatttacttgcattgttttgtgatgaaaaatctgtcatccttatctttgttcctctttacataatgttccttttaaaaaaaatcactgattatgatgtgccttggtgtatttttccttggtttcttgtgcttggaaatttttgaacttcttggatctgtgggtttattgtttccataaaatttggaaatttttacaatcttcttcaaatattttttctgatcccccactctctcttcttctttggagattctcattacacctatattagcttgcttgaagttgtctcacagctcacttgtattctgttgacttttaaaaaattatgctttctgtttcactgtggatagtttctattgctacctcttcaagttcactaatactttccttttcaatgtcaagactgctgtgaggcccatccagtgtactttgcattttatacattgtagttctaaaagttcggaaagttgtttttgggtctttttatatatgttctgtgtctaaccttttaaaacctggaacacagatataacaatggttttgatgtccttgtctgcgaatcttatcacttgggtcagtttcagttgatacctcctcactgtgggtcttgctcccctggtgctttctgtgcctagtaatttttgtcagatgccagatgtaacatttaccttgttgggtgctggatatttctgtattcctgtaagtattctggagctttgttatgagttgcaggttatttggaagcagtttcctttttcaggtcttgctgttaagattcgttaggtagaaccagagcagtgctcagtcaagggctaatgattgcccacccccaaggtaaagagcctcattgcactctacccaattgcgttagtctgttttgcaggaatacctgaggctgggtaatttatagagaaaagagttttatttggcgcacagttccgcaggctgtacaagcatagcaccagcatctggttggcttctggagaggcctcagggagcttttactcatggtggaaggtgaagtggcagtaggcgtcccatggcaagagagggagcaagagagagaggaggaggtgccagcctcttttaaagcaccagctctcacgtgaactcagagaactcactcattatcacaaggacagcaccaagccatttatgagggatctgcccaaacacctcccactacannnnggaagagcccgagcgtggctttatcttgcactcatgcaaaagaaactggcagattatctgaaagtgcctatagncaataancatctcttaagcgagttctatgagcctgaggctttaatgatggaggaagaagggatggtgattgttggtctgctggtgggactcaatgttctcgatgccaatctctgcttgaaaggagaagacttggattctcaggttggagtaatagatttttccctctaccttaaggatgtgcaggatcttgatggtggcaaggagcatgaaagaattactgatgtccttgatcaaaaaattatgtggaagaacttaaccggcacttgagctgcacagttggggatcttcaaaccaagatagatggcttggaaaagactaactcaaagcttcaagaagagctttcagctgcaacagaccgaatttgctcacttcaagaagaacagcagcagttaagagaacaaaatgaattaattcgagaaagaagtgaaaagagtgtagaga

SEQ ID NO: 458768 - DNA, 5831 bp, Homo sapiens
taaagaaggaaaaacttgaatttatattatgaaattaaggttttacttttatttagcaatcatttcacccattgggggattaatttttaaaaagattagtacttagctgagctttagattctctaagaattatccctttttcaaaatggcttgataaaacaccacttcctgtccagggaggaagttattttagctcaaggactgaaatatttagcagatctttagacaaaaggaacaaattacatttctctctggcttaaaaagggtgcttgagccagagggggttaagaagccctcccccctccccctgttggggtggtctggaggggcagggaggtgtgggggtgggggtccttaggctccctgggatggaggatctgtctctctctctctctctcctttttttttttttggtggagatgaaggggtgggtctatggtacatcacctgagttgtggggtaaatgtagagagtgtcaatcaaaggcagagctctcagagctgggaaggaggctctagatggcggctgtgccttagagagagcgcgctctgctccctgcctttgcctcactttacgcaactttccctaactttcgggcagcctcagggggcccccgtagccccctgcctttcctagggacttactggggtcgattcgaacctttttttgggagaaaagcagcttttaggagctttcttttcgtgccttgttggaaagaagcagccgtactgagagcccaggtcgttgttttttccagcttagaagccatggcgcacctccatttttgtgcgctctcctaatgaggttttttttctttcggacctgttttagtattaattattgctttatttttttgaccagttaacatatttgagggttattttatttatttttcgttttttaacggaggattttgcctttatttttaattatttgggatctgatatttttctactagtagataggactcttggtttggacatactacatggatcagtaaatacctgggcacaggacttcaaagcaaacacagattccccctcccccttaatatttaagaattaaaagatgatgagaaataaggacaaaagccaagaggaggacagttcgctacacagcaatgcatcgagtcactcagcctctgaagaagcttcgggttcagactcaggcagtcagtcggaaagtgagcagggaagtgatccaggaagtggacatggcagcgagtcgaacagcagctctgaatcttctgagagtcagtcggaatctgagagcgaatcagcaggttccaaatcccagccagtcctcccagaagccaaagagaagccagcctctaagaaggaacggatagctgatgtgaagaagatgtgggaagaatatcctgatgtttatggggtcaggcggtcaaaccgaagcagacaagaaccatcgcgatttaatattaaggaagaggcaagtagcgggtctgagagtgggagcccaaaaagaagaggccagaggcagctgaaaaaacaagaaaaatggaaacaggaaccctcagaagatgaacaggaacaaggcaccagtgcagagagtgagccagaacaaaaaaaagtaaaagccagaagacctgtccccagaagaacagtgcccaaacctcgtgttaaaaagcagccgaagactcagcgtggaaagagaaaaaagcaagattcttctgatgaggatgatgatgatgacgaagctcccaaaaggcagactcgtcgaagagcggctaaaaacgttagttacaaagaagatgatgactttgagactgactcagatgatctcattgaaatgactggagaaggagttgatgaacagcaagataatagtgaaactattgaaaaggtcttagattcaagactgggaaagaaaggagccactggagcatctactactgtatatgcgattgaagctaatggcgaccctagtggtgactttgacactgaaaaggatgaaggtgaaatccagtacctcatcaagtggaagggttggtcttacatccacagcacatgggagagtgaagaatccttacagcaacagaaagtgaagggcctaaaaaaactagagaacttcaagaaaaaagaggacgaaatcaaacaatggttagggaaagtttctcctgaagatgtagaatatttcaattgccaacaggagctggcttcagagttgaataaacagtatcagatagtagaaagagtaatagctgtgaagacaagtaaatctacattgggtcaaacagattttccagctcatagtcggaagccggcaccctcaaatgagcccgaatatctatgtaaatggatgggactcccctattcagagtgtagctgggaagatgaagccctcattggaaagaaattccagaattgcattgacagcttccacagtaggaacaactcaaaaaccatcccaacaagagaatgcaaggccctgaagcagagaccacgatttgtagctttaaagaaacaacctgcatatttaggaggggagaatctggaacttcgagattatcagctagaaggtctaaactggctagctcattcctggtgcaaaaataatagtgtaatccttgctgatgaaatgggcctaggaaagaccatccagaccatatcattcctctcctacctgttccaccaacaccagctgtatggcccctttcttatagtcgtccctttatccaccctcacctcatggcagagagagtttgaaatctgggcaccagagattaacgtagtggtttacataggtgacctgatgagcagaaatacgatacgggaatatgaatggattcattcccaaaccaaaagattgaagttcaacgcacttataacaacatatgagatcctcttgaaagataagactgtgctgggcagtattaactgggcctttctgggagtggatgaagcccatcggttgaagaatgatgactctttattgtataaaactctgattgatttcaagtccaaccataggctcctgattacggggacccctcttcagaattccctcaaagagctctggtccttgctgcactttattatgccggagaagtttgaattttgggaagattttgaagaagaccatgggaaggggagagagaatggctaccagagtcttcataaggtgctagagcctttccttctccggagagtcaaaaaagatgtggagaaatcccttcctgctaaagtggaacagattctcagggtggagatgtcagcccttcagaaacagtattacaagtggattctgaccaggaattacaaggctcttgccaaaggaacaagaggcagcacatctggttttcttaatattgtgatggaactgaaaaaatgttgcaaccactgctatctgattaaaccccctgaagaaaatgaaagggaaaatggacaggagattcttctgtccctcataaggagcagtgggaagttgattttattagacaaactgttgacaagacttcgagaaagggggaatcgagtgcttatcttctctcagatggtgagaatgttggatatcctggctgaatacctaactattaaacactatcctttccagcgtctggatggttccatcaagggagaaatccgaaaacaggcactggaccacttcaatgcagatgggtctgaggacttctgtttcctgctctcgacaagggctggtggcctgggaatcaatttggcttcagcggacacagtcgtcatctttgactctgactggaacccccagaatgacttgcaggcacaagcccgagcgcatagaattggtcagaagaagcaggtaaatatttaccgcttagttacaaaggggactgtggaggaggagatcatagaacgggccaaaaagaagatggtattagatcatctggtgattcagcgcatggacaccactggccggacgatcctggaaaacaactcaggaaggtccaactcaaatccttttaataaagaagagctgacagctattttgaaatttggagcagaggatctcttcaaagaactggaaggggaggaatcagaacctcaggaaatggatatagatgaaattttgcggttggctgaaacgagagagaatgaagtgtcaacaagtgcaacagatgaacttctatcacagtttaaggttgccaactttgcaacaatggaagatgaagaagagctagaagagcgtcctcacaaggactgggatgagatcattccagaggaacaaaggaaaaaagtagaggaggaagagcggcagaaggagctagaagaaatttatatgctgcctcgaattcggagttccactaaaaaggctcagacaaatgacagtgactctgacactgagtctaagaggcaggcccagagatcctctgcttctgagagtgaaacggaagactctgatgatgacaagaagccaaagcgcagagggcgtccgaggagtgtgcggaaggacctcgtggagggatttactgatgcagagatccgaaggttcatcaaggcttataagaagtttggtctccctcttgaacggctggagtgcatagcacgtgatgctgagctggtagataagtcggtggcagatctgaagcgcctgggtgaactgatccacaacagctgtgtgtcagcaatgcaggaatacgaagagcagctgaaagaaaatgccagcgagggaaaaggaccagggaaaaggagaggtccaacaatcaagatatccggagttcaggttaatgtgaaatccattatccaacatgaagaggagtttgagatgctgcataaatctatccctgtggaccctgaagaaaaaaaaaaatactgcttaacctgtcgtgtcaaagctgcacattttgatgtagagtggggggtggaagatgattctcgcctgttgctggggatttatgaacatggctatggaaactgggagttaattaaaacagacccagagcttaaattaactgacaaaattctgccggtggagacagataaaaagcctcaggggaagcagctacagacccgagcggattacttgttgaagctgctcagaaagggtctggagaagaagggggctgtgacaggtggggaagaggccaaattaaagaagcggaagcctcgggtaaagaaggaaaacaaagtgcccaggctgaaagaggagcatggaattgagctttcatctcctaggcattcagataatccatcagaagagggagaagtgaaagatgatggcttggaaaaaagtccaatgaaaaaaaaacagaagaagaaagagaacaaggagaacaaggagaaacaaatgagttctaggaaagacaaagaaggggacaaggaaagaaagaagtcaaaagataagaaagagaagcctaaaagtggtgatgccaaatcttcgagtaaatcaaagcgatctcagggtcctgtccatattacagcaggaagtgaacctgtccccattggagaggatgaggatgatgatctggaccaggagacattcagcatatgtaaggagaggatgaggcccgtgaaaaaggcactgaaacagctcgacaaacctgacaaggggctcaacgtgcaagaacagctggaacacacccggaactgcctgctgaaaatcggagaccggatagccgagtgccttaaagcctactcagatcaggagcacatcaaactctggaggaggaacctatggatttttgtttccaagtttacagaatttgatgctcgaaaactgcataagttatacaagatggctcataagaaaaggtctcaagaagaagaggagcaaaagaagaaagacactccgatttccggatttactgggatcctctgaacgactatgcccactaatca

SEQ ID NO: 458769 - DNA, 5867 bp, Homo sapiens
taaagaaggaaaaacttgaatttatattatgaaattaaggttttacttttatttagcaatcatttcacccattgggggattaatttttaaaaagattagtacttagctgagctttagattctctaagaattatccctttttcaaaatggcttgataaaacaccacttcctgtccagggaggaagttattttagctcaaggactgaaatatttagcagatctttagacaaaaggaacaaattacatttctctctggcttaaaaagggtgcttgagccagagggggttaagaagccctcccccctccccctgttggggtggtctggaggggcagggaggtgtgggggtgggggtccttaggctccctgggatggaggatctgtctctctctctctctctcctttttttttttttggtggagatgaaggggtgggtctatggtacatcacctgagttgtggggtaaatgtagagagtgtcaatcaaaggcagagctctcagagctgggaaggaggctctagatggcggctgtgccttagagagagcgcgctctgctccctgcctttgcctcactttacgcaactttccctaactttcgggcagcctcagggggcccccgtagccccctgcctttcctagggacttactggggtcgattcgaacctttttttgggagaaaagcagcttttaggagctttcttttcgtgccttgttggaaagaagcagccgtactgagagcccaggtcgttgttttttccagcttagaagccatggcgcacctccatttttgtgcgctctcctaatgaggttttttttctttcggacctgttttagtattaattattgctttatttttttgaccagttaacatatttgagggttattttatttatttttcgttttttaacggaggattttgcctttatttttaattatttgggatctgatatttttctactagtagataggactcttggtttggacatactacatggatcagtaaatacctgggcacaggacttcaaagcaaacacagattccccctcccccttaatatttaagaattaaaagatgatgagaaataaggacaaaagccaagaggaggacagttcgctacacagcaatgcatcgagtcactcagcctctgaagaagcttcgggttcagactcaggcagtcagtcggaaagtgagcagggaagtgatccaggaagtggacatggcagcgagtcgaacagcagctctgaatcttctgagagtcagtcggaatctgagagcgaatcagcaggttccaaatcccagccagtcctcccagaagccaaagagaagccagcctctaagaaggaacggatagctgatgtgaagaagatgtgggaagaatatcctgatgtttatggggtcaggcggtcaaaccgaagcagacaagaaccatcgcgatttaatattaaggaagaggcaagtagcgggtctgagagtgggagcccaaaaagaagaggccagaggcagctgaaaaaacaagaaaaatggaaacaggaaccctcagaagatgaacaggaacaaggcaccagtgcagagagtgagccagaacaaaaaaaagtaaaagccagaagacctgtccccagaagaacagtgcccaaacctcgtgttaaaaagcagccgaagactcagcgtggaaagagaaaaaagcaagattcttctgatgaggatgatgatgatgacgaagctcccaaaaggcagactcgtcgaagagcggctaaaaacgttagttacaaagaagatgatgactttgagactgactcagatgatctcattgaaatgactggagaaggagttgatgaacagcaagataatagtgaaactattgaaaaggtcttagattcaagactgggaaagaaaggagccactggagcatctactactgtatatgcgattgaagctaatggcgaccctagtggtgactttgacactgaaaaggatgaaggtgaaatccagtacctcatcaagtggaagggttggtcttacatccacagcacatgggagagtgaagaatccttacagcaacagaaagtgaagggcctaaaaaaactagagaacttcaagaaaaaagaggacgaaatcaaacaatggttagggaaagtttctcctgaagatgtagaatatttcaattgccaacaggagctggcttcagagttgaataaacagtatcagatagtagaaagagtaatagctgtgaagacaagtaaatctacattgggtcaaacagattttccagctcatagtcggaagccggcaccctcaaatgagcccgaatatctatgtaaatggatgggactcccctattcagagtgtagctgggaagatgaagccctcattggaaagaaattccagaattgcattgacagcttccacagtaggaacaactcaaaaaccatcccaacaagagaatgcaaggccctgaagcagagaccacgatttgtagctttaaagaaacaacctgcatatttaggaggggagaatctggaacttcgagattatcagctagaaggtctaaactggctagctcattcctggtgcaaaaataatagtgtaatccttgctgatgaaatgggcctaggaaagaccatccagaccatatcattcctctcctacctgttccaccaacaccagctgtatggcccctttcttatagtcgtccctttatccaccctcacctcatggcagagagagtttgaaatctgggcaccagagattaacgtagtggtttacataggtgacctgatgagcagaaatacgatacgggaatatgaatggattcattcccaaaccaaaagattgaagttcaacgcacttataacaacatatgagatcctcttgaaagataagactgtgctgggcagtattaactgggcctttctgggagtggatgaagcccatcggttgaagaatgatgactctttattgtataaaactctgattgatttcaagtccaaccataggctcctgattacggggacccctcttcagaattccctcaaagagctctggtccttgctgcactttattatgccggagaagtttgaattttgggaagattttgaagaagaccatgggaaggggagagagaatggctaccagagtcttcataaggtgctagagcctttccttctccggagagtcaaaaaagatgtggagaaatcccttcctgctaaagtggaacagattctcagggtggagatgtcagcccttcagaaacagtattacaagtggattctgaccaggaattacaaggctcttgccaaaggaacaagaggcagcacatctggttttcttaatattgtgatggaactgaaaaaatgttgcaaccactgctatctgattaaaccccctgaagaaaatgaaagggaaaatggacaggagattcttctgtccctcataaggagcagtgggaagttgattttattagacaaactgttgacaagacttcgagaaagggggaatcgagtgcttatcttctctcagatggtgagaatgttggatatcctggctgaatacctaactattaaacactatcctttccagcgtctggatggttccatcaagggagaaatccgaaaacaggcactggaccacttcaatgcagatgggtctgaggacttctgtttcctgctctcgacaagggctggtggcctgggaatcaatttggcttcagcggacacagtcgtcatctttgactctgactggaacccccagaatgacttgcaggcacaagcccgagcgcatagaattggtcagaagaagcaggtaaatatttaccgcttagttacaaaggggactgtggaggaggagatcatagaacgggccaaaaagaagatggtattagatcatctggtgattcagcgcatggacaccactggccggacgatcctggaaaacaactcaggaaggtccaactcaaatccttttaataaagaagagctgacagctattttgaaatttggagcagaggatctcttcaaagaactggaaggggaggaatcagaacctcaggaaatggatatagatgaaattttgcggttggctgaaacgagagagaatgaagtgtcaacaagtgcaacagatgaacttctatcacagtttaaggttgccaactttgcaacaatggaagatgaagaagagctagaagagcgtcctcacaaggactgggatgagatcattccagaggaacaaaggaaaaaagtagaggaggaagagcggcagaaggagctagaagaaatttatatgctgcctcgaattcggagttccactaaaaaggctcagacaaatgacagtgactctgacactgagtctaagaggcaggcccagagatcctctgcttctgagagtgaaacggaagactctgatgatgacaagaagccaaagcgcagagggcgtccgaggagtgtgcggaaggacctcgtggagggatttactgatgcagagatccgaaggttcatcaaggcttataagaagtttggtctccctcttgaacggctggagtgcatagcacgtgatgctgagctggtagataagtcggtggcagatctgaagcgcctgggtgaactgatccacaacagctgtgtgtcagcaatgcaggaatacgaagagcagctgaaagaaaatgccagcgagggaaaaggaccagggaaaaggagaggtccaacaatcaagatatccggagttcaggttaatgtgaaatccattatccaacatgaagaggagtttgagatgctgcataaatctatccctgtggaccctgaagaaaaaaaaaaatactgcttaacctgtcgtgtcaaagctgcacattttgatgtagagtggggggtggaagatgattctcgcctgttgctggggatttatgaacatggctatggaaactgggagttaattaaaacagacccagagcttaaattaactgacaaaattctgccggtggagacagataaaaagcctcaggggaagcagctacagacccgagcggattacttgttgaagctgctcagaaagggtctggagaagaagggggctgtgacaggtggggaagaggccaaattaaagaagcggaagcctcgggtaaagaaggaaaacaaagtgcccaggctgaaagaggagcatggaattgagctttcatctcctaggcattcagataatccatcagaagagggagaagtgaaagatgatggcttggaaaaaagtccaatgaaaaaaaaacagaagaagaaagagaacaaggagaacaaggagaaacaaatgagttctaggaaagacaaagaaggggacaaggaaagaaagaagtcaaaagataagaaagagaagcctaaaagtggtgatgccaaatcttcgagtaaatcaaagcgatctcagggtcctgtccatattacagcaggaagtgaacctgtccccattggagaggatgaggatgatgatctggaccaggagacattcagcatatgtaaggagaggatgaggcccgtgaaaaaggcactgaaacagctcgacaaacctgacaaggggctcaacgtgcaagaacagctggaacacacccggaactgcctgctgaaaatcggagaccggatagccgagtgccttaaagcctactcagatcaggagcacatcaaactctggaggaggtaaccactttggcctcgtctgcccagtttgatttgactgagtgtgggagtggattctgttttcttttaataaaaggtggcatagccacctaagaaatctttctcccagcacaactcatctattggcaatatacctgcaggctttaactccctttccatgaaataggccattccactgagaccagccttttgaaggggtaggacgat

SEQ ID NO: 458770 - DNA, 5386 bp, Homo sapiens
taaagaaggaaaaacttgaatttatattatgaaattaaggttttacttttatttagcaatcatttcacccattgggggattaatttttaaaaagattagtacttagctgagctttagattctctaagaattatccctttttcaaaatggcttgataaaacaccacttcctgtccagggaggaagttattttagctcaaggactgaaatatttagcagatctttagacaaaaggaacaaattacatttctctctggcttaaaaagggtgcttgagccagagggggttaagaagccctcccccctccccctgttggggtggtctggaggggcagggaggtgtgggggtgggggtccttaggctccctgggatggaggatctgtctctctctctctctctcctttttttttttttggtggagatgaaggggtgggtctatggtacatcacctgagttgtggggtaaatgtagagagtgtcaatcaaaggcagagctctcagagctgggaaggaggctctagatggcggctgtgccttagagagagcgcgctctgctccctgcctttgcctcactttacgcaactttccctaactttcgggcagcctcagggggcccccgtagccccctgcctttcctagggacttactggggtcgattcgaacctttttttgggagaaaagcagcttttaggagctttcttttcgtgccttgttggaaagaagcagccgtactgagagcccaggtcgttgttttttccagcttagaagccatggcgcacctccatttttgtgcgctctcctaatgaggttttttttctttcggacctgttttagtattaattattgctttatttttttgaccagttaacatatttgagggttattttatttatttttcgttttttaacggaggattttgcctttatttttaattatttgggatctgatatttttctactagtagataggactcttggtttggacatactacatggatcagtaaatacctgggcacaggacttcaaagcaaacacagattccccctcccccttaatatttaagaattaaaagatgatgagaaataaggacaaaagccaagaggaggacagttcgctacacagcaatgcatcgagtcactcagcctctgaagaagcttcgggttcagactcaggcagtcagtcggaaagtgagcagggaagtgatccaggaagtggacatggcagcgagtcgaacagcagctctgaatcttctgagagtcagtcggaatctgagagcgaatcagcaggttccaaatcccagccagtcctcccagaagccaaagagaagccagcctctaagaaggaacggatagctgatgtgaagaagatgtgggaagaatatcctgatgtttatggggtcaggcggtcaaaccgaagcagacaagaaccatcgcgatttaatattaaggaagaggcaagtagcgggtctgagagtgggagcccaaaaagaagaggccagaggcagctgaaaaaacaagaaaaatggaaacaggaaccctcagaagatgaacaggaacaaggcaccagtgcagagagtgagccagaacaaaaaaaagtaaaagccagaagacctgtccccagaagaacagtgcccaaacctcgtgttaaaaagcagccgaagactcagcgtggaaagagaaaaaagcaagattcttctgatgaggatgatgatgatgacgaagctcccaaaaggcagactcgtcgaagagcggctaaaaacgttagttacaaagaagatgatgactttgagactgactcagatgatctcattgaaatgactggagaaggagttgatgaacagcaagataatagtgaaactattgaaaaggtcttagattcaagactgggaaagaaaggagccactggagcatctactactgtatatgcgattgaagctaatggcgaccctagtggtgactttgacactgaaaaggatgaaggtgaaatccagtacctcatcaagtggaagggttggtcttacatccacagcacatgggagagtgaagaatccttacagcaacagaaagtgaagggcctaaaaaaactagagaacttcaagaaaaaagaggacgaaatcaaacaatggttagggaaagtttctcctgaagatgtagaatatttcaattgccaacaggagctggcttcagagttgaataaacagtatcagatagtagaaagagtaatagctgtgaagacaagtaaatctacattgggtcaaacagattttccagctcatagtcggaagccggcaccctcaaatgagcccgaatatctatgtaaatggatgggactcccctattcagagtgtagctgggaagatgaagccctcattggaaagaaattccagaattgcattgacagcttccacagtaggaacaactcaaaaaccatcccaacaagagaatgcaaggccctgaagcagagaccacgatttgtagctttaaagaaacaacctgcatatttaggaggggagaatctggaacttcgagattatcagctagaaggtctaaactggctagctcattcctggtgcaaaaataatagtgtaatccttgctgatgaaatgggcctaggaaagaccatccagaccatatcattcctctcctacctgttccaccaacaccagctgtatggcccctttcttatagtcgtccctttatccaccctcacctcatggcagagagagtttgaaatctgggcaccagagattaacgtagtggtttacataggtgacctgatgagcagaaatacgatacgggaatatgaatggattcattcccaaaccaaaagattgaagttcaacgcacttataacaacatatgagatcctcttgaaagataagactgtgctgggcagtattaactgggcctttctgggagtggatgaagcccatcggttgaagaatgatgactctttattgtataaaactctgattgatttcaagtccaaccataggctcctgattacggggacccctcttcagaattccctcaaagagctctggtccttgctgcactttattatgccggagaagtttgaattttgggaagattttgaagaagaccatgggaaggggagagagaatggctaccagagtcttcataaggtgctagagcctttccttctccggagagtcaaaaaagatgtggagaaatcccttcctgctaaagtggaacagattctcagggtggagatgtcagcccttcagaaacagtattacaagtggattctgaccaggaattacaaggctcttgccaaaggaacaagaggcagcacatctggttttcttaatattgtgatggaactgaaaaaatgttgcaaccactgctatctgattaaaccccctgaagaaaatgaaagggaaaatggacaggagattcttctgtccctcataaggagcagtgggaagttgattttattagacaaactgttgacaagacttcgagaaagggggaatcgagtgcttatcttctctcagatggtgagaatgttggatatcctggctgaatacctaactattaaacactatcctttccagcgtctggatggttccatcaagggagaaatccgaaaacaggcactggaccacttcaatgcagatgggtctgaggacttctgtttcctgctctcgacaagggctggtggcctgggaatcaatttggcttcagcggacacagtcgtcatctttgactctgactggaacccccagaatgacttgcaggcacaagcccgagcgcatagaattggtcagaagaagcaggtaaatatttaccgcttagttacaaaggggactgtggaggaggagatcatagaacgggccaaaaagaagatggtattagatcatctggtgattcagcgcatggacaccactggccggacgatcctggaaaacaactcaggaaggtccaactcaaatccttttaataaagaagagctgacagctattttgaaatttggagcagaggatctcttcaaagaactggaaggggaggaatcagaacctcaggaaatggatatagatgaaattttgcggttggctgaaacgagagagaatgaagtgtcaacaagtgcaacagatgaacttctatcacagtttaaggttgccaactttgcaacaatggaagatgaagaagagctagaagagcgtcctcacaaggactgggatgagatcattccagaggaacaaaggaaaaaagtagaggaggaagagcggcagaaggagctagaagaaatttatatgctgcctcgaattcggagttccactaaaaaggctcagacaaatgacagtgactctgacactgagtctaagaggcaggcccagagatcctctgcttctgagagtgaaacggaagactctgatgatgacaagaagccaaagcgcagagggcgtccgaggagtgtgcggaaggacctcgtggagggatttactgatgcagagatccgaaggttcatcaaggcttataagaagtttggtctccctcttgaacggctggagtgcatagcacgtgatgctgagctggtagataagtcggtggcagatctgaagcgcctgggtgaactgatccacaacagctgtgtgtcagcaatgcaggaatacgaagagcagctgaaagaaaatgccagcgagggaaaaggaccagggaaaaggagaggtccaacaatcaagatatccggagttcaggttaatgtgaaatccattatccaacatgaagaggagtttgagatgctgcataaatctatccctgtggaccctgaagaaaaaaaaaaatactgcttaacctgtcgtgtcaaagctgcacattttgatgtagagtggggggtggaagatgattctcgcctgttgctggggatttatgaacatggctatggaaactgggagttaattaaaacagacccagagcttaaattaactgacaaaattctgccggtggagacagataaaaagcctcaggggaagcagctacagacccgagcggattacttgttgaagctgctcagaaagggtctggagaagaagggggctgtgacaggtggggaagaggccaaattaaagaagcggaagcctcgggtaaagaaggaaaacaaagtgcccaggctgaaagaggagcatggaattgagctttcatctcctaggcattcagataatccatcagaagagggagaagtgaaagatgatggcttggaaaaaagtccaatgaaaaaaaaacagaagaagaaagagaacaaggagaacaaggagaaacaaatgagttctaggaaagacaaaaggctgaaaaactagatcaactaaacacatttcatgaaaaaagctgattcttaataaataataccaactgatacaatgatgaaaa

SEQ ID NO: 458771 - DNA, 5521 bp, Homo sapiens
taaagaaggaaaaacttgaatttatattatgaaattaaggttttacttttatttagcaatcatttcacccattgggggattaatttttaaaaagattagtacttagctgagctttagattctctaagaattatccctttttcaaaatggcttgataaaacaccacttcctgtccagggaggaagttattttagctcaaggactgaaatatttagcagatctttagacaaaaggaacaaattacatttctctctggcttaaaaagggtgcttgagccagagggggttaagaagccctcccccctccccctgttggggtggtctggaggggcagggaggtgtgggggtgggggtccttaggctccctgggatggaggatctgtctctctctctctctctcctttttttttttttggtggagatgaaggggtgggtctatggtacatcacctgagttgtggggtaaatgtagagagtgtcaatcaaaggcagagctctcagagctgggaaggaggctctagatggcggctgtgccttagagagagcgcgctctgctccctgcctttgcctcactttacgcaactttccctaactttcgggcagcctcagggggcccccgtagccccctgcctttcctagggacttactggggtcgattcgaacctttttttgggagaaaagcagcttttaggagctttcttttcgtgccttgttggaaagaagcagccgtactgagagcccaggtcgttgttttttccagcttagaagccatggcgcacctccatttttgtgcgctctcctaatgaggttttttttctttcggacctgttttagtattaattattgctttatttttttgaccagttaacatatttgagggttattttatttatttttcgttttttaacggaggattttgcctttatttttaattatttgggatctgatatttttctactagtagataggactcttggtttggacatactacatggatcagtaaatacctgggcacaggacttcaaagcaaacacagattccccctcccccttaatatttaagaattaaaagatgatgagaaataaggacaaaagccaagaggaggacagttcgctacacagcaatgcatcgagtcactcagcctctgaagaagcttcgggttcagactcaggcagtcagtcggaaagtgagcagggaagtgatccaggaagtggacatggcagcgagtcgaacagcagctctgaatcttctgagagtcagtcggaatctgagagcgaatcagcaggttccaaatcccagccagtcctcccagaagccaaagagaagccagcctctaagaaggaacggatagctgatgtgaagaagatgtgggaagaatatcctgatgtttatggggtcaggcggtcaaaccgaagcagacaagaaccatcgcgatttaatattaaggaagaggcaagtagcgggtctgagagtgggagcccaaaaagaagaggccagaggcagctgaaaaaacaagaaaaatggaaacaggaaccctcagaagatgaacaggaacaaggcaccagtgcagagagtgagccagaacaaaaaaaagtaaaagccagaagacctgtccccagaagaacagtgcccaaacctcgtgttaaaaagcagccgaagactcagcgtggaaagagaaaaaagcaagattcttctgatgaggatgatgatgatgacgaagctcccaaaaggcagactcgtcgaagagcggctaaaaacgttagttacaaagaagatgatgactttgagactgactcagatgatctcattgaaatgactggagaaggagttgatgaacagcaagataatagtgaaactattgaaaaggtcttagattcaagactgggaaagaaaggagccactggagcatctactactgtatatgcgattgaagctaatggcgaccctagtggtgactttgacactgaaaaggatgaaggtgaaatccagtacctcatcaagtggaagggttggtcttacatccacagcacatgggagagtgaagaatccttacagcaacagaaagtgaagggcctaaaaaaactagagaacttcaagaaaaaagaggacgaaatcaaacaatggttagggaaagtttctcctgaagatgtagaatatttcaattgccaacaggagctggcttcagagttgaataaacagtatcagatagtagaaagagtaatagctgtgaagacaagtaaatctacattgggtcaaacagattttccagctcatagtcggaagccggcaccctcaaatgagcccgaatatctatgtaaatggatgggactcccctattcagagtgtagctgggaagatgaagccctcattggaaagaaattccagaattgcattgacagcttccacagtaggaacaactcaaaaaccatcccaacaagagaatgcaaggccctgaagcagagaccacgatttgtagctttaaagaaacaacctgcatatttaggaggggagaatctggaacttcgagattatcagctagaaggtctaaactggctagctcattcctggtgcaaaaataatagtgtaatccttgctgatgaaatgggcctaggaaagaccatccagaccatatcattcctctcctacctgttccaccaacaccagctgtatggcccctttcttatagtcgtccctttatccaccctcacctcatggcagagagagtttgaaatctgggcaccagagattaacgtagtggtttacataggtgacctgatgagcagaaatacgatacgggaatatgaatggattcattcccaaaccaaaagattgaagttcaacgcacttataacaacatatgagatcctcttgaaagataagactgtgctgggcagtattaactgggcctttctgggagtggatgaagcccatcggttgaagaatgatgactctttattgtataaaactctgattgatttcaagtccaaccataggctcctgattacggggacccctcttcagaattccctcaaagagctctggtccttgctgcactttattatgccggagaagtttgaattttgggaagattttgaagaagaccatgggaaggggagagagaatggctaccagagtcttcataaggtgctagagcctttccttctccggagagtcaaaaaagatgtggagaaatcccttcctgctaaagtggaacagattctcagggtggagatgtcagcccttcagaaacagtattacaagtggattctgaccaggaattacaaggctcttgccaaaggaacaagaggcagcacatctggttttcttaatattgtgatggaactgaaaaaatgttgcaaccactgctatctgattaaaccccctgaagaaaatgaaagggaaaatggacaggagattcttctgtccctcataaggagcagtgggaagttgattttattagacaaactgttgacaagacttcgagaaagggggaatcgagtgcttatcttctctcagatggtgagaatgttggatatcctggctgaatacctaactattaaacactatcctttccagcgtctggatggttccatcaagggagaaatccgaaaacaggcactggaccacttcaatgcagatgggtctgaggacttctgtttcctgctctcgacaagggctggtggcctgggaatcaatttggcttcagcggacacagtcgtcatctttgactctgactggaacccccagaatgacttgcaggcacaagcccgagcgcatagaattggtcagaagaagcaggtaaatatttaccgcttagttacaaaggggactgtggaggaggagatcatagaacgggccaaaaagaagatggtattagatcatctggtgattcagcgcatggacaccactggccggacgatcctggaaaacaactcaggaaggtccaactcaaatccttttaataaagaagagctgacagctattttgaaatttggagcagaggatctcttcaaagaactggaaggggaggaatcagaacctcaggaaatggatatagatgaaattttgcggttggctgaaacgagagagaatgaagtgtcaacaagtgcaacagatgaacttctatcacagtttaaggttgccaactttgcaacaatggaagatgaagaagagctagaagagcgtcctcacaaggactgggatgagatcattccagaggaacaaaggaaaaaagtagaggaggaagagcggcagaaggagctagaagaaatttatatgctgcctcgaattcggagttccactaaaaaggctcagacaaatgacagtgactctgacactgagtctaagaggcaggcccagagatcctctgcttctgagagtgaaacggaagactctgatgatgacaagaagccaaagcgcagagggcgtccgaggagtgtgcggaaggacctcgtggagggatttactgatgcagagatccgaaggttcatcaaggcttataagaagtttggtctccctcttgaacggctggagtgcatagcacgtgatgctgagctggtagataagtcggtggcagatctgaagcgcctgggtgaactgatccacaacagctgtgtgtcagcaatgcaggaatacgaagagcagctgaaagaaaatgccagcgagggaaaaggaccagggaaaaggagaggtccaacaatcaagatatccggagttcaggttaatgtgaaatccattatccaacatgaagaggagtttgagatgctgcataaatctatccctgtggaccctgaagaaaaaaaaaaatactgcttaacctgtcgtgtcaaagctgcacattttgatgtagagtggggggtggaagatgattctcgcctgttgctggggatttatgaacatggctatggaaactgggagttaattaaaacagacccagagcttaaattaactgacaaactttaacctagctccagggattccctgctcctggaaggaggaaatccacgacggctgggatgctctagcagatgaagccacaagcccctcctacctgagttgttctaccctgttaacagcacagattctgccggtggagacagataaaaagcctcaggggaagcagctacagacccgagcggattacttgttgaagctgctcagaaagggtctggagaagaagggggctgtgacaggtggggaagaggccaaattaaagaagcggaagcctcgggtaaagaaggaaaacaaagtgcccaggctgaaagaggagcatggaattgagctttcatctcctaggcattcagataatccatcagaagagggagaagtgaaagatgatggcttggaaaaaagtccaatgaaaaaaaaacagaagaagaaagagaacaaggagaacaaggagaaacaaatgagttctaggaaagacaaagaaggggacaaggaaagaaagaagtcaaaagataagaaagagaagcctaaaagtggtgatgcccaatcttcgatttgacgcgttcgggatcctcag

SEQ ID NO: 458772 - DNA, 5585 bp, Homo sapiens
taaagaaggaaaaacttgaatttatattatgaaattaaggttttacttttatttagcaatcatttcacccattgggggattaatttttaaaaagattagtacttagctgagctttagattctctaagaattatccctttttcaaaatggcttgataaaacaccacttcctgtccagggaggaagttattttagctcaaggactgaaatatttagcagatctttagacaaaaggaacaaattacatttctctctggcttaaaaagggtgcttgagccagagggggttaagaagccctcccccctccccctgttggggtggtctggaggggcagggaggtgtgggggtgggggtccttaggctccctgggatggaggatctgtctctctctctctctctcctttttttttttttggtggagatgaaggggtgggtctatggtacatcacctgagttgtggggtaaatgtagagagtgtcaatcaaaggcagagctctcagagctgggaaggaggctctagatggcggctgtgccttagagagagcgcgctctgctccctgcctttgcctcactttacgcaactttccctaactttcgggcagcctcagggggcccccgtagccccctgcctttcctagggacttactggggtcgattcgaacctttttttgggagaaaagcagcttttaggagctttcttttcgtgccttgttggaaagaagcagccgtactgagagcccaggtcgttgttttttccagcttagaagccatggcgcacctccatttttgtgcgctctcctaatgaggttttttttctttcggacctgttttagtattaattattgctttatttttttgaccagttaacatatttgagggttattttatttatttttcgttttttaacggaggattttgcctttatttttaattatttgggatctgatatttttctactagtagataggactcttggtttggacatactacatggatcagtaaatacctgggcacaggacttcaaagcaaacacagattccccctcccccttaatatttaagaattaaaagatgatgagaaataaggacaaaagccaagaggaggacagttcgctacacagcaatgcatcgagtcactcagcctctgaagaagcttcgggttcagactcaggcagtcagtcggaaagtgagcagggaagtgatccaggaagtggacatggcagcgagtcgaacagcagctctgaatcttctgagagtcagtcggaatctgagagcgaatcagcaggttccaaatcccagccagtcctcccagaagccaaagagaagccagcctctaagaaggaacggatagctgatgtgaagaagatgtgggaagaatatcctgatgtttatggggtcaggcggtcaaaccgaagcagacaagaaccatcgcgatttaatattaaggaagaggcaagtagcgggtctgagagtgggagcccaaaaagaagaggccagaggcagctgaaaaaacaagaaaaatggaaacaggaaccctcagaagatgaacaggaacaaggcaccagtgcagagagtgagccagaacaaaaaaaagtaaaagccagaagacctgtccccagaagaacagtgcccaaacctcgtgttaaaaagcagccgaagactcagcgtggaaagagaaaaaagcaagattcttctgatgaggatgatgatgatgacgaagctcccaaaaggcagactcgtcgaagagcggctaaaaacgttagttacaaagaagatgatgactttgagactgactcagatgatctcattgaaatgactggagaaggagttgatgaacagcaagataatagtgaaactattgaaaaggtcttagattcaagactgggaaagaaaggagccactggagcatctactactgtatatgcgattgaagctaatggcgaccctagtggtgactttgacactgaaaaggatgaaggtgaaatccagtacctcatcaagtggaagggttggtcttacatccacagcacatgggagagtgaagaatccttacagcaacagaaagtgaagggcctaaaaaaactagagaacttcaagaaaaaagaggacgaaatcaaacaatggttagggaaagtttctcctgaagatgtagaatatttcaattgccaacaggagctggcttcagagttgaataaacagtatcagatagtagaaagagtaatagctgtgaagacaagtaaatctacattgggtcaaacagattttccagctcatagtcggaagccggcaccctcaaatgagcccgaatatctatgtaaatggatgggactcccctattcagagtgtagctgggaagatgaagccctcattggaaagaaattccagaattgcattgacagcttccacagtaggaacaactcaaaaaccatcccaacaagagaatgcaaggccctgaagcagagaccacgatttgtagctttaaagaaacaacctgcatatttaggaggggagaatctggaacttcgagattatcagctagaaggtctaaactggctagctcattcctggtgcaaaaataatagtgtaatccttgctgatgaaatgggcctaggaaagaccatccagaccatatcattcctctcctacctgttccaccaacaccagctgtatggcccctttcttatagtcgtccctttatccaccctcacctcatggcagagagagtttgaaatctgggcaccagagattaacgtagtggtttacataggtgacctgatgagcagaaatacgatacgggaatatgaatggattcattcccaaaccaaaagattgaagttcaacgcacttataacaacatatgagatcctcttgaaagataagactgtgctgggcagtattaactgggcctttctgggagtggatgaagcccatcggttgaagaatgatgactctttattgtataaaactctgattgatttcaagtccaaccataggctcctgattacggggacccctcttcagaattccctcaaagagctctggtccttgctgcactttattatgccggagaagtttgaattttgggaagattttgaagaagaccatgggaaggggagagagaatggctaccagagtcttcataaggtgctagagcctttccttctccggagagtcaaaaaagatgtggagaaatcccttcctgctaaagtggaacagattctcagggtggagatgtcagcccttcagaaacagtattacaagtggattctgaccaggaattacaaggctcttgccaaaggaacaagaggcagcacatctggttttcttaatattgtgatggaactgaaaaaatgttgcaaccactgctatctgattaaaccccctgaagaaaatgaaagggaaaatggacaggagattcttctgtccctcataaggagcagtgggaagttgattttattagacaaactgttgacaagacttcgagaaagggggaatcgagtgcttatcttctctcagatggtgagaatgttggatatcctggctgaatacctaactattaaacactatcctttccagcgtctggatggttccatcaagggagaaatccgaaaacaggcactggaccacttcaatgcagatgggtctgaggacttctgtttcctgctctcgacaagggctggtggcctgggaatcaatttggcttcagcggacacagtcgtcatctttgactctgactggaacccccagaatgacttgcaggcacaagcccgagcgcatagaattggtcagaagaagcaggtaaatatttaccgcttagttacaaaggggactgtggaggaggagatcatagaacgggccaaaaagaagatggtattagatcatctggtgattcagcgcatggacaccactggccggacgatcctggaaaacaactcaggaaggtccaactcaaatccttttaataaagaagagctgacagctattttgaaatttggagcagaggatctcttcaaagaactggaaggggaggaatcagaacctcaggaaatggatatagatgaaattttgcggttggctgaaacgagagagaatgaagtgtcaacaagtgcaacagatgaacttctatcacagtttaaggttgccaactttgcaacaatggaagatgaagaagagctagaagagcgtcctcacaaggactgggatgagatcattccagaggaacaaaggaaaaaagtagaggaggaagagcggcagaaggagctagaagaaatttatatgctgcctcgaattcggagttccactaaaaaggctcagacaaatgacagtgactctgacactgagtctaagaggcaggcccagagatcctctgcttctgagagtgaaacggaagactctgatgatgacaagaagccaaagcgcagagggcgtccgaggagtgtgcggaaggacctcgtggagggatttactgatgcagagatccgaaggttcatcaaggcttataagaagtttggtctccctcttgaacggctggagtgcatagcacgtgatgctgagctggtagataagtcggtggcagatctgaagcgcctgggtgaactgatccacaacagctgtgtgtcagcaatgcaggaatacgaagagcagctgaaagaaaatgccagcgagggaaaaggaccagggaaaaggagaggtccaacaatcaagatatccggagttcaggttaatgtgaaatccattatccaacatgaagaggagtttgagatgctgcataaatctatccctgtggaccctgaagaaaaaaaaaaatactgcttaacctgtcgtgtcaaagctgcacattttgatgtagagtggggggtggaagatgattctcgcctgttgctggggatttatgaacatggctatggaaactgggagttaattaaaacagacccagagcttaaattaactgacaaagtaaccctaccatgctagagatttctagaagatttgttgtgtaatatttttatatcgattacttatttctaactattttcgagggggcatcaaattagaaattagtatagtcattcttggaaatacttccatctttagcagattgtggcactgtttcacggatgaagataaagggaaaagacagtagccaggtgaaattttggggaaactgtaggagaaatcttaaaattctggtatttaattataggtcagatttcattacaataaatacccaggtgagtttgttaatgataaaagcattccttggccttagttattggccctttgtttaaaagtacatttgaaacaaccatatttcatttcctcacgtaaagattgaatgtcaccttggtattctttgtaatggaattaaacattggctgttcttctcccacaaaatcgagcctcccaccctatctgttgcaagtagcaaggccatggttggagctataagcagggaaggctgactggctcaaattttggtaggatttgctccatgttgtgctcctggcacgttcaacagtgctcatcccatctggttttaggagggtgacagcaccctgccttaagcactgagaccagattcagtctgg

SEQ ID NO: 458773 - DNA, 9191 bp, Homo sapiens
  misc_feature (8672)..(8675): n is a, c, g, or t
  misc_feature (8749)..(8749): n is a, c, g, or t
  misc_feature (8756)..(8756): n is a, c, g, or t
taaagaaggaaaaacttgaatttatattatgaaattaaggttttacttttatttagcaatcatttcacccattgggggattaatttttaaaaagattagtacttagctgagctttagattctctaagaattatccctttttcaaaatggcttgataaaacaccacttcctgtccagggaggaagttattttagctcaaggactgaaatatttagcagatctttagacaaaaggaacaaattacatttctctctggcttaaaaagggtgcttgagccagagggggttaagaagccctcccccctccccctgttggggtggtctggaggggcagggaggtgtgggggtgggggtccttaggctccctgggatggaggatctgtctctctctctctctctcctttttttttttttggtggagatgaaggggtgggtctatggtacatcacctgagttgtggggtaaatgtagagagtgtcaatcaaaggcagagctctcagagctgggaaggaggctctagatggcggctgtgccttagagagagcgcgctctgctccctgcctttgcctcactttacgcaactttccctaactttcgggcagcctcagggggcccccgtagccccctgcctttcctagggacttactggggtcgattcgaacctttttttgggagaatgagagcccaggtcgttgttttttccagcttagaagccatggcgcacctccatttttgtgcgctctcctaatgaggttttttttctttcggacctgttttagtattaattattgctttatttttttgaccagttaacatatttgagggttattttatttatttttcgttttttaacggaggattttgcctttatttttaattatttgggatctgatatttttctactagtagataggactcttggtttggacatactacatggatcaggtaagttcacgatcattggtgataattttaaagatttatttgtttaagtttgccttgttttctgtaaatacgagaaattcttggatgacgcaataagatacagagattgttatttgtatctagtgtgctactttgagaaagtttccttattgatagtgatgcttccactgttcggtttatcctggtgttttttcttttaaggaaaaaatagaaatatttagttttttggtgcttaccgttgttgtgttataacaatatcgttaacatcgtcaggactttgttcctgataataaaaagcatcgatagaagccgggaccttacctttctttcaacttttgacagtaaatacctgggcacaggacttcaaagcaaacacagattccccctcccccttaatatttaagaattaaaagatgatgagaaataaggacaaaagccaagaggaggacagttcgctacacagcaatgcatcgagtcactcagcctctgaagaagcttcgggttcagactcaggcagtcagtcggaaagtgagcagggaagtgatccaggaagtggacatggcagcgagtcgaacagcagctctgaatcttctgagagtcagtcggaatctgagagcgaatcagcaggttccaaatcccagccagtcctcccagaagccaaagagaagccagcctctaagaaggaacggatagctgatgtgaagaagatgtgggaagaatatcctgatgtttatggggtcaggcggtcaaaccgaagcagacaagaaccatcgcgatttaatattaaggaagaggcaagtagcgggtctgagagtgggagcccaaaaagaagaggccagaggcagctgaaaaaacaagaaaaatggaaacaggaaccctcagaagatgaacaggaacaaggcaccagtgcagagagtgagccagaacaaaaaaaagtaaaagccagaagacctgtccccagaagaacagtgcccaaacctcgtgttaaaaagcagccgaagactcagcgtggaaagagaaaaaagcaagattcttctgatgaggatgatgatgatgacgaagctcccaaaaggcagactcgtcgaagagcggctaaaaacgttagttacaaagaagatgatgactttgagactgactcagatgatctcattgaaatgactggagaaggagttgatgaacagcaagataatagtgaaactattgaaaaggtcttagattcaagactgggaaagaaaggagccactggagcatctactactgtatatgcgattgaagctaatggcgaccctagtggtgactttgacactgaaaaggatgaaggtgaaatccagtacctcatcaagtggaagggttggtcttacatccacagcacatgggagagtgaagaatccttacagcaacagaaagtgaagggcctaaaaaaactagagaacttcaagaaaaaagaggacgaaatcaaacaatggttagggaaagtttctcctgaagatgtagaatatttcaattgccaacaggagctggcttcagagttgaataaacagtatcagatagtagaaagagtaatagctgtgaagacaagtaaatctacattgggtcaaacagattttccagctcatagtcggaagccggcaccctcaaatgagcccgaatatctatgtaaatggatgggactcccctattcagagtgtagctgggaagatgaagccctcattggaaagaaattccagaattgcattgacagcttccacagtaggaacaactcaaaaaccatcccaacaagagaatgcaaggccctgaagcagagaccacgatttgtagctttaaagaaacaacctgcatatttaggaggggagaatctggaacttcgagattatcagctagaaggtctaaactggctagctcattcctggtgcaaaaataatagtgtaatccttgctgatgaaatgggcctaggaaagaccatccagaccatatcattcctctcctacctgttccaccaacaccagctgtatggcccctttcttatagtcgtccctttatccaccctcacctcatggcagagagagtttgaaatctgggcaccagagattaacgtagtggtttacataggtgacctgatgagcagaaatacgatacgggaatatgaatggattcattcccaaaccaaaagattgaagttcaacgcacttataacaacatatgagatcctcttgaaagataagactgtgctgggcagtattaactgggcctttctgggagtggatgaagcccatcggttgaagaatgatgactctttattgtataaaactctgattgatttcaagtccaaccataggctcctgattacggggacccctcttcagaattccctcaaagagctctggtccttgctgcactttattatgccggagaagtttgaattttgggaagattttgaagaagaccatgggaaggggagagagaatggctaccagagtcttcataaggtgctagagcctttccttctccggagagtcaaaaaagatgtggagaaatcccttcctgctaaagtggaacagattctcagggtggagatgtcagcccttcagaaacagtattacaagtggattctgaccaggaattacaaggctcttgccaaaggaacaagaggcagcacatctggttttcttaatattgtgatggaactgaaaaaatgttgcaaccactgctatctgattaaaccccctgaagaaaatgaaagggaaaatggacaggagattcttctgtccctcataaggagcagtgggaagttgattttattagacaaactgttgacaagacttcgagaaagggggaatcgagtgcttatcttctctcagatggtgagaatgttggatatcctggctgaatacctaactattaaacactatcctttccagcgtctggatggttccatcaagggagaaatccgaaaacaggcactggaccacttcaatgcagatgggtctgaggacttctgtttcctgctctcgacaagggctggtggcctgggaatcaatttggcttcagcggacacagtcgtcatctttgactctgactggaacccccagaatgacttgcaggcacaagcccgagcgcatagaattggtcagaagaagcaggtaaatatttaccgcttagttacaaaggggactgtggaggaggagatcatagaacgggccaaaaagaagatggtattagatcatctggtgattcagcgcatggacaccactggccggacgatcctggaaaacaactcaggaaggtccaactcaaatccttttaataaagaagagctgacagctattttgaaatttggagcagaggatctcttcaaagaactggaaggggaggaatcagaacctcaggaaatggatatagatgaaattttgcggttggctgaaacgagagagaatgaagtgtcaacaagtgcaacagatgaacttctatcacagtttaaggttgccaactttgcaacaatggaagatgaagaagagctagaagagcgtcctcacaaggactgggatgagatcattccagaggaacaaaggaaaaaagtagaggaggaagagcggcagaaggagctagaagaaatttatatgctgcctcgaattcggagttccactaaaaaggctcagacaaatgacagtgactctgacactgagtctaagaggcaggcccagagatcctctgcttctgagagtgaaacggaagactctgatgatgacaagaagccaaagcgcagagggcgtccgaggagtgtgcggaaggacctcgtggagggatttactgatgcagagatccgaaggttcatcaaggcttataagaagtttggtctccctcttgaacggctggagtgcatagcacgtgatgctgagctggtagataagtcggtggcagatctgaagcgcctgggtgaactgatccacaacagctgtgtgtcagcaatgcaggaatacgaagagcagctgaaagaaaatgccagcgagggaaaaggaccagggaaaaggagaggtccaacaatcaagatatccggagttcaggttaatgtgaaatccattatccaacatgaagaggagtttgagatgctgcataaatctatccctgtggaccctgaagaaaaaaaaaaatactgcttaacctgtcgtgtcaaagctgcacattttgatgtagagtggggggtggaagatgattctcgcctgttgctggggatttatgaacatggctatggaaactgggagttaattaaaacagacccagagcttaaattaactgacaaaattctgccggtggagacagataaaaagcctcaggggaagcagctacagacccgagcggattacttgttgaagctgctcagaaagggtctggagaagaagggggctgtgacaggtggggaagaggccaaattaaagaagcggaagcctcgggtaaagaaggaaaacaaagtgcccaggctgaaagaggagcatggaattgagctttcatctcctaggcattcagataatccatcagaagagggagaagtgaaagatgatggcttggaaaaaagtccaatgaaaaaaaaacagaagaagaaagagaacaaggagaacaaggagaaacaaatgagttctaggaaagacaaagaaggggacaaggaaagaaagaagtcaaaagataagaaagagaagcctaaaagtggtgatgccaaatcttcgagtaaatcaaagcgatctcagggtcctgtccatattacagcaggaagtgaacctgtccccattggagaggatgaggatgatgatctggaccaggagacattcagcatatgtaaggagaggatgaggcccgtgaaaaaggcactgaaacagctcgacaaacctgacaaggggctcaacgtgcaagaacagctggaacacacccggaactgcctgctgaaaatcggagaccggatagccgagtgccttaaagcctactcagatcaggagcacatcaaactctggaggaggaacctatggatttttgtttccaagtttacagaatttgatgctcgaaaactgcataagttatacaagatggctcataagaaaaggtctcaagaagaagaggagcaaaagaagaaagacgacgtgactgggggtaagaaaccatttcgtccagaggcctcaggctccagccgggactctctgatatctcagtcccatacctcacacaaccttcaccctcagaagcctcatttgcctgcctcccatggcccacagatgcatggacacccaagagataactacaatcaccccaacaagagacacttcagtaatgcagatcgaggagactggcagagggaaagaaagttcaactatggtggtggcaacaacaatccaccatggggaagcgacaggcaccatcagtatgagcagcactggtacaaggaccaccattatggggaccggcgacatatggatgcccaccgttccggaagctatcgacccaacaacatgtccagaaagaggccttatgaccagtacagcagtgaccgagaccaccggggacacagagattattatgacaggtatgcaaaaggctgtgagacaccaggtgccaacctttgccaggagctgtttctagggagaaagtgacgtatacatgaatgtatttatctatcaaattactgaagatctcatcatgcatgtgtcagccacagcgaatcccatgtcttggttataggttttatgttttgttttctgggtcatagggagcacatttcacctgtgcaggaaaagagttttctgccgtcttttgaggaaatctagtgaagaggtcgccataaaatattagagtcaacaaccaaaattattaagctctgtgcgaggctgtcagccacactaggtatcagggatcccgagatgggtaccagcccacagtccttacctgccacgagcccataattgaagagtcaaagtcttctgaagctgcaccctctttacttcagtacaatgccaccagtagtacgatgagccaaagctttacattgtgagagtagcaagtccagggagagctaaagaggttttatctgtatttcctaatttcaaatcttggataatttaacctcatagcagctttggttttccctgggctgatgatgtgcgtcatttgcactgtaccttgaatttacagtgggaaaatttcatataaacgtgtcaaagtcgtgctttgtttttggaagatctggtaacagcagcccgcattagcagagagctgtagctgagtagctgccacctcgttgggagactgcccctcgctcccacccttctctattgtctggacccagtgggcatcttgccctgcgttcttctagtaggtctgtatttctatttgatgtcactttccttttgcctgaaggactttttctgctggtgataaactctttcagtgtttgtatatatgcctgaaaaagtattttgccttcatttttgaaagtagtttttgctgagtgtatacatttttggctttacagtttctttcagtgctttaaagatgtacctctgctatttacttgcattgttttgtgatgaaaaatctgtcatccttatctttgttcctctttacataatgttccttttaaaaaaaatcactgattatgatgtgccttggtgtatttttccttggtttcttgtgcttggaaatttttgaacttcttggatctgtgggtttattgtttccataaaatttggaaatttttacaatcttcttcaaatattttttctgatcccccactctctcttcttctttggagattctcattacacctatattagcttgcttgaagttgtctcacagctcacttgtattctgttgacttttaaaaaattatgctttctgtttcactgtggatagtttctattgctacctcttcaagttcactaatactttccttttcaatgtcaagactgctgtgaggcccatccagtgtactttgcattttatacattgtagttctaaaagttcggaaagttgtttttgggtctttttatatatgttctgtgtctaaccttttaaaacctggaacacagatataacaatggttttgatgtccttgtctgcgaatcttatcacttgggtcagtttcagttgatacctcctcactgtgggtcttgctcccctggtgctttctgtgcctagtaatttttgtcagatgccagatgtaacatttaccttgttgggtgctggatatttctgtattcctgtaagtattctggagctttgttatgagttgcaggttatttggaagcagtttcctttttcaggtcttgctgttaagattcgttaggtagaaccagagcagtgctcagtcaagggctaatgattgcccacccccaaggtaaagagcctcattgcactctacccaattgcgttagtctgttttgcaggaatacctgaggctgggtaatttatagagaaaagagttttatttggcgcacagttccgcaggctgtacaagcatagcaccagcatctggttggcttctggagaggcctcagggagcttttactcatggtggaaggtgaagtggcagtaggcgtcccatggcaagagagggagcaagagagagaggaggaggtgccagcctcttttaaagcaccagctctcacgtgaactcagagaactcactcattatcacaaggacagcaccaagccatttatgagggatctgcccaaacacctcccactacannnnggaagagcccgagcgtggctttatcttgcactcatgcaaaagaaactggcagattatctgaaagtgcctatagncaataancatctcttaagcgagttctatgagcctgaggctttaatgatggaggaagaagggatggtgattgttggtctgctggtgggactcaatgttctcgatgccaatctctgcttgaaaggagaagacttggattctcaggttggagtaatagatttttccctctaccttaaggatgtgcaggatcttgatggtggcaaggagcatgaaagaattactgatgtccttgatcaaaaaattatgtggaagaacttaaccggcacttgagctgcacagttggggatcttcaaaccaagatagatggcttggaaaagactaactcaaagcttcaagaagagctttcagctgcaacagaccgaatttgctcacttcaagaagaacagcagcagttaagagaacaaaatgaattaattcgagaaagaagtgaaaagagtgtagaga

SEQ ID NO: 458774 - DNA, 4180 bp, Homo sapiens
taaagaaggaaaaacttgaatttatattatgaaattaaggttttacttttatttagcaatcatttcacccattgggggattaatttttaaaaagattagtacttagctgagctttagattctctaagaattatccctttttcaaaatggcttgataaaacaccacttcctgtccagggaggaagttattttagctcaaggactgaaatatttagcagatctttagacaaaaggaacaaattacatttctctctggcttaaaaagggtgcttgagccagagggggttaagaagccctcccccctccccctgttggggtggtctggaggggcagggaggtgtgggggtgggggtccttaggctccctgggatggaggatctgtctctctctctctctctcctttttttttttttggtggagatgaaggggtgggtctatggtacatcacctgagttgtggggtaaatgtagagagtgtcaatcaaaggcagagctctcagagctgggaaggaggctctagatggcggctgtgccttagagagagcgcgctctgctccctgcctttgcctcactttacgcaactttccctaactttcgggcagcctcagggggcccccgtagccccctgcctttcctagggacttactggggtcgattcgaacctttttttgggagaaaagcagcttttaggagctttcttttcgtgccttgttggaaagaagcagccgtactgagagcccaggtcgttgttttttccagcttagaagccatggcgcacctccatttttgtgcgctctcctaatgaggttttttttctttcggacctgttttagtattaattattgctttatttttttgaccagttaacatatttgagggttattttatttatttttcgttttttaacggaggattttgcctttatttttaattatttgggatctgatatttttctactagtagataggactcttggtttggacatactacatggatcagtaaatacctgggcacaggacttcaaagcaaacacagattccccctcccccttaatatttaagaattaaaagatgatgagaaataaggacaaaagccaagaggaggacagttcgctacacagcaatgcatcgagtcactcagcctctgaagaagcttcgggttcagactcaggcagtcagtcggaaagtgagcagggaagtgatccaggaagtggacatggcagcgagtcgaacagcagctctgaatcttctgagagtcagtcggaatctgagagcgaatcagcaggttccaaatcccagccagtcctcccagaagccaaagagaagccagcctctaagaaggaacggatagctgatgtgaagaagatgtgggaagaatatcctgatgtttatggggtcaggcggtcaaaccgaagcagacaagaaccatcgcgatttaatattaaggaagaggcaagtagcgggtctgagagtgggagcccaaaaagaagaggccagaggcagctgaaaaaacaagaaaaatggaaacaggaaccctcagaagatgaacaggaacaaggcaccagtgcagagagtgagccagaacaaaaaaaagtaaaagccagaagacctgtccccagaagaacagtgcccaaacctcgtgttaaaaagcagccgaagactcagcgtggaaagagaaaaaagcaagattcttctgatgaggatgatgatgatgacgaagctcccaaaaggcagactcgtcgaagagcggctaaaaacgttagttacaaagaagatgatgactttgagactgactcagatgatctcattgaaatgactggagaaggagttgatgaacagcaagataatagtgaaactattgaaaaggtcttagattcaagactgggaaagaaaggagccactggagcatctactactgtatatgcgattgaagctaatggcgaccctagtggtgactttgacactgaaaaggatgaaggtgaaatccagtacctcatcaagtggaagggttggtcttacatccacagcacatgggagagtgaagaatccttacagcaacagaaagtgaagggcctaaaaaaactagagaacttcaagaaaaaagaggacgaaatcaaacaatggttagggaaagtttctcctgaagatgtagaatatttcaattgccaacaggagctggcttcagagttgaataaacagtatcagatagtagaaagagtaatagctgtgaagacaagtaaatctacattgggtcaaacagattttccagctcatagtcggaagccggcaccctcaaatgagcccgaatatctatgtaaatggatgggactcccctattcagagtgtagctgggaagatgaagccctcattggaaagaaattccagaattgcattgacagcttccacagtaggaacaactcaaaaaccatcccaacaagagaatgcaaggccctgaagcagagaccacgatttgtagctttaaagaaacaacctgcatatttaggaggggagaatctggaacttcgagattatcagctagaaggtctaaactggctagctcattcctggtgcaaaaataatagtgtaatccttgctgatgaaatgggcctaggaaagaccatccagaccatatcattcctctcctacctgttccaccaacaccagctgtatggcccctttcttatagtcgtccctttatccaccctcacctcatggcagagagagtttgaaatctgggcaccagagattaacgtagtggtttacataggtgacctgatgagcagaaatacgatacgggaatatgaatggattcattcccaaaccaaaagattgaagttcaacgcacttataacaacatatgagatcctcttgaaagataagactgtgctgggcagtattaactgggcctttctgggagtggatgaagcccatcggttgaagaatgatgactctttattgtataaaactctgattgatttcaagtccaaccataggctcctgattacggggacccctcttcagaattccctcaaagagctctggtccttgctgcactttattatgccggagaagtttgaattttgggaagattttgaagaagaccatgggaaggggagagagaatggctaccagagtcttcataaggtgctagagcctttccttctccggagagtcaaaaaagatgtggagaaatcccttcctgctaaagtggaacagattctcagggtggagatgtcagcccttcagaaacagtattacaagtggattctgaccaggaattacaaggctcttgccaaaggaacaagaggcagcacatctggttttcttaatattgtgatggaactgaaaaaatgttgcaaccactgctatctgattaaaccccctgaagaaaatgaaagggaaaatggacaggagattcttctgtccctcataaggagcagtgggaagttgattttattagacaaactgttgacaagacttcgagaaagggggaatcgagtgcttatcttctctcagatggtgagaatgttggatatcctggctgaatacctaactattaaacactatcctttccagcgtctggatggttccatcaagggagaaatccgaaaacaggcactggaccacttcaatgcagatgggtctgaggacttctgtttcctgctctcgacaagggctggtggcctgggaatcaatttggcttcagcggacacagtcgtcatctttgactctgactggaacccccagaatgacttgcaggcacaagcccgagcgcatagaattggtcagaagaagcaggtaaatatttaccgcttagttacaaaggggactgtggaggaggagatcatagaacgggccaaaaagaagatggtattagatcatctggtgattcagcgcatggacaccactggccggacgatcctggaaaacaactcaggaaggtccaactcaaatccttttaataaagaagagctgacagctattttgaaatttggagcagaggatctcttcaaagaactggaaggggaggaatcagaacctcaggaaatggatatagatgaaattttgcggttggctgaaacgagagagaatgaagtgtcaacaagtgcaacagatgaacttctatcacagtttaaggttgccaactttgcaacatggatacagaagaggagacgggatcctc

SEQ ID NO: 458775 - DNA, 4017 bp, Homo sapiens
  misc_feature (3498)..(3501): n is a, c, g, or t
  misc_feature (3575)..(3575): n is a, c, g, or t
  misc_feature (3582)..(3582): n is a, c, g, or t
gggattttcagtgactgggagccatggacatgagataggatctgaggctttatctatattttgggtgattctgccggtggagacagataaaaagcctcaggggaagcagctacagacccgagcggattacttgttgaagctgctcagaaagggtctggagaagaagggggctgtgacaggtggggaagaggccaaattaaagaagcggaagcctcgggtaaagaaggaaaacaaagtgcccaggctgaaagaggagcatggaattgagctttcatctcctaggcattcagataatccatcagaagagggagaagtgaaagatgatggcttggaaaaaagtccaatgaaaaaaaaacagaagaagaaagagaacaaggagaacaaggagaaacaaatgagttctaggaaagacaaagaaggggacaaggaaagaaagaagtcaaaagataagaaagagaagcctaaaagtggtgatgccaaatcttcgagtaaatcaaagcgatctcagggtcctgtccatattacagcaggaagtgaacctgtccccattggagaggatgaggatgatgatctggaccaggagacattcagcatatgtaaggagaggatgaggcccgtgaaaaaggcactgaaacagctcgacaaacctgacaaggggctcaacgtgcaagaacagctggaacacacccggaactgcctgctgaaaatcggagaccggatagccgagtgccttaaagcctactcagatcaggagcacatcaaactctggaggaggaacctatggatttttgtttccaagtttacagaatttgatgctcgaaaactgcataagttatacaagatggctcataagaaaaggtctcaagaagaagaggagcaaaagaagaaagacgacgtgactgggggtaagaaaccatttcgtccagaggcctcaggctccagccgggactctctgatatctcagtcccatacctcacacaaccttcaccctcagaagcctcatttgcctgcctcccatggcccacagatgcatggacacccaagagataactacaatcaccccaacaagagacacttcagtaatgcagatcgaggagactggcagagggaaagaaagttcaactatggtggtggcaacaacaatccaccatggggaagcgacaggcaccatcagtatgagcagcactggtacaaggaccaccattatggggaccggcgacatatggatgcccaccgttccggaagctatcgacccaacaacatgtccagaaagaggccttatgaccagtacagcagtgaccgagaccaccggggacacagagattattatgacaggtatgcaaaaggctgtgagacaccaggtgccaacctttgccaggagctgtttctagggagaaagtgacgtatacatgaatgtatttatctatcaaattactgaagatctcatcatgcatgtgtcagccacagcgaatcccatgtcttggttataggttttatgttttgttttctgggtcatagggagcacatttcacctgtgcaggaaaagagttttctgccgtcttttgaggaaatctagtgaagaggtcgccataaaatattagagtcaacaaccaaaattattaagctctgtgcgaggctgtcagccacactaggtatcagggatcccgagatgggtaccagcccacagtccttacctgccacgagcccataattgaagagtcaaagtcttctgaagctgcaccctctttacttcagtacaatgccaccagtagtacgatgagccaaagctttacattgtgagagtagcaagtccagggagagctaaagaggttttatctgtatttcctaatttcaaatcttggataatttaacctcatagcagctttggttttccctgggctgatgatgtgcgtcatttgcactgtaccttgaatttacagtgggaaaatttcatataaacgtgtcaaagtcgtgctttgtttttggaagatctggtaacagcagcccgcattagcagagagctgtagctgagtagctgccacctcgttgggagactgcccctcgctcccacccttctctattgtctggacccagtgggcatcttgccctgcgttcttctagtaggtctgtatttctatttgatgtcactttccttttgcctgaaggactttttctgctggtgataaactctttcagtgtttgtatatatgcctgaaaaagtattttgccttcatttttgaaagtagtttttgctgagtgtatacatttttggctttacagtttctttcagtgctttaaagatgtacctctgctatttacttgcattgttttgtgatgaaaaatctgtcatccttatctttgttcctctttacataatgttccttttaaaaaaaatcactgattatgatgtgccttggtgtatttttccttggtttcttgtgcttggaaatttttgaacttcttggatctgtgggtttattgtttccataaaatttggaaatttttacaatcttcttcaaatattttttctgatcccccactctctcttcttctttggagattctcattacacctatattagcttgcttgaagttgtctcacagctcacttgtattctgttgacttttaaaaaattatgctttctgtttcactgtggatagtttctattgctacctcttcaagttcactaatactttccttttcaatgtcaagactgctgtgaggcccatccagtgtactttgcattttatacattgtagttctaaaagttcggaaagttgtttttgggtctttttatatatgttctgtgtctaaccttttaaaacctggaacacagatataacaatggttttgatgtccttgtctgcgaatcttatcacttgggtcagtttcagttgatacctcctcactgtgggtcttgctcccctggtgctttctgtgcctagtaatttttgtcagatgccagatgtaacatttaccttgttgggtgctggatatttctgtattcctgtaagtattctggagctttgttatgagttgcaggttatttggaagcagtttcctttttcaggtcttgctgttaagattcgttaggtagaaccagagcagtgctcagtcaagggctaatgattgcccacccccaaggtaaagagcctcattgcactctacccaattgcgttagtctgttttgcaggaatacctgaggctgggtaatttatagagaaaagagttttatttggcgcacagttccgcaggctgtacaagcatagcaccagcatctggttggcttctggagaggcctcagggagcttttactcatggtggaaggtgaagtggcagtaggcgtcccatggcaagagagggagcaagagagagaggaggaggtgccagcctcttttaaagcaccagctctcacgtgaactcagagaactcactcattatcacaaggacagcaccaagccatttatgagggatctgcccaaacacctcccactacannnnggaagagcccgagcgtggctttatcttgcactcatgcaaaagaaactggcagattatctgaaagtgcctatagncaataancatctcttaagcgagttctatgagcctgaggctttaatgatggaggaagaagggatggtgattgttggtctgctggtgggactcaatgttctcgatgccaatctctgcttgaaaggagaagacttggattctcaggttggagtaatagatttttccctctaccttaaggatgtgcaggatcttgatggtggcaaggagcatgaaagaattactgatgtccttgatcaaaaaattatgtggaagaacttaaccggcacttgagctgcacagttggggatcttcaaaccaagatagatggcttggaaaagactaactcaaagcttcaagaagagctttcagctgcaacagaccgaatttgctcacttcaagaagaacagcagcagttaagagaacaaaatgaattaattcgagaaagaagtgaaaagagtgtagaga

SEQ ID NO: 458776 - DNA, 128 bp, Homo sapiens
cagataaaaagcctcaggggaagcagctacagacccgagcggattacttgttgaagctgctcagaaagggtctggagaagaagggggctgtgacaggtggggaagaggtgagtacgctgccagctggt

SEQ ID NO: 458777 - DNA, 2377 bp, Homo sapiens
  misc_feature (13)..(13): n is a, c, g, or t
agtaattccgggnagctcgccttacaactccgcgcggcctcggccccctgcgccgcccgccccacaacaaaactcagcgcagcgctcccgggcgcccggttcagagcgacctgcggctcagagcggaggggagactgaccggagcgcggatcgggacagcggccgggacagcggcgagacgcgcgtgtgtgagcgcgccggaccaagcgggcccagaagcgggtctgcagcccagagggcaccttctgcaaacatgtctgtggatcccctatccagcaaagctctaaagatcaagcgagagctgagcgagaacacgccgcacctgtcggacgaggcgctgatggggctgtcggtgcgcgagctgaaccggcatctgcgcgggctctccgccgaggaggtgacacggctcaagcagcggcgccgcacactcaaaaaccgtggctacgccgccagctgccgcgtgaagcgcgtgtgccagaaggaggagctgcagaagcagaagtcggagctggagcgcgaggtggacaagctggcgcgcgagaacgccgccatgcgcctggagctcgacgcgctgcgcggcaagtgcgaggcgctgcagggcttcgcgcgctccgtggccgccgcccgcgggcccgccacgctcgtggcgccggccagcgtcatcaccatcgtcaagtccaccccgggctcggggtctggccccgcccacggcccggaccccgcccacggcccggcctcctgctcctagtgcccgcccccgccatgcctcagccacgcccctccggcctcagctccctccccaaagtgcctgagcgccgcctctgtgcccaggtcccatttctctgcagcactggccccttggtgcacacacattcccttcgtgggccctgtcttcctcttgcagccccccaaactgggaccgaatgaccctgggaaggggaagttgggtaggttggggatggggcagaggtctggatctgggatcgcccttggctgaaagtttagcctttttagattgagagatacagagccggcttagagaacagctgttgggggagaagagggcacccctcatcttggaaactgctcttattgtgccaatatgccctccaaaccctcccaggattcaaagctaggtttggctgtctgtgacttacgggaccgtcctgctgagaaattgcactgaagagatgcccccacctctggttgggcctgggggtgcctggccttccgaaactaaaagagtgggtgggaagactagtgaaacccagttcacggatggggaaacaggcctgaggtcacatttcacttagtggttgtgttgggaccaaaacctgggtgtcctcactgctgccctgagtccagccatggttttcagggggacagtggacagggactcagaaatgtggtgggagggcctccctggcttgggagaccgctctctgcaagggagggggagagaagcagagggagagagaaggtgacacggatggaagagtgggaaggagctggcctggctcagccctaggctgtccctgcagccagggtgtccgggggctggccagtcagagaaagggggccatggactgctgtggcaaatagggagacaaggagacagaccctgcagtcctactacagtctggagtggggtcctaagaagaagggtcccacctcaacccctgtcagtgtccactgtggggtgggggctgacccctgcctttgattgtcattctcctgggaagcccagtctcagtccctcccccaacactgtccacactgcccctccccactgtttatttattgcacggatctaagttattctccccagccagagcccgagctcctgctccctgggaaaagtggcgtatggccctgagctgggctttatattttatatctgcaaataaatcacattttatcttatatttagggaaagccggagagcaacaacaaaaaatgtttaagccgggcgcggtggctcacatctgtaatcccagcactttgggagtccaaggagggggatcgcttgagtccaggagtttgagaccagcctggacaacatggtgaaaccccgtctctacaaaaaatacaaaaattagccatgcatggtggctcatgcctgtagtcccagctacttgggaggctgaggcaggaggatcacttaagcccagaaggcagaggttgtagtgagctgagatcgcaccactgcactccagcctgggcaacatagcaaaatcctgtctcaaaaaaaaagttaaaaaatattgcccggctcctagaatttatttatttcctgacttacagcaagcgagttatcgtcttctgtattttgtagactttctaaataaagtcaaattctttctttttccacagagaa

SEQ ID NO: 458778 - DNA, 1513 bp, Homo sapiens
  misc_feature (13)..(13): n is a, c, g, or t
  misc_feature (1402)..(1402): n is a, c, g, or t
  misc_feature (1463)..(1463): n is a, c, g, or t
agtaattccgggnagctcgccttacaactccgcgcggcctcggccccctgcgccgcccgccccacaacaaaactcagcgcagcgctcccgggcgcccggttcagagcgacctgcggctcagagcggaggggagactgaccggagcgcggatcgggacagcggccgggacagcggcgagacgcgcgtgtgtgagcgcgccggaccaagcgggcccagaagcgggtctgcagcccagagggcaccttctgcaaacatgtctgtggatcccctatccagcaaagctctaaagatcaagcgagagctgagcgagaacacgccgcacctgtcggacgaggcgctgatggggctgtcggtgcgcgagctgaaccggcatctgcgcgggctctccgccgaggaggtgacacggctcaagcagcggcgccgcacactcaaaaaccgtggctacgccgccagctgccgcgtgaagcgcgtgtgccagaaggaggagctgcagaagcagaagtcggagctggagcgcgaggtggacaagctggcgcgcgagaacgccgccatgcgcctggagctcgacgcgctgcgcggcaagtgcgaggcgctgcagggcttcgcgcgctccgtggccgccgcccgcgggcccgccacgctcgtggcgccggccagcgtcatcaccatcgtcaagtccaccccgggctcggggtctggccccgcccacggcccggaccccgcccacggcccggcctcctgctcctagtgcccgcccccgccatgcctcagccacgcccctccggcctcagctccctccccaaagtgcctgagcgccgcctctgtgcccaggtcccatttctctgcagcactggccccttggtgcacacacattcccttcgtgggccctgtcttcctcttgcagccccccaaactgggaccgaatgaccctgggaaggggaagttgggtaggttggggatggggcagaggtctggatctgggatcgcccttggctgaaagtttagcctttttagattgagagatacagagccggcttagagaacagctgttgggggagaagagggcacccctcatcttggaaactgctcttattgtgccaatatgccctccaaaccctcccaggattcaaagctaggtttggctgtctgtgacttacgggaccgtcctgctgagaaattgcactgaagagatgcccccacctctggttgggcctgggggtgcctggccttccgaaactaaaagagtgggtgggaagactagtgaaacccagttcacggatggggaaacaggcctgaggtcacatttcacttagtggttgtgttgggaccaaaaactaaggcggctgcagcaaagcagaccttcgcatcaacacagcagacaccaaaaacccagttgagagcnccgctctcctaccggcccggccccagcactcgctaagcttttcctgacaccttggaactgntgcacctgggcaaccaagccggaaaattaaacttccaagcaggccagtaa

SEQ ID NO: 458779 - DNA, 4326 bp, Homo sapiens
tagcgggcagttggccggaagtggggctgtgaggctcggagtcgccggaggagccagtatctgtgtcgccgccgcccgcggcgtccccggtttggtgttgcggcgcccaccttcgggaggatcaggctgcttctgatgcttggaagatatcctctcagccacaaagatggtaataaatctttgcctcccacagttcagaccaagaattcactgcaacaagatatcagctgatggttacgaagtagaaaatctcatctctgaagatctcacaaagagaagtcatggtttcaggacagagtatttcattaagccaccagtctatgtgacagtttcatttccctttaatgtggaaatctgtaggatcaacatagacctcacagctgggggaggtcagaacgtcactggcctggaaatgtacacatctgcctcatctagcagagtgtcttggaatacgccccagtgccggaccctgggcccagctgagccatctgtcccagacaaggaggcgttcaccttggtaggcaaagtcttactgaaaaaccagagccaagtggtgtttagccacaggggcttcaaggccaggcccccttttggcgcgatggaagccacactcccctcccctgctgttgtggcccaggagctctggaataaaggggctctttcccttagccacgtggcccacttaaggatctgtatcacccatgtgacaggcggcggtatcccttgtatcaagcggttggaagtgtggggtcagccggccaagacctgctcccaggaagtgatagacagcatcctgctggtcacctcagagaacctgcctcaggatgtggctctgcaggctccagccttgcccatggaaagtgactgtgaccctggggaccagcctgagagccagcaggctccctccagcctgcagaagctggccgagatcattcaggatgtgcctgaggagttcctggatcccatcaccctggagatcatgccttgtcccatgctgctgccctcaggcaaggtcatcgaccagagcacactggagaagtgtaaccgcagtgaagccacatggggccgagtgcccagtgaccctttcacgggggtagcttttactccgcactctcagcccctgcctcacccctccctcaaggcccggattgaccatttcctgctccagcactccatccctggctgccacctgcttgggagagcacagacggcattggcagtgatcccttcttccattgttctgccctctcagaaaaggaagatagagcaggctgaacatgtcccagacagtaactttggtgtaaatgcttcctgtttttctgccacaagccctttggtcttacccactacctcagagcacactgctaagaaaatgaaagccaccaatgagcccagcctgacacatatggactgctcgacaggtccactgtcccacgagcagaagctgtcacaaagcttggaaattgccttggcatccacccttggctctatgccctccttcacggcacggctgaccaggggacagctccagcaccttggcacaagagggagcaacacttcctggaggcctggcaccggctcggagcagcctgggagcatcctgggccccgaatgtgcctcctgcaaaagagtattttctccctacttcaaaaaggagccggtgtaccagctgccctgcggccacctcctgtgccgaccctgcctgggtgagaagcaacgctccctgcccatgacgtgcacagcctgccagcggccggttgctagccaagacgtgctgcgggtccacttctgagtgactgacctccactggaggagacccattgctgggaggagctgagggggaacaggagcagggccacagcacccctgaggtctggccaggccccaggcacagagctgcctgctccctcccggggctcttcttcatcacctcacggtatagcacattgcttctgcgctggtggcaatagggcaacaaagccataggccagagggcggggggatgtccctgcctccctgccaccccccctgcctgagcccaggacccactggagccagccccaccctaggcaggaagacccctgctgagggcccccccgtgcagtccgcatacccccctgtccagcagggcactgtgggtggctcaccctagattgtggcccagatctcaggagtctctgccttcagggtcatccaaaagtggaccttgggagcagtgggggtgtctgtggagtgcatgactcagccccccgactcgcagccttaataaagcgatggttgacgtctgctgtgggtttcctcctggtggagtgcctgtctgtgtcacacactcctgtcgcccacctgcacccacacaagtggagctcacagggtagctgtgtgcagtcactgcagcttgccaggctgtcattcctgtcgacgacctgaaaggacacaaactggaattttcaggtctgtcccctgcatggggactcagaacccaggtttgcaggtgggcatacgtggtgggagggtggagggctccctctggccagtgccagctgtgctcagctggcttcagaaactgctccctgagggggagcgcagcgtttcctcatgcagttggtttcaggaaaaatacttgtttataggctgcatccttttttcagcccaacatttagctttatggagtgccaaagggaaaatatatccatatccctacaacttggtactctatcagattccagccactagaagaacctcagtgagaaaacacacccgcctttccctgttcccttctaagcacgtttgggaaggaacagcctaaagatgctttgtaaagctgtattttacccttgagcttagccgcgggtccctgtgaaccggcacattcctttcctttaggccgtccagagctctagtccacacccaatactttagagatctgggtttggggttagttgctttttttttttttttttttaattgagacagggttggtctctgttgcccaagcttgagggcagtggtgcaatcataactcattgcagcctcgaactcctgggcttaagggatccttctacctcagcctcccaggtagcaggaactataggcatgtgccaccatgcccagctaatttttttattttttgtagagacaaggtcttgctatgttgtccagactggtctcaaactcctgggctcaagcgatactcccagagtgcttggattgcaggcatgagccacttcgcctagccaagcctgcatttttttgagttcctacatcatttgtccacaaagatggcttcagagaggtggtcacatgctttgctctgcttcctcttggcactgaccttgatgcagccttcacatgagatttgagggtccgcatggatggcctgtgccgccctcgctggcgaggctcctgtgtgcccctggctttctgggtctgtgcctctccagaatcttgtcttaccctccggtgtgcttgtgttcttagaaaagccccagcatggccgggcatggtggctcatgcctattatcccagcactttgggaggccaaggtgggtggatcacttgaggtcaggagttcgagaccagcctggccaacatggcaagaccccatctctactaaaaatacaaggattagctgggcatggtggtgtgtgcctgtaatgccagctactcaggaggctgaggcatgagaatcgcttgagccggggaggcagaggttgcagtgagccgagatcgcaccactgtactccagcctgggcgacggagtgagactccctctcaaaaaaagaaaaaagccccagcatgtagcaaaagcatttcttggtgagtgtgggggctggtgattcccaccttcaccctgtcatggtctcagggaacagcctgcttcccaccagcagcttgacacccacagtgtgctctggctgctgggagcccatctctcggagaaaccctgtccacccaaccccgagagccctagcgtgcagtcagcgtcagcacggcgctcccagatgagggccggactgcctccccttaagcagctgtgttggaggtactgcccagaccgctgcaggtccctggggatctgcatttctaacaggctcctgcccccaagactgctctggtggaaaatccagcctgggagcccctggagtggcaggccctgtcctgggtacaggtggagccacccccaggagttgcgtgtgtttttcttaattgaaagacttcccccaaaaggaagtggtcttttcactacccttgccagaaacatgctaggcaccactgggctctgtttctgtcccctagaaaatgggaataaaatttcttttgctgtca

SEQ ID NO: 458780 - DNA, 8229 bp, Homo sapiens
  misc_feature (2785)..(2785): n is a, c, g, or t
  misc_feature (2800)..(2800): n is a, c, g, or t
  misc_feature (2803)..(2803): n is a, c, g, or t
  misc_feature (2812)..(2812): n is a, c, g, or t
  misc_feature (2850)..(2851): n is a, c, g, or t
  misc_feature (3603)..(3603): n is a, c, g, or t
  misc_feature (5223)..(5223): n is a, c, g, or t
tagcgggcagttggccggaagtggggctgtgaggctcggagtcgccggaggagccagtatctgtgtcgccgccgcccgcggcgtccccggtttggtgttgcggcgcccaccttcgggaggatcagctgcttctgatgcttggaagatatcctctcagccacaaagatggtaataaatctttgcctcccacagttcagaccaagaattcactgcaacaagatatcagctgatggttacgaagtagaaaatctcatctctgaagatctcacaaagagaagtcatggtttcaggacagagtatttcattaagccaccagtctatgtgacagtttcatttccctttaatgtggaaatctgtaggatcaacatagacctcacagctgggggaggtcagaacgtcactggcctggaaatgtacacatctgcctcatctagcagagtgtcttggaatacgccccagtgccggaccctgggcccagctgagccatctgtcccagacaaggaggcgttcaccttggtaggcaaagtcttactgaaaaaccagagccaagtggtgtttagccacaggggcttcaaggccaggcccccttttggcgcgatggaagccacactcccctcccctgctgttgtggcccaggagctctggaataaaggggctctttcccttagccacgtggcccacttaaggatctgtatcacccatgtgacaggcggcggtatcccttgtatcaagcggttggaagtgtggggtcagccggccaagacctgctcccaggaagtgatagacagcatcctgctggtcacctcagagaacctgcctcaggatgtggctctgcaggctccagccttgcccatggaaagtgactgtgaccctggggaccagcctgagagccagcaggctccctccagcctgcagaagctggccgagatcattcaggatgtgcctgaggagttcctggatcccatcaccctggagatcatgccttgtcccatgctgctgccctcaggcaaggtcatcgaccagagcacactggagaagtgtaaccgcagtgaagccacatggggccgagtgcccagtgaccctttcacgggggtagcttttactccgcactctcagcccctgcctcacccctccctcaaggcccggattgaccatttcctgctccagcactccatccctggctgccacctgcttgggagagcacagacggcattggcagtgatcccttcttccattgttctgccctctcagaaaaggaagatagagcaggctgaacatgtcccagacagtaactttggtgtaaatgcttcctgtttttctgccacaagccctttggtcttacccactacctcagagcacactgctaagaaaatgaaagccaccaatgagcccagcctgacacatatggactgctcgacaggtccactgtcccacgagcagaagctgtcacaaagcttggaaattgccttggcatccacccttggctctatgccctccttcacggcacggctgaccaggggacagctccagcaccttggcacaagagggagcaacacttcctggaggcctggcaccggctcggagcagcctgggagcatcctgggccccgaatgtgcctcctgcaaaagagtattttctccctacttcaaaaaggagccggtgtaccagctgcctgcggccacctcctgtgccgaccctgcctgggtgagaagcaacgctccctgcccatgacgtgcacagcctgccagcggccggttgctagccaagacgtgctgcgggtccacttctgagtgactgacctccactggaggagacccattgctgggaggagctgagggggaacaggagcagggccacagcacccctgaggtctggccaggccccaggcacagagctgcctgctccctcccggggctcttcttcatcacctcacggtatagcacattgcttctgcgctggtggcaatagggcaacaaagccataggccagagggcggggggatgtccctgcctccctgccaccccccctgcctgagcccaggacccactggagccagccccaccctaggcaggaagacccctgctgagggcccccccgtgcagtccgcatacccccctgtccagcagggcactgtgggtggctcaccctagattgtggcccagatctcaggagtctctgccttcagggtcatccaaaagtggaccttgggagcagtgggggtgtctgtggagtgcatgactcagccccccgactcgcagccttaataaagcgatggttgacgtctgctgtgggtttcctcctggtggagtgcctgtctgtgtcacacactcctgtcgcccacctgcacccacacaagtggagctcacagggtagctgtgtgcagtcactgcagcttgccaggctgtcattcctgtcgatgacctgaaaggacacaaactggaattttcaggtctgtcccctgcatggggactcagaacccaggtttgcaggtgggcatacgtggtgggagggtggagggctccctctggccagtgccagctgtgctcagctggcttcagaaactgctccctgagggggagcgcagcgtttcctcatgcagttggtttcaggaaaaatacttgtttataggctgcatccttttttcagcccaacatttagctttatggagtgccaaagggaaaatatatccatatccctacaacttggtactctatcagattccagccactagaagaacctcagtgagaaaacacacccgcctttccctgttcccttctaagcacgnttgggaaggaacagnctnaagatgctntgtaaagctgtattttacccttgagcttagccgcgggnncctgtgaaccggcacattcctttcctttaggccgtccagagctctagtccacacccaatactttagagatctgggtttggggttagtagcttttttatttttttttcaattgagacagggtgggcctctgttgcccaagcttgagggcagtggtgcaatcataactcattgcagcctcgaacctcctgggcttaagggatccttctacctcagtctcccaggtagcaggaactataggcatgtgccaccatgcccagctaatatgacatttttggtgacagcacaaggtcttgctgtgttgttcaggctggtctcaaactcctggcctcaagcaatccttctgcctcagcttcccaaagtgttgggattataggcgtggccaagtttttctaatttttaaaaagctggctatctgcatttatagaaatagtgtgtagcagagatcagcagactttttatgtaatagaccaaacactaaatatgctttgcaggccatacaatctgccacagttacacagttctgctcttgtagcaggaaagcagacatagacaatatataatgaatggcctagctatgttctgaaaaaaccttgtttacaaaaacatgtgaagagctagatttgggccccaggacatagtctgctcacccttgatctgaaccacagattgaaatttggtgggcagaatggtccacaggtggtcaggcatggtggctgatgcctgtaatactagcacttcaggaggccagggtnggaggatcacttgagcccaggagtttgagaccagccttggcaacattgtgagactccatctccacacacacacacacacaaacacacacacaaacacacactaactgggtttggtggtgtgcacctgtagtttttgctacttcaagaggctgaggctgaagtgggaggattgcttgaagtgggaggtcaaagctgcagttatcatgccactatactccaacctgggtgacagagtgagactgtctcaaaaaagaaaaaaagaatggtccacaagccacagtaaagaaccaagtgtataaaaatttagtgtgagagaattctgctctgattcacacagaaattcatacatatgttcctgccatctagagaagcctgtgtagctgggctactggaacagagccactgacctgccctgctgttctttgatgaactaaatgatgatgtgctatgggctttggaagaaagtggctgacagcagagttaggcaggcatttcagaaagtcattctggcacccttggaacttttatggagttttctgcagcaacagccctgtctggtacatcagttgacaactcaggtctccttgggtcttgcttgtcaggctttggcacttaagtggaaagaaaaagaataagcattaaggaaagcgagagcacagcagaatcaatttcatagtctctcatggtttctgccatgggagaaaaatgggcattatactgctcacaggcagaataaagactcactggaaacattgctaagctgccttctccagaagatgtcagcggggcagttgcgtcaattggcgttccctgaaccctgagcccagctttggggtactctttgcttcccacccgtgaagtgacagtgagcagaccctcaaccttctgctttctcccaccaaaatgagtgagttttttagtatactttctaataacaccattactctgtgactactctctaatagtgactcaaattctgttataagcttcctgaagaggagagtaggcatcttctaaaaagtaaaagaacagcattagaatgacagaattttggaattaacagttttgcgctataagaacagggagggttatcgtaggtataactaattaaatcttttttttttttttttgagatggagtctcactttttcgcctaggctggagtgcagtggcacggtcttggctcaccgcaacctctgcctcccgggttcaagggattctcctgcctcagcctcctgagtagctgggattacaggtgtgtgctgccacacctgggtaattttttgtatttttaatagagacgggatttcgccttgttggccaggctggtcttgaactcctgacctcaagtgatctgcctgcctcggcctcccaaagtgctggcattacaggcatgagccacccacacccagccaactaattatcttttataccagatcccactttttacttagtgctgttagcatagcagtttttataaacattcttcaggtaggacctgtttgccttgatatcaaagagatggaaggagttgctcacttttgttcccagccttctttctagaaatctgccttccttcttcctatcaaatgttagcggagcaccgtctcttctttagcngtcactgcttgccttgtacagtgaaggaagtctggtgagcagcagtccaggaactgcccacgggtaccctgggttgggggttttcctaggcctttacacagaccgcagaatttatccttgatatatgctgtcatgtggtttgggcatttactagcattgaacttatttgagtagacagcagtgtagtttcaacctgttttttataatgtgtaaatttggatgcttttataggtagaagccactcattcttcatctacccttttttcagtatctggcaccaattctgacccagtcatttgtgatccctggctcttgtgatatgctgaagatttccaggcagtttttgtggaacacctccccgtccagctctaatcaagcaccatataaacaagaaattgcctggtcaaatctgtgaggactgtattctgactgccaaagagatcaatactgacaccagaatggcagctactctcaagtcattaaaacttgtaagataccgagcattttgcagtccttctgcctttggtgcagtccgaagtgtgtcatactggaatgtgagcagcacacagcatgggggacaggaccctccagaacacattagcctctgccattctgccaaaaaagttaagaacatatgtagcaccttctcttctcggagaatcctgacaaccagcagtgcccacccaggtttggaattcagcaagacttcttcctctaaggccagtacattgcagctgggctcacccagggccacaggagttgatgaagaggacgtagaagtgtttgattcctttgaaaacatgcgagttttcctacagctaagaccagaataccgtgttcacagctataatgcatctgagacttctcagctcctgtctgtttcagaaggtgaactaattttgcacaaagtcagagttaatcaaaataatctccaggctcaagtcattgttgattatttgtgtaagctgagctctttgcctgcagagcagcatcctgtcttgctgggcagtaccagctttgctctgctctgccagctgagtgtgaagaagatacagctctttgatacccaagatctgatcaatgttttgaaagcttttgtcattttaggaatccctcactcccattcaatgctagatgtgtatgagaccaagtgttgccatcaggtatgggagatgaatatggatcagctccttttggtggctgatctctggaggtacttaggccgcaaagtacctaggtttttaaacattttttctagttatcttaatttgcactggaaggatctatccttgtctcagctagttcacttaatttatgttataggtgaaaatcgtcaggtatcccaggacctaatgcaaaaattggaatcattgatccttaaatatatagatttgatcaatttggaggaggttggtaccatctgtttggggttctttaaatcaagtactaatctctctgaatttgtcatgcggaaaattggagacttggcttgtgctaacattcagcatctgagtagtcgctccttagtgaatattgttaaaatgttccgtttcactcacgtggatcacatcaatttcatgaagcagattggagagatagctcctcagcgaattccttccctgggagttcaaggtgtcatgcacctgactctttactgctcggccttacgcttcctgaatgaaggagtaatgaatgcagtggctgcgtctttgcctcctagagtggcacactgtcgaagtaaagatgttgccaagattctgtggtcatttggaactctgaattataagccacccaatgcagaagaattttactccagcctgataagtgagattcacagaaagatgcctgaattcaaccagtacccagaacacctgcccacctgcctgctgggcctggcatttttggagtactttccagtagagttaattgatttcgctctcagtccagggtttgtcaggttagctcaggagagaactaagtttgacctccttaaggaactatataccctcgatggtacagttggcattgagtgtccagattacagaggcaatcgtcttagtactcaccttcagcaagaggggtctgaattgctgtggtatttagcagagaaggatatgaattcaaagcctgaattcttagaaactgtctttttactggagaccatgctgggggggccccagtacgtcaagcaccatatgattttgcctcatacccgatcttctgacttagaggtccagcttgatgttaacctgaagccattaccatttaatagagaagccacgccggctgaaaatgtagccaaattaaggcttgagcatgtgggagtcagccttacagatgatttgatgaataagttactaaaagggaaagcaagaggacatttccagggcaaaactgagtcagagcctgggcagcagcccatggagttggagaataaggcagctgtacctctggggggcttcctttgcaatgtagcagataaatcaggggccatggagatggctggcctgtgccccgcagcctgcatgcagaccccaagaatgaagctggctgttcagttcacaaacaggaaccagtattgctatggctccagggatctccttggactgcacaatatgaagaggcggcagctggctcggcttggctaccgtgtggtagagttatcctactgggaatggctcccactactgaaacgaactcgcttagaaaagttggcgtttcttcatgagaaagtattcacctctgctctctgaagggcatttaggggcatttctatggcaaagctataggtgtatactgtaccaggtgttgcaaaatgattataaaagccagaatgtaagtttggcgataaaatagtgtgttgaggagacttaattgtatccaaggcaggttagagctagtgtatgttactgtgaattgtaatgtagttggattgtacaaattactgcaaatgtatacatgttactcttagtaaataataaacatcttaatatgtcctacggtcaa

SEQ ID NO: 458781 - DNA, 8779 bp, Homo sapiens
  misc_feature (2785)..(2785): n is a, c, g, or t
  misc_feature (2800)..(2800): n is a, c, g, or t
  misc_feature (2803)..(2803): n is a, c, g, or t
  misc_feature (2812)..(2812): n is a, c, g, or t
  misc_feature (2850)..(2851): n is a, c, g, or t
  misc_feature (3603)..(3603): n is a, c, g, or t
  misc_feature (5223)..(5223): n is a, c, g, or t
  misc_feature (8474)..(8474): n is a, c, g, or t
  misc_feature (8531)..(8531): n is a, c, g, or t
  misc_feature (8591)..(8591): n is a, c, g, or t
  misc_feature (8650)..(8650): n is a, c, g, or t
  misc_feature (8660)..(8660): n is a, c, g, or t
  misc_feature (8664)..(8664): n is a, c, g, or t
  misc_feature (8712)..(8712): n is a, c, g, or t
  misc_feature (8735)..(8735): n is a, c, g, or t
tagcgggcagttggccggaagtggggctgtgaggctcggagtcgccggaggagccagtatctgtgtcgccgccgcccgcggcgtccccggtttggtgttgcggcgcccaccttcgggaggatcagctgcttctgatgcttggaagatatcctctcagccacaaagatggtaataaatctttgcctcccacagttcagaccaagaattcactgcaacaagatatcagctgatggttacgaagtagaaaatctcatctctgaagatctcacaaagagaagtcatggtttcaggacagagtatttcattaagccaccagtctatgtgacagtttcatttccctttaatgtggaaatctgtaggatcaacatagacctcacagctgggggaggtcagaacgtcactggcctggaaatgtacacatctgcctcatctagcagagtgtcttggaatacgccccagtgccggaccctgggcccagctgagccatctgtcccagacaaggaggcgttcaccttggtaggcaaagtcttactgaaaaaccagagccaagtggtgtttagccacaggggcttcaaggccaggcccccttttggcgcgatggaagccacactcccctcccctgctgttgtggcccaggagctctggaataaaggggctctttcccttagccacgtggcccacttaaggatctgtatcacccatgtgacaggcggcggtatcccttgtatcaagcggttggaagtgtggggtcagccggccaagacctgctcccaggaagtgatagacagcatcctgctggtcacctcagagaacctgcctcaggatgtggctctgcaggctccagccttgcccatggaaagtgactgtgaccctggggaccagcctgagagccagcaggctccctccagcctgcagaagctggccgagatcattcaggatgtgcctgaggagttcctggatcccatcaccctggagatcatgccttgtcccatgctgctgccctcaggcaaggtcatcgaccagagcacactggagaagtgtaaccgcagtgaagccacatggggccgagtgcccagtgaccctttcacgggggtagcttttactccgcactctcagcccctgcctcacccctccctcaaggcccggattgaccatttcctgctccagcactccatccctggctgccacctgcttgggagagcacagacggcattggcagtgatcccttcttccattgttctgccctctcagaaaaggaagatagagcaggctgaacatgtcccagacagtaactttggtgtaaatgcttcctgtttttctgccacaagccctttggtcttacccactacctcagagcacactgctaagaaaatgaaagccaccaatgagcccagcctgacacatatggactgctcgacaggtccactgtcccacgagcagaagctgtcacaaagcttggaaattgccttggcatccacccttggctctatgccctccttcacggcacggctgaccaggggacagctccagcaccttggcacaagagggagcaacacttcctggaggcctggcaccggctcggagcagcctgggagcatcctgggccccgaatgtgcctcctgcaaaagagtattttctccctacttcaaaaaggagccggtgtaccagctgcctgcggccacctcctgtgccgaccctgcctgggtgagaagcaacgctccctgcccatgacgtgcacagcctgccagcggccggttgctagccaagacgtgctgcgggtccacttctgagtgactgacctccactggaggagacccattgctgggaggagctgagggggaacaggagcagggccacagcacccctgaggtctggccaggccccaggcacagagctgcctgctccctcccggggctcttcttcatcacctcacggtatagcacattgcttctgcgctggtggcaatagggcaacaaagccataggccagagggcggggggatgtccctgcctccctgccaccccccctgcctgagcccaggacccactggagccagccccaccctaggcaggaagacccctgctgagggcccccccgtgcagtccgcatacccccctgtccagcagggcactgtgggtggctcaccctagattgtggcccagatctcaggagtctctgccttcagggtcatccaaaagtggaccttgggagcagtgggggtgtctgtggagtgcatgactcagccccccgactcgcagccttaataaagcgatggttgacgtctgctgtgggtttcctcctggtggagtgcctgtctgtgtcacacactcctgtcgcccacctgcacccacacaagtggagctcacagggtagctgtgtgcagtcactgcagcttgccaggctgtcattcctgtcgatgacctgaaaggacacaaactggaattttcaggtctgtcccctgcatggggactcagaacccaggtttgcaggtgggcatacgtggtgggagggtggagggctccctctggccagtgccagctgtgctcagctggcttcagaaactgctccctgagggggagcgcagcgtttcctcatgcagttggtttcaggaaaaatacttgtttataggctgcatccttttttcagcccaacatttagctttatggagtgccaaagggaaaatatatccatatccctacaacttggtactctatcagattccagccactagaagaacctcagtgagaaaacacacccgcctttccctgttcccttctaagcacgnttgggaaggaacagnctnaagatgctntgtaaagctgtattttacccttgagcttagccgcgggnncctgtgaaccggcacattcctttcctttaggccgtccagagctctagtccacacccaatactttagagatctgggtttggggttagtagcttttttatttttttttcaattgagacagggtgggcctctgttgcccaagcttgagggcagtggtgcaatcataactcattgcagcctcgaacctcctgggcttaagggatccttctacctcagtctcccaggtagcaggaactataggcatgtgccaccatgcccagctaatatgacatttttggtgacagcacaaggtcttgctgtgttgttcaggctggtctcaaactcctggcctcaagcaatccttctgcctcagcttcccaaagtgttgggattataggcgtggccaagtttttctaatttttaaaaagctggctatctgcatttatagaaatagtgtgtagcagagatcagcagactttttatgtaatagaccaaacactaaatatgctttgcaggccatacaatctgccacagttacacagttctgctcttgtagcaggaaagcagacatagacaatatataatgaatggcctagctatgttctgaaaaaaccttgtttacaaaaacatgtgaagagctagatttgggccccaggacatagtctgctcacccttgatctgaaccacagattgaaatttggtgggcagaatggtccacaggtggtcaggcatggtggctgatgcctgtaatactagcacttcaggaggccagggtnggaggatcacttgagcccaggagtttgagaccagccttggcaacattgtgagactccatctccacacacacacacacacaaacacacacacaaacacacactaactgggtttggtggtgtgcacctgtagtttttgctacttcaagaggctgaggctgaagtgggaggattgcttgaagtgggaggtcaaagctgcagttatcatgccactatactccaacctgggtgacagagtgagactgtctcaaaaaagaaaaaaagaatggtccacaagccacagtaaagaaccaagtgtataaaaatttagtgtgagagaattctgctctgattcacacagaaattcatacatatgttcctgccatctagagaagcctgtgtagctgggctactggaacagagccactgacctgccctgctgttctttgatgaactaaatgatgatgtgctatgggctttggaagaaagtggctgacagcagagttaggcaggcatttcagaaagtcattctggcacccttggaacttttatggagttttctgcagcaacagccctgtctggtacatcagttgacaactcaggtctccttgggtcttgcttgtcaggctttggcacttaagtggaaagaaaaagaataagcattaaggaaagcgagagcacagcagaatcaatttcatagtctctcatggtttctgccatgggagaaaaatgggcattatactgctcacaggcagaataaagactcactggaaacattgctaagctgccttctccagaagatgtcagcggggcagttgcgtcaattggcgttccctgaaccctgagcccagctttggggtactctttgcttcccacccgtgaagtgacagtgagcagaccctcaaccttctgctttctcccaccaaaatgagtgagttttttagtatactttctaataacaccattactctgtgactactctctaatagtgactcaaattctgttataagcttcctgaagaggagagtaggcatcttctaaaaagtaaaagaacagcattagaatgacagaattttggaattaacagttttgcgctataagaacagggagggttatcgtaggtataactaattaaatcttttttttttttttttgagatggagtctcactttttcgcctaggctggagtgcagtggcacggtcttggctcaccgcaacctctgcctcccgggttcaagggattctcctgcctcagcctcctgagtagctgggattacaggtgtgtgctgccacacctgggtaattttttgtatttttaatagagacgggatttcgccttgttggccaggctggtcttgaactcctgacctcaagtgatctgcctgcctcggcctcccaaagtgctggcattacaggcatgagccacccacacccagccaactaattatcttttataccagatcccactttttacttagtgctgttagcatagcagtttttataaacattcttcaggtaggacctgtttgccttgatatcaaagagatggaaggagttgctcacttttgttcccagccttctttctagaaatctgccttccttcttcctatcaaatgttagcggagcaccgtctcttctttagcngtcactgcttgccttgtacagtgaaggaagtctggtgagcagcagtccaggaactgcccacgggtaccctgggttgggggttttcctaggcctttacacagaccgcagaatttatccttgatatatgctgtcatgtggtttgggcatttactagcattgaacttatttgagtagacagcagtgtagtttcaacctgttttttataatgtgtaaatttggatgcttttataggtagaagccactcattcttcatctacccttttttcagtatctggcaccaattctgacccagtcatttgtgatccctggctcttgtgatatgctgaagatttccaggcagtttttgtggaacacctccccgtccagctctaatcaagcaccatataaacaagaaattgcctggtcaaatctgtgaggactgtattctgactgccaaagagatcaatactgacaccagaatggcagctactctcaagtcattaaaacttgtaagataccgagcattttgcagtccttctgcctttggtgcagtccgaagtgtgtcatactggaatgtgagcagcacacagcatgggggacaggaccctccagaacacattagcctctgccattctgccaaaaaagttaagaacatatgtagcaccttctcttctcggagaatcctgacaaccagcagtgcccacccaggtttggaattcagcaagacttcttcctctaaggccagtacattgcagctgggctcacccagggccacaggagttgatgaagaggacgtagaagtgtttgattcctttgaaaacatgcgagttttcctacagctaagaccagaataccgtgttcacagctataatgcatctgagacttctcagctcctgtctgtttcagaaggtgaactaattttgcacaaagtcagagttaatcaaaataatctccaggctcaagtcattgttgattatttgtgtaagctgagctctttgcctgcagagcagcatcctgtcttgctgggcagtaccagctttgctctgctctgccagctgagtgtgaagaagatacagctctttgatacccaagatctgatcaatgttttgaaagcttttgtcattttaggaatccctcactcccattcaatgctagatgtgtatgagaccaagtgttgccatcaggtatgggagatgaatatggatcagctccttttggtggctgatctctggaggtacttaggccgcaaagtacctaggtttttaaacattttttctagttatcttaatttgcactggaaggatctatccttgtctcagctagttcacttaatttatgttataggtgaaaatcgtcaggtatcccaggacctaatgcaaaaattggaatcattgatccttaaatatatagatttgatcaatttggaggaggttggtaccatctgtttggggttctttaaatcaagtactaatctctctgaatttgtcatgcggaaaattggagacttggcttgtgctaacattcagcatctgagtagtcgctccttagtgaatattgttaaaatgttccgtttcactcacgtggatcacatcaatttcatgaagcagattggagagatagctcctcagcgaattccttccctgggagttcaaggtgtcatgcacctgactctttactgctcggccttacgcttcctgaatgaaggagtaatgaatgcagtggctgcgtctttgcctcctagagtggcacactgtcgaagtaaagatgttgccaagattctgtggtcatttggaactctgaattataagccacccaatgcagaagaattttactccagcctgataagtgagattcacagaaagatgcctgaattcaaccagtacccagaacacctgcccacctgcctgctgggcctggcatttttggagtactttccagtagagttaattgatttcgctctcagtccagggtttgtcaggttagctcaggagagaactaagtttgacctccttaaggaactatataccctcgatggtacagttggcattgagtgtccagattacagaggcaatcgtcttagtactcaccttcagcaagaggggtctgaattgctgtggtatttagcagagaaggatatgaattcaaagcctgaattcttagaaactgtctttttactggagaccatgctgggggggccccagtacgtcaagcaccatatgattttgcctcatacccgatcttctgacttagaggtccagcttgatgttaacctgaagccattaccatttaatagagaagccacgccggctgaaaatgtagccaaattaaggcttgagcatgtgggagtcagccttacagatgatttgatgaataagttactaaaagggaaagcaagaggacatttccagggcaaaactgagtcagagcctgggcagcagcccatggagttggagaataaggcagctgtacctctggggggcttcctttgcaatgtagcagataaatcaggggccatggagatggctggcctgtgccccgcagcctgcatgcagaccccaagaatgaagctggctgttcagttcacaaacaggaaccagtattgctatggctccagggatctccttggactgcacaatatgaagaggcggcagctggctcggcttggctaccgtgtggtagagttatcctactgggaatggctcccactactgaaacgaactcgcttagaaaagttggcgtttcttcatgagaaagtattcacctctgctctctgaagggcatttaggggcatttctatggcaaagctataggtgtatactgtaccaggtgttgcaaaatgattataaaagccagaatgtaagtttggcgataaaatagtgtgttgaggagacttaattgtatccaaggcaggttagagctagtgtatgttactgtgaattgtaatgtagttggattgtacaaattactgcaaatgtatacatgttactcttagtaaataataaacatcttaatatgtcctacggtcaagtaagtccttgttggatttttctttctgtttaccagccttatgtcacagagtttttagaataaaagtatagtcagacattatataaagccaatttttaaaaattttattcttttctggagaccctccccccacccttacagattttttttttttttaaagccagtttttttgtttgttttttgagatggagtctcgctctgtcacccaggctggaatgcagtggcacaatctcagctcactgcancctccgcctcccagattcaaacaattctcctgctcatgcctgttatctcagcctttnggaggccaaagtgggaagattgcttgagtccaggagtttgagaccagcctggccaacatngtgagaccttgcctctgcaaaaaaataaaattagccaggcgtggtggtgtgcccccgcngtcctagctnctcnggaggctgggtgggaggatctgttgagcctgggaggttgaggctgcantgagctgagatgacaccactgtnctttagcctggatgacagagcaagaccctaactcaaaaaaaaaa

SEQ ID NO: 458782 - DNA, 8574 bp, Homo sapiens
  misc_feature (2785)..(2785): n is a, c, g, or t
  misc_feature (2800)..(2800): n is a, c, g, or t
  misc_feature (2803)..(2803): n is a, c, g, or t
  misc_feature (2812)..(2812): n is a, c, g, or t
  misc_feature (2850)..(2851): n is a, c, g, or t
  misc_feature (3603)..(3603): n is a, c, g, or t
  misc_feature (5223)..(5223): n is a, c, g, or t
tagcgggcagttggccggaagtggggctgtgaggctcggagtcgccggaggagccagtatctgtgtcgccgccgcccgcggcgtccccggtttggtgttgcggcgcccaccttcgggaggatcagctgcttctgatgcttggaagatatcctctcagccacaaagatggtaataaatctttgcctcccacagttcagaccaagaattcactgcaacaagatatcagctgatggttacgaagtagaaaatctcatctctgaagatctcacaaagagaagtcatggtttcaggacagagtatttcattaagccaccagtctatgtgacagtttcatttccctttaatgtggaaatctgtaggatcaacatagacctcacagctgggggaggtcagaacgtcactggcctggaaatgtacacatctgcctcatctagcagagtgtcttggaatacgccccagtgccggaccctgggcccagctgagccatctgtcccagacaaggaggcgttcaccttggtaggcaaagtcttactgaaaaaccagagccaagtggtgtttagccacaggggcttcaaggccaggcccccttttggcgcgatggaagccacactcccctcccctgctgttgtggcccaggagctctggaataaaggggctctttcccttagccacgtggcccacttaaggatctgtatcacccatgtgacaggcggcggtatcccttgtatcaagcggttggaagtgtggggtcagccggccaagacctgctcccaggaagtgatagacagcatcctgctggtcacctcagagaacctgcctcaggatgtggctctgcaggctccagccttgcccatggaaagtgactgtgaccctggggaccagcctgagagccagcaggctccctccagcctgcagaagctggccgagatcattcaggatgtgcctgaggagttcctggatcccatcaccctggagatcatgccttgtcccatgctgctgccctcaggcaaggtcatcgaccagagcacactggagaagtgtaaccgcagtgaagccacatggggccgagtgcccagtgaccctttcacgggggtagcttttactccgcactctcagcccctgcctcacccctccctcaaggcccggattgaccatttcctgctccagcactccatccctggctgccacctgcttgggagagcacagacggcattggcagtgatcccttcttccattgttctgccctctcagaaaaggaagatagagcaggctgaacatgtcccagacagtaactttggtgtaaatgcttcctgtttttctgccacaagccctttggtcttacccactacctcagagcacactgctaagaaaatgaaagccaccaatgagcccagcctgacacatatggactgctcgacaggtccactgtcccacgagcagaagctgtcacaaagcttggaaattgccttggcatccacccttggctctatgccctccttcacggcacggctgaccaggggacagctccagcaccttggcacaagagggagcaacacttcctggaggcctggcaccggctcggagcagcctgggagcatcctgggccccgaatgtgcctcctgcaaaagagtattttctccctacttcaaaaaggagccggtgtaccagctgcctgcggccacctcctgtgccgaccctgcctgggtgagaagcaacgctccctgcccatgacgtgcacagcctgccagcggccggttgctagccaagacgtgctgcgggtccacttctgagtgactgacctccactggaggagacccattgctgggaggagctgagggggaacaggagcagggccacagcacccctgaggtctggccaggccccaggcacagagctgcctgctccctcccggggctcttcttcatcacctcacggtatagcacattgcttctgcgctggtggcaatagggcaacaaagccataggccagagggcggggggatgtccctgcctccctgccaccccccctgcctgagcccaggacccactggagccagccccaccctaggcaggaagacccctgctgagggcccccccgtgcagtccgcatacccccctgtccagcagggcactgtgggtggctcaccctagattgtggcccagatctcaggagtctctgccttcagggtcatccaaaagtggaccttgggagcagtgggggtgtctgtggagtgcatgactcagccccccgactcgcagccttaataaagcgatggttgacgtctgctgtgggtttcctcctggtggagtgcctgtctgtgtcacacactcctgtcgcccacctgcacccacacaagtggagctcacagggtagctgtgtgcagtcactgcagcttgccaggctgtcattcctgtcgatgacctgaaaggacacaaactggaattttcaggtctgtcccctgcatggggactcagaacccaggtttgcaggtgggcatacgtggtgggagggtggagggctccctctggccagtgccagctgtgctcagctggcttcagaaactgctccctgagggggagcgcagcgtttcctcatgcagttggtttcaggaaaaatacttgtttataggctgcatccttttttcagcccaacatttagctttatggagtgccaaagggaaaatatatccatatccctacaacttggtactctatcagattccagccactagaagaacctcagtgagaaaacacacccgcctttccctgttcccttctaagcacgnttgggaaggaacagnctnaagatgctntgtaaagctgtattttacccttgagcttagccgcgggnncctgtgaaccggcacattcctttcctttaggccgtccagagctctagtccacacccaatactttagagatctgggtttggggttagtagcttttttatttttttttcaattgagacagggtgggcctctgttgcccaagcttgagggcagtggtgcaatcataactcattgcagcctcgaacctcctgggcttaagggatccttctacctcagtctcccaggtagcaggaactataggcatgtgccaccatgcccagctaatatgacatttttggtgacagcacaaggtcttgctgtgttgttcaggctggtctcaaactcctggcctcaagcaatccttctgcctcagcttcccaaagtgttgggattataggcgtggccaagtttttctaatttttaaaaagctggctatctgcatttatagaaatagtgtgtagcagagatcagcagactttttatgtaatagaccaaacactaaatatgctttgcaggccatacaatctgccacagttacacagttctgctcttgtagcaggaaagcagacatagacaatatataatgaatggcctagctatgttctgaaaaaaccttgtttacaaaaacatgtgaagagctagatttgggccccaggacatagtctgctcacccttgatctgaaccacagattgaaatttggtgggcagaatggtccacaggtggtcaggcatggtggctgatgcctgtaatactagcacttcaggaggccagggtnggaggatcacttgagcccaggagtttgagaccagccttggcaacattgtgagactccatctccacacacacacacacacaaacacacacacaaacacacactaactgggtttggtggtgtgcacctgtagtttttgctacttcaagaggctgaggctgaagtgggaggattgcttgaagtgggaggtcaaagctgcagttatcatgccactatactccaacctgggtgacagagtgagactgtctcaaaaaagaaaaaaagaatggtccacaagccacagtaaagaaccaagtgtataaaaatttagtgtgagagaattctgctctgattcacacagaaattcatacatatgttcctgccatctagagaagcctgtgtagctgggctactggaacagagccactgacctgccctgctgttctttgatgaactaaatgatgatgtgctatgggctttggaagaaagtggctgacagcagagttaggcaggcatttcagaaagtcattctggcacccttggaacttttatggagttttctgcagcaacagccctgtctggtacatcagttgacaactcaggtctccttgggtcttgcttgtcaggctttggcacttaagtggaaagaaaaagaataagcattaaggaaagcgagagcacagcagaatcaatttcatagtctctcatggtttctgccatgggagaaaaatgggcattatactgctcacaggcagaataaagactcactggaaacattgctaagctgccttctccagaagatgtcagcggggcagttgcgtcaattggcgttccctgaaccctgagcccagctttggggtactctttgcttcccacccgtgaagtgacagtgagcagaccctcaaccttctgctttctcccaccaaaatgagtgagttttttagtatactttctaataacaccattactctgtgactactctctaatagtgactcaaattctgttataagcttcctgaagaggagagtaggcatcttctaaaaagtaaaagaacagcattagaatgacagaattttggaattaacagttttgcgctataagaacagggagggttatcgtaggtataactaattaaatcttttttttttttttttgagatggagtctcactttttcgcctaggctggagtgcagtggcacggtcttggctcaccgcaacctctgcctcccgggttcaagggattctcctgcctcagcctcctgagtagctgggattacaggtgtgtgctgccacacctgggtaattttttgtatttttaatagagacgggatttcgccttgttggccaggctggtcttgaactcctgacctcaagtgatctgcctgcctcggcctcccaaagtgctggcattacaggcatgagccacccacacccagccaactaattatcttttataccagatcccactttttacttagtgctgttagcatagcagtttttataaacattcttcaggtaggacctgtttgccttgatatcaaagagatggaaggagttgctcacttttgttcccagccttctttctagaaatctgccttccttcttcctatcaaatgttagcggagcaccgtctcttctttagcngtcactgcttgccttgtacagtgaaggaagtctggtgagcagcagtccaggaactgcccacgggtaccctgggttgggggttttcctaggcctttacacagaccgcagaatttatccttgatatatgctgtcatgtggtttgggcatttactagcattgaacttatttgagtagacagcagtgtagtttcaacctgttttttataatgtgtaaatttggatgcttttataggtagaagccactcattcttcatctacccttttttcagtatctggcaccaattctgacccagtcatttgtgatccctggctcttgtgatatgctgaagatttccaggcagtttttgtggaacacctccccgtccagctctaatcaagcaccatataaacaagaaattgcctggtcaaatctgtgaggactgtattctgactgccaaagagatcaatactgacaccagaatggcagctactctcaagtcattaaaacttgtaagataccgagcattttgcagtccttctgcctttggtgcagtccgaagtgtgtcatactggaatgtgagcagcacacagcatgggggacaggaccctccagaacacattagcctctgccattctgccaaaaaagttaagaacatatgtagcaccttctcttctcggagaatcctgacaaccagcagtgcccacccaggtttggaattcagcaagacttcttcctctaaggccagtacattgcagctgggctcacccagggccacaggagttgatgaagaggacgtagaagtgtttgattcctttgaaaacatgcgagttttcctacagctaagaccagaataccgtgttcacagctataatgcatctgagacttctcagctcctgtctgtttcagaaggtgaactaattttgcacaaagtcagagttaatcaaaataatctccaggctcaagtcattgttgattatttgtgtaagctgagctctttgcctgcagagcagcatcctgtcttgctgggcagtaccagctttgctctgctctgccagctgagtgtgaagaagatacagctctttgatacccaagatctgatcaatgttttgaaagcttttgtcattttaggaatccctcactcccattcaatgctagatgtgtatgagaccaagtgttgccatcaggtatgggagatgaatatggatcagctccttttggtggctgatctctggaggtacttaggccgcaaagtacctaggtttttaaacattttttctagttatcttaatttgcactggaaggatctatccttgtctcagctagttcacttaatttatgttataggtgaaaatcgtcaggtatcccaggacctaatgcaaaaattggaatcattgatccttaaatatatagatttgatcaatttggaggaggttggtaccatctgtttggggttctttaaatcaagtactaatctctctgaatttgtcatgcggaaaattggagacttggcttgtgctaacattcagcatctgagtagtcgctccttagtgaatattgttaaaatgttccgtttcactcacgtggatcacatcaatttcatgaagcagattggagagatagctcctcagcgaattccttccctgggagttcaaggtgtcatgcacctgactctttactgctcggccttacgcttcctgaatgaaggagtaatgaatgcagtggctgcgtctttgcctcctagagtggcacactgtcgaagtaaagatgttgccaagattctgtggtcatttggaactctgaattataagccacccaatgcagaagaattttactccagcctgataagtgagattcacagaaagatgcctgaattcaaccagtacccagaacacctgcccacctgcctgctgggcctggcatttttggagtactttccagtagagttaattgatttcgctctcagtccagggtttgtcaggttagctcaggagagaactaagtttgacctccttaaggaactatataccctcgatggtacagttggcattgagtgtccagattacagaggcaatcgtcttagtactcaccttcagcaagaggggtctgaattgctgtggtatttagcagagaaggatatgaattcaaagcctgaattcttagaaactgtctttttactggagaccatgctgggggggccccagtacgtcaagcaccatatgattttgcctcatacccgatcttctgacttagaggtccagcttgatgttaacctgaagccattaccatttaatagagaagccacgccggctgaaaatgtagccaaattaaggcttgagcatgtgggagtcagccttacagatgatttgatgaataagttactaaaagggaaagcaagaggacatttccagggcaaaactgagtcagagcctgggcagcagcccatggagttggagaataaggcagctgtacctctggggggcttcctttgcaatgtagcagataaatcaggggccatggagatggctggcctgtgccccgcagcctgcatgcagaccccaagaatgaagctggctgttcagttcacaaacaggaaccagtattgctatggctccagggatctccttggactgcacaatatgaagaggcggcagctggctcggcttggctaccgtgtggtagagttatcctactgggaatggctcccactactgaaacgaactcgcttagaaaagttggcgtttcttcatgagaaagtattcacctctgctctctgaagggcatttaggggcatttctatggcaaagctataggtgtatactgtaccaggtgttgcaaaatgattataaaagccagaatgtaagtttggcgataaaatagtgtgttgaggagacttaattgtatccaaggcaggttagagctagtgtatgttactgtgaattgtaatgtagttggattgtacaaattactgcaaatgtatacatgttactcttagtaaataataaacatcttaatatgtcctacggtcaaaaaaaaaaaaaaaaaaaaaaaaaaaaaaacaaaaaaaaaaacaagaacgaaaacatgaaacaaaaagaaaaaagaaacaaaaaaaaaagggggggcgggcggcggcaaaaaacgaaccacccctgcgggggggggcaaaaaagcatcagccacagcacactgtactatggcacaagagggcggccccccaacaagagggggcgctgaattatgaaaaagaggcgccgcggggcaggaaaaacaaaccacgtagatgggaaaacaaccaacaggcagacgaggcaacattggaggaacgcgcaaccactgggggggggaacaagaacgagcacacacccgcaaagt

SEQ ID NO: 458783 - DNA, 2286 bp, Homo sapiens
tagcgggcagttggccggaagtggggctgtgaggctcggagtcgccggaggagccagtatctgtgtcgccgccgcccgcggcgtccccggtttggtgttgcggcgcccaccttcgggaggatcagctgcttctgatgcttggaagatatcctctcagccacaaagatggtaataaatctttgcctcccacagttcagaccaagaattcactgcaacaagatatcagctgatggttacgaagtagaaaatctcatctctgaagatctcacaaagagaagtcatggtttcaggacagagtatttcattaagccaccagtctatgtgacagtttcatttccctttaatgtggaaatctgtaggatcaacatagacctcacagctgggggaggtcagaacgtcactggcctggaaatgtacacatctgcctcatctagcagagtgtcttggaatacgccccagtgccggaccctgggcccagctgagccatctgtcccagacaaggaggcgttcaccttggtaggcaaagtcttactgaaaaaccagagccaagtggtgtttagccacaggggcttcaaggccaggcccccttttggcgcgatggaagccacactcccctcccctgctgttgtggcccaggagctctggaataaaggggctctttcccttagccacgtggcccacttaaggatctgtatcacccatgtgacaggcggcggtatcccttgtatcaagcggttggaagtgtggggtcagccggccaagacctgctcccaggaagtgatagacagcatcctgctggtcacctcagagaacctgcctcaggatgtggctctgcaggctccagccttgcccatggaaagtgactgtgaccctggggaccagcctgagagccagcaggctccctccagcctgcagaagctggccgagatcattcaggatgtgcctgaggagttcctggatcccatcaccctggagatcatgccttgtcccatgctgctgccctcaggcaaggtcatcgaccagagcacactggagaagtgtaaccgcagtgaagccacatggggccgagtgcccagtgaccctttcacgggggtagcttttactccgcactctcagcccctgcctcacccctccctcaaggcccggattgaccatttcctgctccagcactccatccctggctgccacctgcttgggagagcacagacggcattggcagtgatcccttcttccattgttctgccctctcagaaaaggaagatagagcaggctgaacatgtcccagacagtaactttggtgtaaatgcttcctgtttttctgccacaagccctttggtcttacccactacctcagagcacactgctaagaaaatgaaagccaccaatgagcccagcctgacacatatggactgctcgacaggtccactgtcccacgagcagaagctgtcacaaagcttggaaattgccttggcatccacccttggctctatgccctccttcacggcacggctgaccaggggacagctccagcaccttggcacaagagggagcaacacttcctggaggcctggcaccggctcggagcagcctgggagcatcctgggccccgaatgtgcctcctgcaaaagagtattttctccctacttcaaaaaggagccggtgtaccagctgcctgcggccacctcctgtgccgaccctgcctgggtgagaagcaacgctccctgcccatgacgtgcacagcctgccagcggccggttgctagccaagacgtgctgcgggtccacttctgagtgactgacctccactggaggagacccattgctgggaggagctgagggggaacaggagcagggccacagcacccctgaggtctggccaggccccaggcacagagctgcctgctccctcccggggctcttcttcatcacctcacggtatagcacattgcttctgcgctggtggcaatagggcaacaaagccataggccagagggcggggggatgtccctgcctccctgccaccccccctgcctgagcccaggacccactggagccagccccaccctaggcaggaagacccctgctgagggcccccccgtgcagtccgcatacccccctgtccagcagggcactgtgggtggctcaccctagattgtggcccagatctcaggagtctctgccttcagggtcatccaaaagtggaccttgggagcagtgggggtgtctgtggagtgcatgactcagccccccgactcgcagccttaataaagcgatggttgacgtctgc

SEQ ID NO: 458784 - DNA, 3360 bp, Homo sapiens
  misc_feature (3055)..(3055): n is a, c, g, or t
  misc_feature (3112)..(3112): n is a, c, g, or t
  misc_feature (3172)..(3172): n is a, c, g, or t
  misc_feature (3231)..(3231): n is a, c, g, or t
  misc_feature (3241)..(3241): n is a, c, g, or t
  misc_feature (3245)..(3245): n is a, c, g, or t
  misc_feature (3293)..(3293): n is a, c, g, or t
  misc_feature (3316)..(3316): n is a, c, g, or t
tagcgggcagttggccggaagtggggctgtgaggctcggagtcgccggaggagccagtatctgtgtcgccgccgcccgcggcgtccccggtttggtgttgcggcgcccaccttcgggaggatcagtatctggcaccaattctgacccagtcatttgtgatccctggctcttgtgatatgctgaagatttccaggcagtttttgtggaacacctccccgtccagctctaatcaagcaccatataaacaagaaattgcctggtcaaatctgtgaggactgtattctgactgccaaagagatcaatactgacaccagaatggcagctactctcaagtcattaaaatgtgtcatactggaatgtgagcagcacacagcatgggggacaggaccctccagaacacattagcctctgccattctgccaaaaaagttaagaacatatgtagcaccttctcttctcggagaatcctgacaaccagcagtgcccacccaggtttggaattcagcaagacttcttcctctaaggccagtacattgcagctgggctcacccagggccacaggagttgatgaagaggacgtagaagtgtttgattcctttgaaaacatgcgagttttcctacagctaagaccagaataccgtgttcacagctataatgcatctgagacttctcagctcctgtctgtttcagaaggtgaactaattttgcacaaagtcagagttaatcaaaataatctccaggctcaagtcattgttgattatttgtgtaagctgagctctttgcctgcagagcagcatcctgtcttgctgggcagtaccagctttgctctgctctgccagctgagtgtgaagaagatacagctctttgatacccaagatctgatcaatgttttgaaagcttttgtcattttaggaatccctcactcccattcaatgctagatgtgtatgagaccaagtgttgccatcaggtatgggagatgaatatggatcagctccttttggtggctgatctctggaggtacttaggccgcaaagtacctaggtttttaaacattttttctagttatcttaatttgcactggaaggatctatccttgtctcagctagttcacttaatttatgttataggtgaaaatcgtcaggtatcccaggacctaatgcaaaaattggaatcattgatccttaaatatatagatttgatcaatttggaggaggttggtaccatctgtttggggttctttaaatcaagtactaatctctctgaatttgtcatgcggaaaattggagacttggcttgtgctaacattcagcatctgagtagtcgctccttagtgaatattgttaaaatgttccgtttcactcacgtggatcacatcaatttcatgaagcagattggagagatagctcctcagcgaattccttccctgggagttcaaggtgtcatgcacctgactctttactgctcggccttacgcttcctgaatgaaggagtaatgaatgcagtggctgcgtctttgcctcctagagtggcacactgtcgaagtaaagatgttgccaagattctgtggtcatttggaactctgaattataagccacccaatgcagaagaattttactccagcctgataagtgagattcacagaaagatgcctgaattcaaccagtacccagaacacctgcccacctgcctgctgggcctggcatttttggagtactttccagtagagttaattgatttcgctctcagtccagggtttgtcaggttagctcaggagagaactaagtttgacctccttaaggaactatataccctcgatggtacagttggcattgagtgtccagattacagaggcaatcgtcttagtactcaccttcagcaagaggggtctgaattgctgtggtatttagcagagaaggatatgaattcaaagcctgaattcttagaaactgtctttttactggagaccatgctgggggggccccagtacgtcaagcaccatatgattttgcctcatacccgatcttctgacttagaggtccagcttgatgttaacctgaagccattaccatttaatagagaagccacgccggctgaaaatgtagccaaattaaggcttgagcatgtgggagtcagccttacagatgatttgatgaataagttactaaaagggaaagcaagaggacatttccagggcaaaactgagtcagagcctgggcagcagcccatggagttggagaataaggcagctgtacctctggggggcttcctttgcaatgtagcagataaatcaggggccatggagatggctggcctgtgccccgcagcctgcatgcagaccccaagaatgaagctggctgttcagttcacaaacaggaaccagtattgctatggctccagggatctccttggactgcacaatatgaagaggcggcagctggctcggcttggctaccgtgtggtagagttatcctactgggaatggctcccactactgaaacgaactcgcttagaaaagttggcgtttcttcatgagaaagtattcacctctgctctctgaagggcatttaggggcatttctatggcaaagctataggtgtatactgtaccaggtgttgcaaaatgattataaaagccagaatgtaagtttggcgataaaatagtgtgttgaggagacttaattgtatccaaggcaggttagagctagtgtatgttactgtgaattgtaatgtagttggattgtacaaattactgcaaatgtatacatgttactcttagtaaataataaacatcttaatatgtcctacggtcaagtaagtccttgttggatttttctttctgtttaccagccttatgtcacagagtttttagaataaaagtatagtcagacattatataaagccaatttttaaaaattttattcttttctggagaccctccccccacccttacagattttttttttttttaaagccagtttttttgtttgttttttgagatggagtctcgctctgtcacccaggctggaatgcagtggcacaatctcagctcactgcancctccgcctcccagattcaaacaattctcctgctcatgcctgttatctcagcctttnggaggccaaagtgggaagattgcttgagtccaggagtttgagaccagcctggccaacatngtgagaccttgcctctgcaaaaaaataaaattagccaggcgtggtggtgtgcccccgcngtcctagctnctcnggaggctgggtgggaggatctgttgagcctgggaggttgaggctgcantgagctgagatgacaccactgtnctttagcctggatgacagagcaagaccctaactcaaaaaaaaaa

SEQ ID NO: 458785 - DNA, 7959 bp, Homo sapiens
  misc_feature (2785)..(2785): n is a, c, g, or t
  misc_feature (2800)..(2800): n is a, c, g, or t
  misc_feature (2803)..(2803): n is a, c, g, or t
  misc_feature (2812)..(2812): n is a, c, g, or t
  misc_feature (2850)..(2851): n is a, c, g, or t
  misc_feature (3603)..(3603): n is a, c, g, or t
  misc_feature (5223)..(5223): n is a, c, g, or t
tagcgggcagttggccggaagtggggctgtgaggctcggagtcgccggaggagccagtatctgtgtcgccgccgcccgcggcgtccccggtttggtgttgcggcgcccaccttcgggaggatcagctgcttctgatgcttggaagatatcctctcagccacaaagatggtaataaatctttgcctcccacagttcagaccaagaattcactgcaacaagatatcagctgatggttacgaagtagaaaatctcatctctgaagatctcacaaagagaagtcatggtttcaggacagagtatttcattaagccaccagtctatgtgacagtttcatttccctttaatgtggaaatctgtaggatcaacatagacctcacagctgggggaggtcagaacgtcactggcctggaaatgtacacatctgcctcatctagcagagtgtcttggaatacgccccagtgccggaccctgggcccagctgagccatctgtcccagacaaggaggcgttcaccttggtaggcaaagtcttactgaaaaaccagagccaagtggtgtttagccacaggggcttcaaggccaggcccccttttggcgcgatggaagccacactcccctcccctgctgttgtggcccaggagctctggaataaaggggctctttcccttagccacgtggcccacttaaggatctgtatcacccatgtgacaggcggcggtatcccttgtatcaagcggttggaagtgtggggtcagccggccaagacctgctcccaggaagtgatagacagcatcctgctggtcacctcagagaacctgcctcaggatgtggctctgcaggctccagccttgcccatggaaagtgactgtgaccctggggaccagcctgagagccagcaggctccctccagcctgcagaagctggccgagatcattcaggatgtgcctgaggagttcctggatcccatcaccctggagatcatgccttgtcccatgctgctgccctcaggcaaggtcatcgaccagagcacactggagaagtgtaaccgcagtgaagccacatggggccgagtgcccagtgaccctttcacgggggtagcttttactccgcactctcagcccctgcctcacccctccctcaaggcccggattgaccatttcctgctccagcactccatccctggctgccacctgcttgggagagcacagacggcattggcagtgatcccttcttccattgttctgccctctcagaaaaggaagatagagcaggctgaacatgtcccagacagtaactttggtgtaaatgcttcctgtttttctgccacaagccctttggtcttacccactacctcagagcacactgctaagaaaatgaaagccaccaatgagcccagcctgacacatatggactgctcgacaggtccactgtcccacgagcagaagctgtcacaaagcttggaaattgccttggcatccacccttggctctatgccctccttcacggcacggctgaccaggggacagctccagcaccttggcacaagagggagcaacacttcctggaggcctggcaccggctcggagcagcctgggagcatcctgggccccgaatgtgcctcctgcaaaagagtattttctccctacttcaaaaaggagccggtgtaccagctgcctgcggccacctcctgtgccgaccctgcctgggtgagaagcaacgctccctgcccatgacgtgcacagcctgccagcggccggttgctagccaagacgtgctgcgggtccacttctgagtgactgacctccactggaggagacccattgctgggaggagctgagggggaacaggagcagggccacagcacccctgaggtctggccaggccccaggcacagagctgcctgctccctcccggggctcttcttcatcacctcacggtatagcacattgcttctgcgctggtggcaatagggcaacaaagccataggccagagggcggggggatgtccctgcctccctgccaccccccctgcctgagcccaggacccactggagccagccccaccctaggcaggaagacccctgctgagggcccccccgtgcagtccgcatacccccctgtccagcagggcactgtgggtggctcaccctagattgtggcccagatctcaggagtctctgccttcagggtcatccaaaagtggaccttgggagcagtgggggtgtctgtggagtgcatgactcagccccccgactcgcagccttaataaagcgatggttgacgtctgctgtgggtttcctcctggtggagtgcctgtctgtgtcacacactcctgtcgcccacctgcacccacacaagtggagctcacagggtagctgtgtgcagtcactgcagcttgccaggctgtcattcctgtcgatgacctgaaaggacacaaactggaattttcaggtctgtcccctgcatggggactcagaacccaggtttgcaggtgggcatacgtggtgggagggtggagggctccctctggccagtgccagctgtgctcagctggcttcagaaactgctccctgagggggagcgcagcgtttcctcatgcagttggtttcaggaaaaatacttgtttataggctgcatccttttttcagcccaacatttagctttatggagtgccaaagggaaaatatatccatatccctacaacttggtactctatcagattccagccactagaagaacctcagtgagaaaacacacccgcctttccctgttcccttctaagcacgnttgggaaggaacagnctnaagatgctntgtaaagctgtattttacccttgagcttagccgcgggnncctgtgaaccggcacattcctttcctttaggccgtccagagctctagtccacacccaatactttagagatctgggtttggggttagtagcttttttatttttttttcaattgagacagggtgggcctctgttgcccaagcttgagggcagtggtgcaatcataactcattgcagcctcgaacctcctgggcttaagggatccttctacctcagtctcccaggtagcaggaactataggcatgtgccaccatgcccagctaatatgacatttttggtgacagcacaaggtcttgctgtgttgttcaggctggtctcaaactcctggcctcaagcaatccttctgcctcagcttcccaaagtgttgggattataggcgtggccaagtttttctaatttttaaaaagctggctatctgcatttatagaaatagtgtgtagcagagatcagcagactttttatgtaatagaccaaacactaaatatgctttgcaggccatacaatctgccacagttacacagttctgctcttgtagcaggaaagcagacatagacaatatataatgaatggcctagctatgttctgaaaaaaccttgtttacaaaaacatgtgaagagctagatttgggccccaggacatagtctgctcacccttgatctgaaccacagattgaaatttggtgggcagaatggtccacaggtggtcaggcatggtggctgatgcctgtaatactagcacttcaggaggccagggtnggaggatcacttgagcccaggagtttgagaccagccttggcaacattgtgagactccatctccacacacacacacacacaaacacacacacaaacacacactaactgggtttggtggtgtgcacctgtagtttttgctacttcaagaggctgaggctgaagtgggaggattgcttgaagtgggaggtcaaagctgcagttatcatgccactatactccaacctgggtgacagagtgagactgtctcaaaaaagaaaaaaagaatggtccacaagccacagtaaagaaccaagtgtataaaaatttagtgtgagagaattctgctctgattcacacagaaattcatacatatgttcctgccatctagagaagcctgtgtagctgggctactggaacagagccactgacctgccctgctgttctttgatgaactaaatgatgatgtgctatgggctttggaagaaagtggctgacagcagagttaggcaggcatttcagaaagtcattctggcacccttggaacttttatggagttttctgcagcaacagccctgtctggtacatcagttgacaactcaggtctccttgggtcttgcttgtcaggctttggcacttaagtggaaagaaaaagaataagcattaaggaaagcgagagcacagcagaatcaatttcatagtctctcatggtttctgccatgggagaaaaatgggcattatactgctcacaggcagaataaagactcactggaaacattgctaagctgccttctccagaagatgtcagcggggcagttgcgtcaattggcgttccctgaaccctgagcccagctttggggtactctttgcttcccacccgtgaagtgacagtgagcagaccctcaaccttctgctttctcccaccaaaatgagtgagttttttagtatactttctaataacaccattactctgtgactactctctaatagtgactcaaattctgttataagcttcctgaagaggagagtaggcatcttctaaaaagtaaaagaacagcattagaatgacagaattttggaattaacagttttgcgctataagaacagggagggttatcgtaggtataactaattaaatcttttttttttttttttgagatggagtctcactttttcgcctaggctggagtgcagtggcacggtcttggctcaccgcaacctctgcctcccgggttcaagggattctcctgcctcagcctcctgagtagctgggattacaggtgtgtgctgccacacctgggtaattttttgtatttttaatagagacgggatttcgccttgttggccaggctggtcttgaactcctgacctcaagtgatctgcctgcctcggcctcccaaagtgctggcattacaggcatgagccacccacacccagccaactaattatcttttataccagatcccactttttacttagtgctgttagcatagcagtttttataaacattcttcaggtaggacctgtttgccttgatatcaaagagatggaaggagttgctcacttttgttcccagccttctttctagaaatctgccttccttcttcctatcaaatgttagcggagcaccgtctcttctttagcngtcactgcttgccttgtacagtgaaggaagtctggtgagcagcagtccaggaactgcccacgggtaccctgggttgggggttttcctaggcctttacacagaccgcagaatttatccttgatatatgctgtcatgtggtttgggcatttactagcattgaacttatttgagtagacagcagtgtagtttcaacctgttttttataatgtgtaaatttggatgcttttataggtagaagccactcattcttcatctacccttttttcagtatctggcaccaattctgacccagtcatttgtgatccctggctcttgtgatatgctgaagatttccaggcagtttttgtggaacacctccccgtccagctctaatcaagcaccatataaacaagaaattgcctggtcaaatctgtgaggactgtattctgactgccaaagagatcaatactgacaccagaatggcagctactctcaagtcattaaaacttgtaagataccgagcattttgcagtccttctgcctttggtgcagtccgaagtgtgtcatactggaatgtgagcagcacacagcatgggggacaggaccctccagaacacattagcctctgccattctgccaaaaaagttaagaacatatgtagcaccttctcttctcggagaatcctgacaaccagcagtgcccacccaggtttggaattcagcaagacttcttcctctaaggccagtacattgcagctgggctcacccagggccacaggagttgatgaagaggacgtagaagtgtttgattcctttgaaaacatgcgagttttcctacagctaagaccagaataccgtgttcacagctataatgcatctgagacttctcagctcctgtctgtttcagaaggtgaactaattttgcacaaagtcagagttaatcaaaataatctccaggctcaagtcattgttgattatttgtgtaagctgagctctttgcctgcagagcagcatcctgtcttgctgggcagtaccagctttgctctgctctgccagctgagtgtgaagaagatacagctctttgatacccaagatctgatcaatgttttgaaagcttttgtcattttaggaatccctcactcccattcaatgctagatgtgtatgagaccaagtgttgccatcaggtatgggagatgaatatggatcagctccttttggtggctgatctctggaggtacttaggccgcaaagtacctaggtttttaaacattttttctagttatcttaatttgcactggaaggatctatccttgtctcagctagttcacttaatttatgttataggtgaaaatcgtcaggtatcccaggacctaatgcaaaaattggaatcattgatccttaaatatatagatttgatcaatttggaggaggttggtaccatctgtttggggttctttaaatcaagtactaatctctctgaatttgtcatgcggaaaattggagacttggcttgtgctaacattcagcatctgagtagtcgctccttagtgaatattgttaaaatgttccgtttcactcacgtggatcacatcaatttcatgaagcagattggagagatagctcctcagcgaattccttccctgggagttcaaggtgtcatgcacctgactctttactgctcggccttacgcttcctgaatgaaggagtaatgaatgcagtggctgcgtctttgcctcctagagtggcacactgtcgaagtaaagatgttgccaagattctgtggtcatttggaactctgaattataagccacccaatgcagaagaattttactccagcctgataagtgagattcacagaaagatgcctgaattcaaccagtacccagaacacctgcccacctgcctgctgggcctggcatttttggagtactttccagtagagttaattgatttcgctctcagtccagggtttgtcaggttagctcaggagagaactaagtttgacctccttaaggaactatataccctcgatggtacagttggcattgagtgtccagattacagaggcaatcgtcttagtactcaccttcagcaagaggggtctgaattgctgtggtatttagcagagaaggatatgaattcaaagcctgaattcttagaaactgtctttttactggagaccatgctgggggggccccagtacgtcaagcaccatatgattttgcctcatacccgatcttctgacttagaggtccagcttgatgttaacctgaagccattaccatttaatagagaagccacgccggctgaaaatgtagccaaattaaggcttgagcatgtgggagtcagccttacagatgatttgatgaataagcggcagctggctcggcttggctaccgtgtggtagagttatcctactgggaatggctcccactactgaaacgaactcgcttagaaaagttggcgtttcttcatgagaaagtattcacctctgctctctgaagggcatttaggggcatttctatggcaaagctataggtgtatactgtaccaggtgttgcaaaatgattataaaagccagaatgtaagtttggcgataaaatagtgtgttgaggagacttaattgtatccaaggcaggttagagctagtgtatgttactgtgaattgtaatgtagttggattgtacaaattactgcaaatgtatacatgttactcttagtaaataataaacatcttaatatgtcctacggtcaa

SEQ ID NO: 458786 - DNA, 2863 bp, Homo sapiens
tagcgggcagttggccggaagtggggctgtgaggctcggagtcgccggaggagccagtatctgtgtcgccgccgcccgcggcgtccccggtttggtgttgcggcgcccaccttcgggaggatcagtatctggcaccaattctgacccagtcatttgtgatccctggctcttgtgatatgctgaagatttccaggcagtttttgtggaacacctccccgtccagctctaatcaagcaccatataaacaagaaattgcctggtcaaatctgtgaggactgtattctgactgccaaagagatcaatactgacaccagaatggcagctactctcaagtcattaaaacttgtaagataccgagcattttgcagtccttctgcctttggtgcagtccgaagtgtgtcatactggaatgtgagcagcacacagcatgggggacaggaccctccagaacacattagcctctgccattctgccaaaaaagttaagaacatatgtagcaccttctcttctcggagaatcctgacaaccagcagtgcccacccaggtttggaattcagcaagacttcttcctctaaggccagtacattgcagctgggctcacccagggccacaggagttgatgaagaggacgtagaagtgtttgattcctttgaaaacatgcgagttttcctacagctaagaccagaataccgtgttcacagctataatgcatctgagacttctcagctcctgtctgtttcagaaggtgaactaattttgcacaaagtcagagttaatcaaaataatctccaggctcaagtcattgttgattatttgtgtaagctgagctctttgcctgcagagcagcatcctgtcttgctgggcagtaccagctttgctctgctctgccagctgagtgtgaagaagatacagctctttgatacccaagatctgatcaatgttttgaaagcttttgtcattttaggaatccctcactcccattcaatgctagatgtgtatgagaccaagtgttgccatcaggtatgggagatgaatatggatcagctccttttggtggctgatctctggaggtacttaggccgcaaagtacctaggtttttaaacattttttctagttatcttaatttgcactggaaggatctatccttgtctcagctagttcacttaatttatgttataggtgaaaatcgtcaggtatcccaggacctaatgcaaaaattggaatcattgatccttaaatatatagatttgatcaatttggaggaggttggtaccatctgtttggggttctttaaatcaagtactaatctctctgaatttgtcatgcggaaaattggagacttggcttgtgctaacattcagcatctgagtagtcgctccttagtgaatattgttaaaatgttccgtttcactcacgtggatcacatcaatttcatgaagcagattggagagatagctcctcagcgaattccttccctgggagttcaaggtgtcatgcacctgactctttactgctcggccttacgcttcctgaatgaaggagtaatgaatgcagtggctgcgtctttgcctcctagagtggcacactgtcgaagtaaagatgttgccaagattctgtggtcatttggaactctgaattataagccacccaatgcagaagaattttactccagcctgataagtgagattcacagaaagatgcctgaattcaaccagtacccagaacacctgcccacctgcctgctgggcctggcatttttggagtactttccagtagagttaattgatttcgctctcagtccagggtttgtcaggttagctcaggagagaactaagtttgacctccttaaggaactatataccctcgatggtacagttggcattgagtgtccagattacagaggcaatcgtcttagtactcaccttcagcaagaggggtctgaattgctgtggtatttagcagagaaggatatgaattcaaagcctgaattcttagaaactgtctttttactggagaccatgctgggggggccccagtacgtcaagcaccatatgattttgcctcatacccgatcttctgacttagaggtccagcttgatgttaacctgaagccattaccatttaatagagaagccacgccggctgaaaatgtagccaaattaaggcttgagcatgtgggagtcagccttacagatgatttgatgaataagttactaaaagggaaagcaagaggacatttccagggcaaaactgagtcagagcctgggcagcagcccatggagttggagaataaggcagctgtacctctggggggcttcctttgcaatgtagcagataaatcaggggccatggagatggctggcctgtgccccgcagcctgcatgcagaccccaagaatgaagctggctgttcagttcacaaacaggaaccagtattgctatggctccagggatctccttggactgcacaatatgaagaggcggcagctggctcggcttggctaccgtgtggtagagttatcctactgggaatggctcccactactgaaacgaactcgcttagaaaagttggcgtttcttcatgagaaagtattcacctctgctctctgaagggcatttaggggcatttctatggcaaagctataggtgtatactgtaccaggtgttgcaaaatgattataaaagccagaatgtaagtttggcgataaaatagtgtgttgaggagacttaattgtatccaaggcaggttagagctagtgtatgttactgtgaattgtaatgtagttggattgtacaaattactgcaaatgtatacatgttactcttagtaaataataaacatcttaatatgtcctacggtcaa

SEQ ID NO: 458787 - DNA, 4935 bp, Homo sapiens
  misc_feature (19)..(19): n is a, c, g, or t
  misc_feature (1379)..(1379): n is a, c, g, or t
  misc_feature (4630)..(4630): n is a, c, g, or t
  misc_feature (4687)..(4687): n is a, c, g, or t
  misc_feature (4747)..(4747): n is a, c, g, or t
  misc_feature (4806)..(4806): n is a, c, g, or t
  misc_feature (4816)..(4816): n is a, c, g, or t
  misc_feature (4820)..(4820): n is a, c, g, or t
  misc_feature (4868)..(4868): n is a, c, g, or t
  misc_feature (4891)..(4891): n is a, c, g, or t
agtgatctagaggatccgnggactttccacgagtcacagtaaagaaccaagtgtataaaaatttagtgtgagagaattctgctctgattcacacagaaattcatacatatgttcctgccatctagagaagcctgtgtagctgggctactggaacagagccactgacctgccctgctgttctttgatgaactaaatgatgatgtgctatgggctttggaagaaagtggctgacagcagagttaggcaggcatttcagaaagtcattctggcacccttggaacttttatggagttttctgcagcaacagccctgtctggtacatcagttgacaactcaggtctccttgggtcttgcttgtcaggctttggcacttaagtggaaagaaaaagaataagcattaaggaaagcgagagcacagcagaatcaatttcatagtctctcatggtttctgccatgggagaaaaatgggcattatactgctcacaggcagaataaagactcactggaaacattgctaagctgccttctccagaagatgtcagcggggcagttgcgtcaattggcgttccctgaaccctgagcccagctttggggtactctttgcttcccacccgtgaagtgacagtgagcagaccctcaaccttctgctttctcccaccaaaatgagtgagttttttagtatactttctaataacaccattactctgtgactactctctaatagtgactcaaattctgttataagcttcctgaagaggagagtaggcatcttctaaaaagtaaaagaacagcattagaatgacagaattttggaattaacagttttgcgctataagaacagggagggttatcgtaggtataactaattaaatcttttttttttttttttgagatggagtctcactttttcgcctaggctggagtgcagtggcacggtcttggctcaccgcaacctctgcctcccgggttcaagggattctcctgcctcagcctcctgagtagctgggattacaggtgtgtgctgccacacctgggtaattttttgtatttttaatagagacgggatttcgccttgttggccaggctggtcttgaactcctgacctcaagtgatctgcctgcctcggcctcccaaagtgctggcattacaggcatgagccacccacacccagccaactaattatcttttataccagatcccactttttacttagtgctgttagcatagcagtttttataaacattcttcaggtaggacctgtttgccttgatatcaaagagatggaaggagttgctcacttttgttcccagccttctttctagaaatctgccttccttcttcctatcaaatgttagcggagcaccgtctcttctttagcngtcactgcttgccttgtacagtgaaggaagtctggtgagcagcagtccaggaactgcccacgggtaccctgggttgggggttttcctaggcctttacacagaccgcagaatttatccttgatatatgctgtcatgtggtttgggcatttactagcattgaacttatttgagtagacagcagtgtagtttcaacctgttttttataatgtgtaaatttggatgcttttataggtagaagccactcattcttcatctacccttttttcagtatctggcaccaattctgacccagtcatttgtgatccctggctcttgtgatatgctgaagatttccaggcagtttttgtggaacacctccccgtccagctctaatcaagcaccatataaacaagaaattgcctggtcaaatctgtgaggactgtattctgactgccaaagagatcaatactgacaccagaatggcagctactctcaagtcattaaaacttgtaagataccgagcattttgcagtccttctgcctttggtgcagtccgaagtgtgtcatactggaatgtgagcagcacacagcatgggggacaggaccctccagaacacattagcctctgccattctgccaaaaaagttaagaacatatgtagcaccttctcttctcggagaatcctgacaaccagcagtgcccacccaggtttggaattcagcaagacttcttcctctaaggccagtacattgcagctgggctcacccagggccacaggagttgatgaagaggacgtagaagtgtttgattcctttgaaaacatgcgagttttcctacagctaagaccagaataccgtgttcacagctataatgcatctgagacttctcagctcctgtctgtttcagaaggtgaactaattttgcacaaagtcagagttaatcaaaataatctccaggctcaagtcattgttgattatttgtgtaagctgagctctttgcctgcagagcagcatcctgtcttgctgggcagtaccagctttgctctgctctgccagctgagtgtgaagaagatacagctctttgatacccaagatctgatcaatgttttgaaagcttttgtcattttaggaatccctcactcccattcaatgctagatgtgtatgagaccaagtgttgccatcaggtatgggagatgaatatggatcagctccttttggtggctgatctctggaggtacttaggccgcaaagtacctaggtttttaaacattttttctagttatcttaatttgcactggaaggatctatccttgtctcagctagttcacttaatttatgttataggtgaaaatcgtcaggtatcccaggacctaatgcaaaaattggaatcattgatccttaaatatatagatttgatcaatttggaggaggttggtaccatctgtttggggttctttaaatcaagtactaatctctctgaatttgtcatgcggaaaattggagacttggcttgtgctaacattcagcatctgagtagtcgctccttagtgaatattgttaaaatgttccgtttcactcacgtggatcacatcaatttcatgaagcagattggagagatagctcctcagcgaattccttccctgggagttcaaggtgtcatgcacctgactctttactgctcggccttacgcttcctgaatgaaggagtaatgaatgcagtggctgcgtctttgcctcctagagtggcacactgtcgaagtaaagatgttgccaagattctgtggtcatttggaactctgaattataagccacccaatgcagaagaattttactccagcctgataagtgagattcacagaaagatgcctgaattcaaccagtacccagaacacctgcccacctgcctgctgggcctggcatttttggagtactttccagtagagttaattgatttcgctctcagtccagggtttgtcaggttagctcaggagagaactaagtttgacctccttaaggaactatataccctcgatggtacagttggcattgagtgtccagattacagaggcaatcgtcttagtactcaccttcagcaagaggggtctgaattgctgtggtatttagcagagaaggatatgaattcaaagcctgaattcttagaaactgtctttttactggagaccatgctgggggggccccagtacgtcaagcaccatatgattttgcctcatacccgatcttctgacttagaggtccagcttgatgttaacctgaagccattaccatttaatagagaagccacgccggctgaaaatgtagccaaattaaggcttgagcatgtgggagtcagccttacagatgatttgatgaataagttactaaaagggaaagcaagaggacatttccagggcaaaactgagtcagagcctgggcagcagcccatggagttggagaataaggcagctgtacctctggggggcttcctttgcaatgtagcagataaatcaggggccatggagatggctggcctgtgccccgcagcctgcatgcagaccccaagaatgaagctggctgttcagttcacaaacaggaaccagtattgctatggctccagggatctccttggactgcacaatatgaagaggcggcagctggctcggcttggctaccgtgtggtagagttatcctactgggaatggctcccactactgaaacgaactcgcttagaaaagttggcgtttcttcatgagaaagtattcacctctgctctctgaagggcatttaggggcatttctatggcaaagctataggtgtatactgtaccaggtgttgcaaaatgattataaaagccagaatgtaagtttggcgataaaatagtgtgttgaggagacttaattgtatccaaggcaggttagagctagtgtatgttactgtgaattgtaatgtagttggattgtacaaattactgcaaatgtatacatgttactcttagtaaataataaacatcttaatatgtcctacggtcaagtaagtccttgttggatttttctttctgtttaccagccttatgtcacagagtttttagaataaaagtatagtcagacattatataaagccaatttttaaaaattttattcttttctggagaccctccccccacccttacagattttttttttttttaaagccagtttttttgtttgttttttgagatggagtctcgctctgtcacccaggctggaatgcagtggcacaatctcagctcactgcancctccgcctcccagattcaaacaattctcctgctcatgcctgttatctcagcctttnggaggccaaagtgggaagattgcttgagtccaggagtttgagaccagcctggccaacatngtgagaccttgcctctgcaaaaaaataaaattagccaggcgtggtggtgtgcccccgcngtcctagctnctcnggaggctgggtgggaggatctgttgagcctgggaggttgaggctgcantgagctgagatgacaccactgtnctttagcctggatgacagagcaagaccctaactcaaaaaaaaaa

SEQ ID NO: 458788 - DNA, 4164 bp, Homo sapiens
tagcgggcagttggccggaagtggggctgtgaggctcggagtcgccggaggagccagtatctgtgtcgccgccgcccgcggcgtccccggtttggtgttgcggcgcccaccttcgggaggatcaggctgcttctgatgcttggaagatatcctctcagccacaaagatggtaataaatctttgcctcccacagttcagaccaagaattcactgcaacaagatatcagctgatggttacgaagtagaaaatctcatctctgaagatctcacaaagagaagtcatggtttcaggacagagtatttcattaagccaccagtctatgtgacagtttcatttccctttaatgtggaaatctgtaggatcaacatagacctcacagctgggggaggtcagaacgtcactggcctggaaatgtacacatctgcctcatctagcagagtgtcttggaatacgccccagtgccggaccctgggcccagctgagccatctgtcccagacaaggaggcgttcaccttggtaggcaaagtcttactgaaaaaccagagccaagtggtgtttagccacaggggcttcaaggccaggcccccttttggcgcgatggaagccacactcccctcccctgctgttgtggcccaggagctctggaataaaggggctctttcccttagccacgtggcccacttaaggatctgtatcacccatgtgacaggcggcggtatcccttgtatcaagcggttggaagtgtggggtcagccggccaagacctgctcccaggaagtgatagacagcatcctgctggtcacctcagagaacctgcctcaggatgtggctctgcaggctccagccttgcccatggaaagtgactgtgaccctggggaccagcctgagagccagcaggctccctccagcctgcagaagctggccgagatcattcaggatgtgcctgaggagttcctggatcccatcaccctggagatcatgccttgtcccatgctgctgccctcaggcaaggtcatcgaccagagcacactggagaagtgtaaccgcagtgaagccacatggggccgagtgcccagtgaccctttcacgggggtagcttttactccgcactctcagcccctgcctcacccctccctcaaggcccggattgaccatttcctgctccagcactccatccctggctgccacctgcttgggagagcacagacggcattggcagtgatcccttcttccattgttctgccctctcagaaaaggaagatagagcaggctgaacatgtcccagacagtaactttggtgtaaatgcttcctgtttttctgccacaagccctttggtcttacccactacctcagagcacactgctaagaaaatgaaagccaccaatgagcccagcctgacacatatggactgctcgacagagcagcctgggagcatcctgggccccgaatgtgcctcctgcaaaagagtattttctccctacttcaaaaaggagccggtgtaccagctgccctgcggccacctcctgtgccgaccctgcctgggtgagaagcaacgctccctgcccatgacgtgcacagcctgccagcggccggttgctagccaagacgtgctgcgggtccacttctgagtgactgacctccactggaggagacccattgctgggaggagctgagggggaacaggagcagggccacagcacccctgaggtctggccaggccccaggcacagagctgcctgctccctcccggggctcttcttcatcacctcacggtatagcacattgcttctgcgctggtggcaatagggcaacaaagccataggccagagggcggggggatgtccctgcctccctgccaccccccctgcctgagcccaggacccactggagccagccccaccctaggcaggaagacccctgctgagggcccccccgtgcagtccgcatacccccctgtccagcagggcactgtgggtggctcaccctagattgtggcccagatctcaggagtctctgccttcagggtcatccaaaagtggaccttgggagcagtgggggtgtctgtggagtgcatgactcagccccccgactcgcagccttaataaagcgatggttgacgtctgctgtgggtttcctcctggtggagtgcctgtctgtgtcacacactcctgtcgcccacctgcacccacacaagtggagctcacagggtagctgtgtgcagtcactgcagcttgccaggctgtcattcctgtcgacgacctgaaaggacacaaactggaattttcaggtctgtcccctgcatggggactcagaacccaggtttgcaggtgggcatacgtggtgggagggtggagggctccctctggccagtgccagctgtgctcagctggcttcagaaactgctccctgagggggagcgcagcgtttcctcatgcagttggtttcaggaaaaatacttgtttataggctgcatccttttttcagcccaacatttagctttatggagtgccaaagggaaaatatatccatatccctacaacttggtactctatcagattccagccactagaagaacctcagtgagaaaacacacccgcctttccctgttcccttctaagcacgtttgggaaggaacagcctaaagatgctttgtaaagctgtattttacccttgagcttagccgcgggtccctgtgaaccggcacattcctttcctttaggccgtccagagctctagtccacacccaatactttagagatctgggtttggggttagttgctttttttttttttttttttaattgagacagggttggtctctgttgcccaagcttgagggcagtggtgcaatcataactcattgcagcctcgaactcctgggcttaagggatccttctacctcagcctcccaggtagcaggaactataggcatgtgccaccatgcccagctaatttttttattttttgtagagacaaggtcttgctatgttgtccagactggtctcaaactcctgggctcaagcgatactcccagagtgcttggattgcaggcatgagccacttcgcctagccaagcctgcatttttttgagttcctacatcatttgtccacaaagatggcttcagagaggtggtcacatgctttgctctgcttcctcttggcactgaccttgatgcagccttcacatgagatttgagggtccgcatggatggcctgtgccgccctcgctggcgaggctcctgtgtgcccctggctttctgggtctgtgcctctccagaatcttgtcttaccctccggtgtgcttgtgttcttagaaaagccccagcatggccgggcatggtggctcatgcctattatcccagcactttgggaggccaaggtgggtggatcacttgaggtcaggagttcgagaccagcctggccaacatggcaagaccccatctctactaaaaatacaaggattagctgggcatggtggtgtgtgcctgtaatgccagctactcaggaggctgaggcatgagaatcgcttgagccggggaggcagaggttgcagtgagccgagatcgcaccactgtactccagcctgggcgacggagtgagactccctctcaaaaaaagaaaaaagccccagcatgtagcaaaagcatttcttggtgagtgtgggggctggtgattcccaccttcaccctgtcatggtctcagggaacagcctgcttcccaccagcagcttgacacccacagtgtgctctggctgctgggagcccatctctcggagaaaccctgtccacccaaccccgagagccctagcgtgcagtcagcgtcagcacggcgctcccagatgagggccggactgcctccccttaagcagctgtgttggaggtactgcccagaccgctgcaggtccctggggatctgcatttctaacaggctcctgcccccaagactgctctggtggaaaatccagcctgggagcccctggagtggcaggccctgtcctgggtacaggtggagccacccccaggagttgcgtgtgtttttcttaattgaaagacttcccccaaaaggaagtggtcttttcactacccttgccagaaacatgctaggcaccactgggctctgtttctgtcccctagaaaatgggaataaaatttcttttgctgtca

SEQ ID NO: 458789 - DNA, 703 bp, Homo sapiens
tgggctggagccagactgtggtctgaggaggagacacagccttataagctgagggagtggagaggcccggggccaggaaagcagagacagacaaagcgttaggagaagaagagaggcagggaagacaagccaggcacgatggccaccttcccaccagcaaccagcgccccccagcagcccccaggcccggaggacgaggactccagcctggatgaatctgacctctatagcctggcccattcctacctcggaggtggaggccggaaaggtcgcaccaagagagaagctgctgccaacaccaaccgccccagccctggcgggcacgagaggaaactggtgaccaagctgcagaattcagagaggaagaagcgaggggcacggcgctgagacagagctggagatgaggccagaccatggacactacacccagcaatagagacgggactgcggaggaaggaggacccaggacaggatccaggccggcttgccacaccccccacccctaggacttattcccgctgactgagtctctgaggggctaccaggaaagcgcctccaaccctagcaaaagtgcaagatggggagtgagaggctgggaatggaggggcagagccaggaagatcccccagaaaagaaagctacagaagaaactggggctcctccagggtggcagcaacaataaatagacacgcacggcagccac

SEQ ID NO: 458790 - DNA, 757 bp, Homo sapiens
tgggctggagccagactgtggtctgaggaggagacacagccttataagctgagggagtggagaggcccggggccaggaaagcagagacagacaaagcgttaggagaagaagagaggcagggaagacaagccaggcacgatggccaccttcccaccagcaaccagcgccccccagcagcccccaggcccggaggacgaggactccagcctggatgaatctgacctctatagcctggcccattcctacctcgggcctctcatcatgcctatgcccacttcacctctgactcctgccttggttacaggaggtggaggccggaaaggtcgcaccaagagagaagctgctgccaacaccaaccgccccagccctggcgggcacgagaggaaactggtgaccaagctgcagaattcagagaggaagaagcgaggggcacggcgctgagacagagctggagatgaggccagaccatggacactacacccagcaatagagacgggactgcggaggaaggaggacccaggacaggatccaggccggcttgccacaccccccacccctaggacttattcccgctgactgagtctctgaggggctaccaggaaagcgcctccaaccctagcaaaagtgcaagatggggagtgagaggctgggaatggaggggcagagccaggaagatcccccagaaaagaaagctacagaagaaactggggctcctccagggtggcagcaacaataaatagacacgcacggcagccac

SEQ ID NO: 458791 - DNA, 1073 bp, Homo sapiens
tgggctggagccagactgtggtctgaggaggagacacagccttataagctgagggagtggagaggcccggggccaggaaagcagagacagacaaagcgttaggagaagaagagaggcagggaagacaagccaggcacgatggccaccttcccaccagcaaccagcgccccccagcagcccccaggcccggaggacgaggactccagcctggatgaatctgacctctatagcctggcccattcctacctcggaggtggaggccggaaaggtcgcaccaagagagaagctgctgccaacaccaaccgccccagccctggcgggcacgagaggaaactggtgaccaagctgcagaattcagagaggaagaagcgaggggcacggcgctgagacagagctggagatgaggccagaccatggacactacacccagcaatagagacgggactgcggaggaaggaggacccaggacaggatccaggccggcttgccacaccccccacccctaggacttattcccgctgactgagtctctgaggggctaccaggaaagcgcctccaaccctagcaaaagtgcaagatggggagtgagaggctgggaatggaggggcagagccaggaagatcccccagaaaagaaagctacagaagaaactggggctcctccagggtggcagcaacaataaatagacacgcacggcagccaccacagcttgggtgtgtgttcatccttgttctttgtgtgttttgttcgggcatgtgtgtgcttgcctgtgcctgcacattcatgagcctgagagagcatctttgatgtgtatttgtgtttggtgtatgtatctggggcagggagtgttcctgctcttgcagggtctacgctgtgaatgcagcttttggtttgtttgcttttgcttgcatatattttagtgcatacatttctgtgggctcctacgtagtggaaaggaatttcttctgcttttttgcgatactgcccatgaaacacggccctccccagcacctgtttttgttgattgtgtcctgttcatagacgggaacgctacttatgagtgccatctaaaa

SEQ ID NO: 458792 - DNA, 501 bp, Homo sapiens
tgacttgtccctggcacaagtgtgctgatatcccttccccctccttcctcacgtcctgcatctcagcgagaattggggtgccggggttagctgtgtggccgtcatcccaggcccaggtgaagccctcgatcaggtgaggccatgatcccaacgagtgttttagcccagatcctgcctcttccctgctttctgccgagaagcgggacctcctctatggaaaatatccagcaatagagacgggactgcggaggaaggaggacccaggacaggatccaggccggcttgccacaccccccacccctaggacttattcccgctgactgagtctctgaggggctaccaggaaagcgcctccaaccctagcaaaagtgcaagatggggagtgagaggctgggaatggaggggcagagccaggaagatcccccagaaaagaaagctacagaagaaactggggctcctccagggtggcagcaacaataaatagacacgcacggcagccac

SEQ ID NO: 458793 - DNA, 869 bp, Homo sapiens
  misc_feature (869)..(869): n is a, c, g, or t
cagaacctttccaattgaagggaaatttgacttacagagacagaaattgaggatagagagggtgggtccttccctggagtcacaaatcaagtgagtgggagaggcagaattagaacccagatctctgtcccttttaccacctgcttttcctcaccccccagatgaggccagaccatggacactacacccagcaatagagacgggactgcggaggaaggaggacccaggacaggatccaggccggcttgccacaccccccacccctaggacttattcccgctgactgagtctctgaggggctaccaggaaagcgcctccaaccctagcaaaagtgcaagatggggagtgagaggctgggaatggaggggcagagccaggaagatcccccagaaaagaaagctacagaagaaactggggctcctccagggtggcagcaacaataaatagacacgcacggcagccacaaaaaaaaaaacacatagaaaaaaaaaacaatttttcggccgcccttgggcgccacggggaagaggttttcttacaccccattccgttttggggccgggggccccccacgaaagtttggggctcacaccagtggggcacatcactgggtaccccaaacgacagatcctggtgccagttcacataagggggcatcgagtctttcccacgacaataaaaaaacggccggagtggcaaccaagcagttgtttggtagacacaaattccaagataggagttcggaggggccaacacgaggccaatcaacaagggggtccaaagggagactcagtaatcagtgtagcgccgcacggggacatacagtgtccaacaatacagaacacataaccacatgacacaacagaggn

SEQ ID NO: 458794 - DNA, 1343 bp, Homo sapiens
tgggctggagccagactgtggtctgaggaggagacacagccttataagctgagggagtggagaggcccggggccaggaaagcagagacagacaaagcgttaggagaagaagagaggcagggaagacaagccaggcacgatggccaccttcccaccagcaaccagcgccccccagcagcccccaggcccggaggacgaggactccagcctggatgaatctgacctctatagcctggcccattcctacctcggtaaggcccactcagccatctccacggtccttcctcctctcccgaaatcaggacccacccctcttgtttcctctcatttcctttcctttcctcttcgtttctttctttctttttttttgagagagtcactctgtcacccaggctggagtgcagtagtgtgatcacaacaactcaaacaactcaccgcagcctcgaactcctgggctcaagtgatcctcctgcttcagcctcctgagtggctggaacttcaggtgtacaccacctgcagtggtgagatggggtctcactatgtttcccaggctgatcccaaattcctgggctcaagcaattctcctgccttggcctcccaaagtgctgagattacaggagtgagccaccctgcccagcccactcacccttttctagccaacctgttccttggaccctcacgtcacccctgtctaatcccttatcccaggagtgctatgttactcagcctgggacctcacacacatctggggtcccacattccacagaggggaagcagcaggcttctccctgctcttcccatccccacaaccctgaacccctgcctctcctctgacagggcctctcatcatgcctatgcccacttcacctctgactcctgccttggttacaggaggtggaggccggaaaggtcgcaccaagagagaagctgctgccaacaccaaccgccccagccctggcgggcacgagaggaaactggtgaccaagctgcagaattcagagaggaagaagcgaggggcacggcgctgagacagagctggagatgaggccagaccatggacactacacccagcaatagagacgggactgcggaggaaggaggacccaggacaggatccaggccggcttgccacaccccccacccctaggacttattcccgctgactgagtctctgaggggctaccaggaaagcgcctccaaccctagcaaaagtgcaagatggggagtgagaggctgggaatggaggggcagagccaggaagatcccccagaaaagaaagctacagaagaaactggggctcctccagggtggcagcaacaataaatagacacgcacggcagccac

SEQ ID NO: 458795 - DNA, 906 bp, Homo sapiens
tgggctggagccagactgtggtctgaggaggagacacagccttataagctgagggagtggagaggcccggggccaggaaagcagagacagacaaagcgttaggagaagaagagaggcagggaagacaagccaggcacgatggccaccttcccaccagcaaccagcgccccccagcagcccccaggcccggaggacgaggactccagcctggatgaatctgacctctatagcctggcccattcctacctcggaggtggaggccggaaaggtcgcaccaagagagaagctgctgccaacaccaaccgccccagccctggcgggcacgagaggaaactggtgaccaagctgcagaattcagagaggaagaagcgaggggcacggcgctgagacagagctggagatgaggccagaccatggacactacacccagcaatagagacgggactgcggaggaaggaggacccaggacaggatccaggccggcttgccacaccccccacccctaggacttattcccgctgactgagtctctgaggggctaccaggaaagcgcctccaaccctagcaaaagtgcaagatggggagtgagaggctgggaatggaggggcagagccaggaagatcccccagaaaagaaagctacagaagaaactggggctcctccagggtggcagcaacaataaatagacacgcacggcagccacaaaaaaaaaaaaaaaaaaaaaaaaaaaaaaaaccccggggaaaaaagggagggggagggaaaaaaaggggaaaaaaatgtgcaccgtgtgaaaagagaggattcttggaaacaaagatagtaggaaacaagggtggaaaaatagggagagacaacaaaaaagagagaacggaagaaatgatataaacagggtaacagtgtgtc

SEQ ID NO: 458796 - DNA, 369 bp, Homo sapiens
  misc_feature (11)..(11): n is a, c, g, or t
atcagtcggtnctgctgcacttggagaggaagaagcgaggggcacggcgctgagacagagctggagatgaggccagaccatggacactacacccagcaatagagacgggactgcggaggaaggaggacccaggacaggatccaggccggcttgccacaccccccacccctaggacttattcccgctgactgagtctctgaggggctaccaggaaagcgcctccaaccctagcaaaagtgcaagatggggagtgagaggctgggaatggaggggcagagccaggaagatcccccagaaaagaaagctacagaagaaactggggctcctccagggtggcagcaacaataaatagacacgcacggcagccac

SEQ ID NO: 458797 - DNA, 632 bp, Homo sapiens
tgggctggagccagactgtggtctgaggaggagacacagccttataagctgagggagtggagaggcccggggccaggaaagcagagacagacaaagcgttaggagaagaagagaggcagggaagacaagccaggcacgatggccaccttcccaccagcaaccagcgccccccagcagcccccaggcccggaggacgaggactccagcctggatgaatctgacctctatagcctggcccattcctacctcggaggtggaggccggaaaggtcgcaccaagagagaagctgctgccaacaccaaccgccccagccctggcgggcacgagaggaaactggtgaccaagctgcagaattcagagaggaagaagcgaggggcacggcgctgagacagagctggagatgaggccagaccatggacactacacccagcaatagagacgggactgcggaggaaggaggacccaggacaggatccaggccggcttgccacaccccccacccctaggacttattcccgctgactgagtctctgaggggctaccaggaagatcccccagaaaagaaagctacagaagaaactggggctcctccagggtggcagcaacaataaatagacacgcacggcagccac

SEQ ID NO: 458798 - DNA, 555 bp, Homo sapiens
tgggctggagccagactgtggtctgaggaggagacacagccttataagctgagggagtggagaggcccggggccaggaaagcagagacagacaaagcgttaggagaagaagagaggcagggaagacaagccaggcacgatggccaccttcccaccagcaaccagcgccccccagcagcccccaggcccggaggacgaggactccagcctggatgaatctgacctctatagcctggcccattcctacctcggaggtggaggccggaaaggtcgcaccaagagagaagctgctgccaacaccaaccgccccagccctggcgggcacgagaggaaactggtgaccaagctgcagaattcagagaggaagaagcgaggggcacggcgctgagacagagctggagatgaggccagaccatggacactacacccagcaatagagacgggactgcggaggaaggaggacccaggacaggatccaggccggcttgccacacccccccctcctctgtgctgcctcctctgtgctcctcctctgtcctcctctgtgctgtcgggt

SEQ ID NO: 458799 - DNA, 1055 bp, Homo sapiens
tgggctggagccagactgtggtctgaggaggagacacagccttataagctgagggagtggagaggcccggggccaggaaagcagagacagacaaagcgttaggagaagaagagaggcagggaagacaagccaggcacgatggccaccttcccaccagcaaccagcgccccccagcagcccccaggcccggaggacgaggactccagcctggatgaatctgacctctatagcctggcccattcctacctcgggcctctcatcatgcctatgcccacttcacctctgactcctgccttggttacaggaggtggaggccggaaaggtcgcaccaagagagaagctgctgccaacaccaaccgccccagccctggcgggcacgagaggaaactggtgaccaagctgcagaattcagagaggaagaagcgaggggcacggcgctgagacagagctggagatgaggccagaccatggacactacacccagcaatagagacgggactgcggaggaaggaggacccaggacaggatccaggccggcttgccacaccccccacccctaggacttattcccgctgactgagtctctgaggggctaccaggaaagcgcctccaaccctagcaaaagtgcaagatggggagtgagaggctgggaatggaggggcagagccaggaagatcccccagaacacagcttgggtgtgtgttcatccttgttctttgtgtgttttgttcgggcatgtgtgtgcttgcctgtgcctgcacattcatgagcctgagagagcatctttgatgtgtatttgtgtttggtgtatgtatctggggcagggagtgttcctgctcttgcagggtctacgctgtgaatgcagcttttggtttgtttgcttttgcttgcatatattttagtgcatacatttctgtgggctcctacgtagtggaaaggaatttcttctgcttttttgcgatactgcccatgaaacacggccctccccagcacctgtttttgttgattgtgtcctgttcatagacgggaacgctacttatgagtgccatctaaaa

SEQ ID NO: 458800 - DNA, 800 bp, Homo sapiens
tgggctggagccagactgtggtctgaggaggagacacagccttataagctgagggagtggagaggcccggggccaggaaagcagagacagacaaagcgttaggagaagaagagaggcagggaagacaagccaggcacgatggccaccttcccaccagcaaccagcgccccccagcagcccccaggcccggaggacgaggactccagcctggatgaatctgacctctatagcctggcccattcctacctcggaggtggaggccggaaaggtcgcaccaagagagaagctgctgccaacaccaaccgccccagccctggcgggcacgagaggaaactggtgaccaagctgcagaattcagagaggaagaagcgaggggcacggcgctgagacagagctggagatgaggccagaccatggacactacacccagcacagcttgggtgtgtgttcatccttgttctttgtgtgttttgttcgggcatgtgtgtgcttgcctgtgcctgcacattcatgagcctgagagagcatctttgatgtgtatttgtgtttggtgtatgtatctggggcagggagtgttcctgctcttgcagggtctacgctgtgaatgcagcttttggtttgtttgcttttgcttgcatatattttagtgcatacatttctgtgggctcctacgtagtggaaaggaatttcttctgcttttttgcgatactgcccatgaaacacggccctccccagcacctgtttttgttgattgtgtcctgttcatagacgggaacgctacttatgagtgccatctaaaa

SEQ ID NO: 458801 - DNA, 516 bp, Homo sapiens
  misc_feature (31)..(32): n is a, c, g, or t
  misc_feature (40)..(40): n is a, c, g, or t
ctctagaggatctcggctgcctagcacttcnntctgactntatagctggccattcctacctcggaggtggaggccggaaaggtcgcaccaagagagaagctgctgccaacaccaaccgccccagccctggcgggcacgagaggaaactggtgaccaagctgcagaattcagagaggaagaagcgaggggcacggcgctgagacagagctggagatgaggccagaccatggacactacacccagcaatagagacgggactgcggaggaaggaggacccaggacaggatccaggccggcttgccacaccccccacccctaggacttattcccgctgactgagtctctgaggggctaccaggaaagcgcctccaaccctagcaaaagtgcaagatggggagtgagaggctgggaatggaggggcagagccaggaagatcccccagaaaagaaagctacagaagaaactggggctcctccagggtggcagcaacaataaatagacacgcacggcagccac

SEQ ID NO: 458802 - DNA, 1108 bp, Homo sapiens
  misc_feature (1108)..(1108): n is a, c, g, or t
tgggctggagccagactgtggtctgaggaggagacacagccttataagctgagggagtggagaggcccggggccaggaaagcagagacagacaaagcgttaggagaagaagagaggcagggaagacaagccaggcacgatggccaccttcccaccagcaaccagcgccccccagcagcccccaggcccggaggacgaggactccagcctggatgaatctgacctctatagcctggcccattcctacctcggaggtggaggccggaaaggtcgcaccaagagagaagctgctgccaacaccaaccgccccagccctggcgggcacgagaggaaactggtgaccaagctgcagaattcagagaggaagaagcgaggggcacggcgctgagacagagctggagatgaggccagaccatggacactacacccagcaatagagacgggactgcggaggaaggaggacccaggacaggatccaggccggcttgccacaccccccacccctaggacttattcccgctgactgagtctctgaggggctaccaggaaagcgcctccaaccctagcaaaagtgcaagatggggagtgagaggctgggaatggaggggcagagccaggaagatcccccagaaaagaaagctacagaagaaactggggctcctccagggtggcagcaacaataaatagacacgcacggcagccacaaaaaaaaaaacacatagaaaaaaaaaacaatttttcggccgcccttgggcgccacggggaagaggttttcttacaccccattccgttttggggccgggggccccccacgaaagtttggggctcacaccagtggggcacatcactgggtaccccaaacgacagatcctggtgccagttcacataagggggcatcgagtctttcccacgacaataaaaaaacggccggagtggcaaccaagcagttgtttggtagacacaaattccaagataggagttcggaggggccaacacgaggccaatcaacaagggggtccaaagggagactcagtaatcagtgtagcgccgcacggggacatacagtgtccaacaatacagaacacataaccacatgacacaacagaggn

SEQ ID NO: 458803 - DNA, 922 bp, Homo sapiens
tgggctggagccagactgtggtctgaggaggagacacagccttataagctgagggagtggagaggcccggggccaggaaagcagagacagacaaagcgttaggagaagaagagaggcagggaagacaagccaggcacgatggccaccttcccaccagcaaccagcgccccccagcagcccccaggcccggaggacgaggactccagcctggatgaatctgacctctatagcctggcccattcctacctcggaggtggaggccggaaaggtcgcaccaagagagaagctgctgccaacaccaaccgccccagccctggcgggcacgagaggaaactggtgaccaagctgcagaattcagagaggaagaagcgaggggcacggcgctgagacagagctggagatgaggccagaccatggacactacacccagcaatagagacgggactgcggaggaaggaggacccaggacaggatccaggccggcttgccacaccccccacccctaggacttattcccgctgactgagtctctgaggggctaccaggaaagcgcctccaaccctagcaaaagtgcaagatggggagtgagaggctgggaatggaggggcagagccaggaagatcccccagaaaagaaagctacagaagaaactggggctcctccagggtggcagcaacaataaatagacacgcacggcagccacaaaaaaacacacatccaaaccataaaaaaaatacaaaacaaaaaacagggggggggccagccaaaagatataccgcccagggagggccccacagtacacccggtaacccgcaagttttgctttgacaccaagggggccccccacaaagcgacgcccgcaattaataacacgagaggaccgcggggccggcgtaaacaaacacttggtacgtgggaaaaa

SEQ ID NO: 458804 - DNA, 667 bp, Homo sapiens
atcctaatacgactcactataggactcgagcggccgcccgggcaggtgagacagacaaagcgttaggagaagaagagaggcagggaagacaagccaggcacgatggccaccttcccaccagcaaccagcgccccccagcagcccccaggcccggaggacgaggactccagcctggatgaatctgacctctatagcctggcccattcctacctcggaggtggaggccggaaaggtcgcaccaagagagaagctgctgccaacaccaaccgccccagccctggcgggcacgagaggaaactggtgaccaagctgcagaattcagagaggaagaagcgaggggcacggcgctgagacagagctggagatgaggccagaccatggacactacacccagcaatagagacgggactgcggaggaaggaggacccaggacaggatccaggccggcttgccacaccccccacccctaggacttattcccgctgactgagtctctgaggggctaccaggaaagcgcctccaaccctagcaaaagtgcaagatggggagtgagaggctgggaatggaggggcagagccaggaagatcccccagaaaagaaagctacagaagaaactggggctcctccagggtggcagcaacaataaatagacacgcacggcagccac

SEQ ID NO: 458805 - DNA, 293 bp, Homo sapiens
cagggtaaaccctgggtataatttgtctagacctccatgtctcctttagtctgagttctgacataattaactgtctatgagatgtactgggcctttcctcattgctttttgatgccacctcactaatgtaaacaaaacattcattttttcatcctattttttcttacagctgcttagcacagtccttatgaaaaaatgaagccttgaaaatggtatatcctctcgacaaagctaagcctgacaagttggctgcattacctagaattagagaagagcaagggcagatggtggga

SEQ ID NO: 458806 - DNA, 2809 bp, Homo sapiens
  misc_feature (1295)..(1295): n is a, c, g, or t
  misc_feature (1297)..(1298): n is a, c, g, or t
  misc_feature (1300)..(1300): n is a, c, g, or t
  misc_feature (2324)..(2324): n is a, c, g, or t
  misc_feature (2357)..(2357): n is a, c, g, or t
  misc_feature (2505)..(2505): n is a, c, g, or t
  misc_feature (2527)..(2527): n is a, c, g, or t
  misc_feature (2529)..(2529): n is a, c, g, or t
  misc_feature (2533)..(2533): n is a, c, g, or t
cagataaagacagagcagcctgtctttatcggaggttcctctgccagtaggaggggcccggagaaaaccagaaagagggccagagccagagaaacatgaagcaccccggggcctcccacaccagtgcctgagcaggaatggggaggggccatgattcacaaggccctgggaggtcactttaaagagggctgctcaactgcaaggacgctgtaagcaggaagagaagccacagcgcttcagaaaagagtgggacagggacaagcatatctaagaggctgaacatgaatccacagatcagaaacccgatgaaggcaatgtatccaggcacattctacttccaatttaaaaacctatgggaagccaacgatcggaacgaaacttggctgtgcttcaccgtggaaggtataaagcgccgctcagttgtctcctggaagacgggcgtcttccgaaaccaggtggattctgagacccattgtcatgcagaaaggtgcttcctctcttggttctgcgacgacatactgtctcctaacacaaagtaccaggtcacctggtacacatcttggagcccttgcccagactgtgcaggggaggtggccgagttcctggccaggcacagcaacgtgaatctcaccatcttcaccgcccgcctctactacttccagtatccatgttaccaggaggggctccgcagcctgagtcaggaaggggtcgctgtggagatcatggactatgaagattttaaatattgttgggaaaactttgtgtacaatgataatgagccattcaagccttggaagggattaaaaaccaactttcgacttctgaaaagaaggctacgggagagtctccagtgaggggtctccctgggcctcatggtctgtctcctctagcctcctgctcatgctgcacgggcctcccctccaccctggacccgctctgtttctgcctggtcatcctgagcccctcctggcctcagggccattccacagtgctcccctgcctcaccgcttcctcctcgctcttccagactcttcctgcagaggctcctttctgcctccatggctatccatccacccccacagaccccgttcctccagcctgcgtgcccctaacctggcttttcccatctccccagcataaccaaatcttactaaactcatcctaggctgggcatggtgactcacgcctgtaatcccccagcaatttgggaggcaaaggtgggagaatcgcgtgagcccaggagttccagaccaggctgggtcacatgacaaagccccatctctacaaaaaaaaanannangaaaagccagatgtggtggcatgcatctgtagtccaagctacttgggaggctgaagtgggaggattacttgagcccgagaggtggaggctggagtgaacagagatcgcgccactgaactcgggtctgggcaacagatagagaccctgcctgaaaataaatcgataaataaactcaacctaaacaggtgtgaatatatgtaagttgaaaacccgaagttttgagaaacatcctttgtaaatttcatcctatgaattgggtcattcatgtcctacccagctaaaacagaggccaggagccagggaggaaaagcagtcaggccacacaacattgtttccgaaatggacttctctgcaagcctgactcctgagactgtgcattgtaccctgaaaccagctttatccatagcttctgcgataaatggctgtaagtcttggactccttgctccaaacgcagcgactcagcaatagaacctcccagctcccagcccttcctagtgcccatgggctttacatagggcaagagaacatttctccttctataattgccatctctttgctctctcaacatggtgaacaccatccggactccgtgtatgtctcaaattacaattctttctttgcaaatgaaatatgaaatttagaggctcttctaaacactttaaatttgatttgacattttcaaagcagatgtaagttttagagaatgagattctccataaaaatgaccctttcatgctgtggcctccatagaagatgtcccaggccaggtgcccacatggcaggcatttattttctcacagatctggaagctgcaggtccaacttcgaggggtgggtggggttgtttcctctgaggccgctccttctggctggcagggagtctcttccagccgtgtcctctgtggcctttcctctatgcacacgcacctctgggatctctctgcctccaaatatcatctttttttttttttttttttttgagacagagtgttgctcctcttgtccaggctggaatgcaatggcncaatctggactcactgcaacctccgcctcccgngtttaagcgattcttctgcttcagcctcccgagtaaaaggcatgcatcaccacacctggttaattttgtagttttagtagagatggggtctcaccatgttggccagactggtctcgaactcctgacctcaggtgatccgcctgtctcngcctctccaagtgctgggattncnggcntcagccactatgcccggctgggatcatatgttccacacatgtttgttcaataagcatggactgcaaccacctacatgaatattcatagctcctcctgtagcctgttgaatatgtatgtttagccaacctcttcagcataaagctcctgcccaaacccctcctgctcctaaatgtctgtctctggtgttaaccagaggctgctcttcccaggctgctggatggctaccttgcaggctgtcacccttaacaagaaataaagtgtcctttgcaaatgca

SEQ ID NO: 458807 - DNA, 1360 bp, Homo sapiens
cagataaagacagagcagcctgtctttatcggaggttcctctgccagtaggaggggcccggagaaaaccagaaagagggccagagccagagaaacatgaagcaccccggggcctcccacaccagtgcctgagcaggaatggggaggggccatgattcacaaggccctgggaggtcactttaaagagggctgctcaactgcaaggacgctgtaagcaggaagagaagccacagcgcttcagaaaagagtgggacagggacaagcatatctaagaggctgaacatgaatccacagatcagaaacccgatgaaggcaatgtatccaggcacattctacttccaatttaaaaacctatgggaagccaacgatcggaacgaaacttggctgtgcttcaccgtggaaggtataaagcgccgctcagttgtctcctggaagacgggcgtcttccgaaaccaggtggattctgagacccattgtcatgcagaaaggtgcttcctctcttggttctgcgacgacatactgtctcctaacacaaagtaccaggtcacctggtacacatcttggagcccttgcccagactgtgcaggggaggtggccgagttcctggccaggcacagcaacgtgaatctcaccatcttcaccgcccgcctctactacttccagtatccatgttaccaggaggggctccgcagcctgagtcaggaaggggtcgctgtggagatcatggactatgaagattttaaatattgttgggaaaactttgtgtacaatgataatgagccattcaagccttggaagggattaaaaaccaactttcgacttctgaaaagaaggctacgggagagtctccagtgaggggtctccctgggcctcatggtctgtctcctctagcctcctgctcatgctgcacgggcctcccctccaccctggacccgctctgtttctgcctggtcatcctgagcccctcctggcctcagggccattccacagtgctcccctgcctcaccgcttcctcctcgctcttccagactcttcctgcagaggctcctttctgcctccatggctatccatccacccccacagaccccgttcctccagcctgcgtgcccctaacctggcttttcccatctccccagcataaccaaatcttactaaactcatcctaggctgggcatggtgactcacgcctgtaatcccccagcaatttgggaggcaaaggtgggagaatcgcgtgagcccaggagttccagaccaggctgggtcacatgacaaagccccatctctacaaaaaaaaacaggacgaggtcgcccagaggccaagcctcccggccgggaccccattccccaggcgtgctgctggc

SEQ ID NO: 458808 - DNA, 2756 bp, Homo sapiens
  misc_feature (1242)..(1242): n is a, c, g, or t
  misc_feature (1244)..(1245): n is a, c, g, or t
  misc_feature (1247)..(1247): n is a, c, g, or t
  misc_feature (2271)..(2271): n is a, c, g, or t
  misc_feature (2304)..(2304): n is a, c, g, or t
  misc_feature (2452)..(2452): n is a, c, g, or t
  misc_feature (2474)..(2474): n is a, c, g, or t
  misc_feature (2476)..(2476): n is a, c, g, or t
  misc_feature (2480)..(2480): n is a, c, g, or t
cagataaagacagagcagcctgtctttatcggaggttcctctgccagtaggaggggcccggagaaaaccagaaagagggccagagccagagaaacatgaagcaccccggggcctcccacaccagtgcctgagcaggaatggggaggggccatgattcacaaggccctgggaggtcactttaaagagggctgctcaactgcaaggacgctgtaagcaggaagagaagccacagcgcttcagaaaagagtgggacagggacaagcatatctaagaggctgaacatgaatccacagatcagaaacccgatgaaggcaatgtatccaggcacattctacttccaatttaaaaacctatgggaagccaacgatcggaacgaaacttggctgtgcttcaccgtggaaggtggattctgagacccattgtcatgcagaaaggtgcttcctctcttggttctgcgacgacatactgtctcctaacacaaagtaccaggtcacctggtacacatcttggagcccttgcccagactgtgcaggggaggtggccgagttcctggccaggcacagcaacgtgaatctcaccatcttcaccgcccgcctctactacttccagtatccatgttaccaggaggggctccgcagcctgagtcaggaaggggtcgctgtggagatcatggactatgaagattttaaatattgttgggaaaactttgtgtacaatgataatgagccattcaagccttggaagggattaaaaaccaactttcgacttctgaaaagaaggctacgggagagtctccagtgaggggtctccctgggcctcatggtctgtctcctctagcctcctgctcatgctgcacgggcctcccctccaccctggacccgctctgtttctgcctggtcatcctgagcccctcctggcctcagggccattccacagtgctcccctgcctcaccgcttcctcctcgctcttccagactcttcctgcagaggctcctttctgcctccatggctatccatccacccccacagaccccgttcctccagcctgcgtgcccctaacctggcttttcccatctccccagcataaccaaatcttactaaactcatcctaggctgggcatggtgactcacgcctgtaatcccccagcaatttgggaggcaaaggtgggagaatcgcgtgagcccaggagttccagaccaggctgggtcacatgacaaagccccatctctacaaaaaaaaanannangaaaagccagatgtggtggcatgcatctgtagtccaagctacttgggaggctgaagtgggaggattacttgagcccgagaggtggaggctggagtgaacagagatcgcgccactgaactcgggtctgggcaacagatagagaccctgcctgaaaataaatcgataaataaactcaacctaaacaggtgtgaatatatgtaagttgaaaacccgaagttttgagaaacatcctttgtaaatttcatcctatgaattgggtcattcatgtcctacccagctaaaacagaggccaggagccagggaggaaaagcagtcaggccacacaacattgtttccgaaatggacttctctgcaagcctgactcctgagactgtgcattgtaccctgaaaccagctttatccatagcttctgcgataaatggctgtaagtcttggactccttgctccaaacgcagcgactcagcaatagaacctcccagctcccagcccttcctagtgcccatgggctttacatagggcaagagaacatttctccttctataattgccatctctttgctctctcaacatggtgaacaccatccggactccgtgtatgtctcaaattacaattctttctttgcaaatgaaatatgaaatttagaggctcttctaaacactttaaatttgatttgacattttcaaagcagatgtaagttttagagaatgagattctccataaaaatgaccctttcatgctgtggcctccatagaagatgtcccaggccaggtgcccacatggcaggcatttattttctcacagatctggaagctgcaggtccaacttcgaggggtgggtggggttgtttcctctgaggccgctccttctggctggcagggagtctcttccagccgtgtcctctgtggcctttcctctatgcacacgcacctctgggatctctctgcctccaaatatcatctttttttttttttttttttttgagacagagtgttgctcctcttgtccaggctggaatgcaatggcncaatctggactcactgcaacctccgcctcccgngtttaagcgattcttctgcttcagcctcccgagtaaaaggcatgcatcaccacacctggttaattttgtagttttagtagagatggggtctcaccatgttggccagactggtctcgaactcctgacctcaggtgatccgcctgtctcngcctctccaagtgctgggattncnggcntcagccactatgcccggctgggatcatatgttccacacatgtttgttcaataagcatggactgcaaccacctacatgaatattcatagctcctcctgtagcctgttgaatatgtatgtttagccaacctcttcagcataaagctcctgcccaaacccctcctgctcctaaatgtctgtctctggtgttaaccagaggctgctcttcccaggctgctggatggctaccttgcaggctgtcacccttaacaagaaataaagtgtcctttgcaaatgca

SEQ ID NO: 458809 - DNA, 2412 bp, Homo sapiens
  misc_feature (898)..(898): n is a, c, g, or t
  misc_feature (900)..(901): n is a, c, g, or t
  misc_feature (903)..(903): n is a, c, g, or t
  misc_feature (1927)..(1927): n is a, c, g, or t
  misc_feature (1960)..(1960): n is a, c, g, or t
  misc_feature (2108)..(2108): n is a, c, g, or t
  misc_feature (2130)..(2130): n is a, c, g, or t
  misc_feature (2132)..(2132): n is a, c, g, or t
  misc_feature (2136)..(2136): n is a, c, g, or t
ttatatcttctttccaagccaagaaagcttcttcttcaataatttccatgtcatagaagtgcacaaaaaagcgaagtaacatgccttttgggaagttgctgttatagcagtgcacctggagagcatacagggcactgacttgtagatcaacgtgatcatgaagaaatttctgcattactggcttgaaagatagtagtagttgtttttcctgctctaactgttctttggaaggagcagaggatgaatctgtttcatcgctgggggggtttacttcactagaaatgtactgtaagaagctagtcaggaaggggtcgctgtggagatcatggactatgaagattttaaatattgttgggaaaactttgtgtacaatgataatgagccattcaagccttggaagggattaaaaaccaactttcgacttctgaaaagaaggctacgggagagtctccagtgaggggtctccctgggcctcatggtctgtctcctctagcctcctgctcatgctgcacgggcctcccctccaccctggacccgctctgtttctgcctggtcatcctgagcccctcctggcctcagggccattccacagtgctcccctgcctcaccgcttcctcctcgctcttccagactcttcctgcagaggctcctttctgcctccatggctatccatccacccccacagaccccgttcctccagcctgcgtgcccctaacctggcttttcccatctccccagcataaccaaatcttactaaactcatcctaggctgggcatggtgactcacgcctgtaatcccccagcaatttgggaggcaaaggtgggagaatcgcgtgagcccaggagttccagaccaggctgggtcacatgacaaagccccatctctacaaaaaaaaanannangaaaagccagatgtggtggcatgcatctgtagtccaagctacttgggaggctgaagtgggaggattacttgagcccgagaggtggaggctggagtgaacagagatcgcgccactgaactcgggtctgggcaacagatagagaccctgcctgaaaataaatcgataaataaactcaacctaaacaggtgtgaatatatgtaagttgaaaacccgaagttttgagaaacatcctttgtaaatttcatcctatgaattgggtcattcatgtcctacccagctaaaacagaggccaggagccagggaggaaaagcagtcaggccacacaacattgtttccgaaatggacttctctgcaagcctgactcctgagactgtgcattgtaccctgaaaccagctttatccatagcttctgcgataaatggctgtaagtcttggactccttgctccaaacgcagcgactcagcaatagaacctcccagctcccagcccttcctagtgcccatgggctttacatagggcaagagaacatttctccttctataattgccatctctttgctctctcaacatggtgaacaccatccggactccgtgtatgtctcaaattacaattctttctttgcaaatgaaatatgaaatttagaggctcttctaaacactttaaatttgatttgacattttcaaagcagatgtaagttttagagaatgagattctccataaaaatgaccctttcatgctgtggcctccatagaagatgtcccaggccaggtgcccacatggcaggcatttattttctcacagatctggaagctgcaggtccaacttcgaggggtgggtggggttgtttcctctgaggccgctccttctggctggcagggagtctcttccagccgtgtcctctgtggcctttcctctatgcacacgcacctctgggatctctctgcctccaaatatcatctttttttttttttttttttttgagacagagtgttgctcctcttgtccaggctggaatgcaatggcncaatctggactcactgcaacctccgcctcccgngtttaagcgattcttctgcttcagcctcccgagtaaaaggcatgcatcaccacacctggttaattttgtagttttagtagagatggggtctcaccatgttggccagactggtctcgaactcctgacctcaggtgatccgcctgtctcngcctctccaagtgctgggattncnggcntcagccactatgcccggctgggatcatatgttccacacatgtttgttcaataagcatggactgcaaccacctacatgaatattcatagctcctcctgtagcctgttgaatatgtatgtttagccaacctcttcagcataaagctcctgcccaaacccctcctgctcctaaatgtctgtctctggtgttaaccagaggctgctcttcccaggctgctggatggctaccttgcaggctgtcacccttaacaagaaataaagtgtcctttgcaaatgca

SEQ ID NO: 458810 - DNA, 1123 bp, Homo sapiens
cagataaagacagagcagcctgtctttatcggaggttcctctgccagtaggaggggcccggagaaaaccagaaagagggccagagccagagaaacatgaagcaccccggggcctcccacaccagtgcctgagcaggaatggggaggggccatgattcacaaggccctgggaggtcactttaaagagggctgctcaactgcaaggacgctgtaagcaggaagagaagccacagcgcttcagaaaagagtgggacagggacaagcatatctaagaggctgaacatgaatccacagatcagaaacccgatgaaggcaatgtatccaggcacattctacttccaatttaaaaacctatgggaagccaacgatcggaacgaaacttggctgtgcttcaccgtggaaggtataaagcgccgctcagttgtctcctggaagacgggcgtcttccgaaaccaggtggattctgagacccattgtcatgcagaaaggtgcttcctctcttggttctgcgacgacatactgtctcctaacacaaagtaccaggtcacctggtacacatcttggagcccttgcccagactgtgcaggggaggtggccgagttcctggccaggcacagcaacgtgaatctcaccatcttcaccgcccgcctctactacttccagtatccatgttaccaggaggggctccgcagcctgagtcaggaaggggtcgctgtggagatcatggactatgaagattttaaatattgttgggaaaactttgtgtacaatgataatgagccattcaagccttggaagggattaaaaaccaactttcgacttctgaaaagaaggctacgggagagtctccagtgaggggtctccctgggcctcatggtctgtctcctctagcctcctgctcatgctgcacgggcctcccctccaccctggacccgctctgtttctgcaggaggggccccgcaggccgccaagctggacagtgtagcgcctgggcagtcttccagtgggagatccgaagagaaggggtccggagttacctggaaggaggagctgacagaggcaaaagggggtgaagctaagggagagggatgggaggggtgtcaaagtgcgggagagtagacagg

SEQ ID NO: 458811 - DNA, 937 bp, Homo sapiens
cagataaagacagagcagcctgtctttatcggaggttcctctgccagtaggaggggcccggagaaaaccagaaagagggccagagccagagaaacatgaagcaccccggggcctcccacaccagtgcctgagcaggaatggggaggggccatgattcacaaggccctgggaggtcactttaaagagggctgctcaactgcaaggacgctgtaagcaggaagagaagccacagcgcttcagaaaagagtgggacagggacaagcatatctaagaggctgaacatgaatccacagatcagaaacccgatgaaggcaatgtatccaggcacattctacttccaatttaaaaacctatgggaagccaacgatcggaacgaaacttggctgtgcttcaccgtggaaggtataaagcgccgctcagttgtctcctggaagacgggcgtcttccgaaaccaggtggattctgagacccattgtcatgcagaaaggtgcttcctctcttggttctgcgacgacatactgtctcctaacacaaagtaccaggtcacctggtacacatcttggagcccttgcccagactgtgcaggggaggtggccgagttcctggccaggcacagcaacgtgaatctcaccatcttcaccgcccgcctctactacttccagtatccatgttaccaggaggggctccgcagcctgagtcaggaaggggtcgctgtggagatcatggactatgaagattttaaatattgttgggaaaactttgtgtacaatgataatgagccattcaagccttggaagggattaaaaaccaactttcgactcctgctcctaaatgtctgtctctggtgttaaccagaggctgctcttcccaggctgctggatggctaccttgcaggctgtcacccttaacaagaaataaagtgtcctttgcaaatgca

SEQ ID NO: 458812 - DNA, 998 bp, Homo sapiens
cagataaagacagagcagcctgtctttatcggaggttcctctgccagtaggaggggcccggagaaaaccagaaagagggccagagccagagaaacatgaagcaccccggggcctcccacaccagtgcctgagcaggaatggggaggggccatgattcacaaggccctgggaggtcactttaaagagggctgctcaactgcaaggacgctgtaagcaggaagagaagccacagcgcttcagaaaagagtgggacagggacaagcatatctaagaggctgaacatgaatccacagatcagaaacccgatgaaggcaatgtatccaggcacattctacttccaatttaaaaacctatgggaagccaacgatcggaacgaaacttggctgtgcttcaccgtggaaggtataaagcgccgctcagttgtctcctggaagacgggcgtcttccgaaaccaggtggattctgagacccattgtcatgcagaaaggtgcttcctctcttggttctgcgacgacatactgtctcctaacacaaagtaccaggtcacctggtacacatcttggagcccttgcccagactgtgcaggggaggtggccgagttcctggccaggcacagcaacgtgaatctcaccatcttcaccgcccgcctctactacttccagtatccatgttaccaggaggggctccgcagcctgagtcaggaaggggtcgctgtggagatcatggactatgaagccggctgggatcatatgttccacacatgtttgttcaataagcatggactgcaaccacctacatgaatattcatagctcctcctgtagcctgttgaatatgtatgtttagccaacctcttcagcataaagctcctgcccaaacccctcctgctcctaaatgtctgtctctggtgttaaccagaggctgctcttcccaggctgctggatggctaccttgcaggctgtcacccttaacaagaaataaagtgtcctttgcaaatgca

SEQ ID NO: 458813 - DNA, 2755 bp, Homo sapiens
  misc_feature (1241)..(1241): n is a, c, g, or t
  misc_feature (1243)..(1244): n is a, c, g, or t
  misc_feature (1246)..(1246): n is a, c, g, or t
  misc_feature (2270)..(2270): n is a, c, g, or t
  misc_feature (2303)..(2303): n is a, c, g, or t
  misc_feature (2451)..(2451): n is a, c, g, or t
  misc_feature (2473)..(2473): n is a, c, g, or t
  misc_feature (2475)..(2475): n is a, c, g, or t
  misc_feature (2479)..(2479): n is a, c, g, or t
cagataaagacagagcagcctgtctttatcggaggttcctctgccagtaggaggggcccggagaaaaccagaaagagggccagagccagagaaacatgaagcaccccggggcctcccacaccagtgcctgagcaggaatggggaggggccatgattcacaaggccctgggaggtcactttaaagagggctgctcaactgcaaggacgctgtaagcaggaagagaagccacagcgcttcagaaaagagtgggacagggacaagcatatctaagaggctgaacatgaatccacagatcagaaacccgatgaaggcaatgtatccaggcacattctacttccaatttaaaagtataaagcgccgctcagttgtctcctggaagacgggcgtcttccgaaaccaggtggattctgagacccattgtcatgcagaaaggtgcttcctctcttggttctgcgacgacatactgtctcctaacacaaagtaccaggtcacctggtacacatcttggagcccttgcccagactgtgcaggggaggtggccgagttcctggccaggcacagcaacgtgaatctcaccatcttcaccgcccgcctctactacttccagtatccatgttaccaggaggggctccgcagcctgagtcaggaaggggtcgctgtggagatcatggactatgaagattttaaatattgttgggaaaactttgtgtacaatgataatgagccattcaagccttggaagggattaaaaaccaactttcgacttctgaaaagaaggctacgggagagtctccagtgaggggtctccctgggcctcatggtctgtctcctctagcctcctgctcatgctgcacgggcctcccctccaccctggacccgctctgtttctgcctggtcatcctgagcccctcctggcctcagggccattccacagtgctcccctgcctcaccgcttcctcctcgctcttccagactcttcctgcagaggctcctttctgcctccatggctatccatccacccccacagaccccgttcctccagcctgcgtgcccctaacctggcttttcccatctccccagcataaccaaatcttactaaactcatcctaggctgggcatggtgactcacgcctgtaatcccccagcaatttgggaggcaaaggtgggagaatcgcgtgagcccaggagttccagaccaggctgggtcacatgacaaagccccatctctacaaaaaaaaanannangaaaagccagatgtggtggcatgcatctgtagtccaagctacttgggaggctgaagtgggaggattacttgagcccgagaggtggaggctggagtgaacagagatcgcgccactgaactcgggtctgggcaacagatagagaccctgcctgaaaataaatcgataaataaactcaacctaaacaggtgtgaatatatgtaagttgaaaacccgaagttttgagaaacatcctttgtaaatttcatcctatgaattgggtcattcatgtcctacccagctaaaacagaggccaggagccagggaggaaaagcagtcaggccacacaacattgtttccgaaatggacttctctgcaagcctgactcctgagactgtgcattgtaccctgaaaccagctttatccatagcttctgcgataaatggctgtaagtcttggactccttgctccaaacgcagcgactcagcaatagaacctcccagctcccagcccttcctagtgcccatgggctttacatagggcaagagaacatttctccttctataattgccatctctttgctctctcaacatggtgaacaccatccggactccgtgtatgtctcaaattacaattctttctttgcaaatgaaatatgaaatttagaggctcttctaaacactttaaatttgatttgacattttcaaagcagatgtaagttttagagaatgagattctccataaaaatgaccctttcatgctgtggcctccatagaagatgtcccaggccaggtgcccacatggcaggcatttattttctcacagatctggaagctgcaggtccaacttcgaggggtgggtggggttgtttcctctgaggccgctccttctggctggcagggagtctcttccagccgtgtcctctgtggcctttcctctatgcacacgcacctctgggatctctctgcctccaaatatcatctttttttttttttttttttttgagacagagtgttgctcctcttgtccaggctggaatgcaatggcncaatctggactcactgcaacctccgcctcccgngtttaagcgattcttctgcttcagcctcccgagtaaaaggcatgcatcaccacacctggttaattttgtagttttagtagagatggggtctcaccatgttggccagactggtctcgaactcctgacctcaggtgatccgcctgtctcngcctctccaagtgctgggattncnggcntcagccactatgcccggctgggatcatatgttccacacatgtttgttcaataagcatggactgcaaccacctacatgaatattcatagctcctcctgtagcctgttgaatatgtatgtttagccaacctcttcagcataaagctcctgcccaaacccctcctgctcctaaatgtctgtctctggtgttaaccagaggctgctcttcccaggctgctggatggctaccttgcaggctgtcacccttaacaagaaataaagtgtcctttgcaaatgca

SEQ ID NO: 458814 - DNA, 2181 bp, Homo sapiens
  misc_feature (667)..(667): n is a, c, g, or t
  misc_feature (669)..(670): n is a, c, g, or t
  misc_feature (672)..(672): n is a, c, g, or t
  misc_feature (1696)..(1696): n is a, c, g, or t
  misc_feature (1729)..(1729): n is a, c, g, or t
  misc_feature (1877)..(1877): n is a, c, g, or t
  misc_feature (1899)..(1899): n is a, c, g, or t
  misc_feature (1901)..(1901): n is a, c, g, or t
  misc_feature (1905)..(1905): n is a, c, g, or t
aggagacgaggaagatggacgaggagaggacgcaatgatgagggggagggagagcgagagctagaaagagggagagagtaggacggaagaggatgaggagtaagaagggatggagaaggtggaggaagaaggagagaggagaatgaggaggagaacaagcaaggcggggagagatatagagaaggggcgaggagtacgggaaaggaggggcggagaagatccaaaggaagggtgtcagtgggccacaaagtggaatcctaaaggcaagggagaataaggcgcagagccgtcgcggctcacgggacaggatctggatgtgccaggtcatcgtgggcccctgatggcctaaggaccatggcacagtgctagggtgcctcagagcgcggatcgctcgtgcgaactcttcctgcagaggctcctttctgcctccatggctatccatccacccccacagaccccgttcctccagcctgcgtgcccctaacctggcttttcccatctccccagcataaccaaatcttactaaactcatcctaggctgggcatggtgactcacgcctgtaatcccccagcaatttgggaggcaaaggtgggagaatcgcgtgagcccaggagttccagaccaggctgggtcacatgacaaagccccatctctacaaaaaaaaanannangaaaagccagatgtggtggcatgcatctgtagtccaagctacttgggaggctgaagtgggaggattacttgagcccgagaggtggaggctggagtgaacagagatcgcgccactgaactcgggtctgggcaacagatagagaccctgcctgaaaataaatcgataaataaactcaacctaaacaggtgtgaatatatgtaagttgaaaacccgaagttttgagaaacatcctttgtaaatttcatcctatgaattgggtcattcatgtcctacccagctaaaacagaggccaggagccagggaggaaaagcagtcaggccacacaacattgtttccgaaatggacttctctgcaagcctgactcctgagactgtgcattgtaccctgaaaccagctttatccatagcttctgcgataaatggctgtaagtcttggactccttgctccaaacgcagcgactcagcaatagaacctcccagctcccagcccttcctagtgcccatgggctttacatagggcaagagaacatttctccttctataattgccatctctttgctctctcaacatggtgaacaccatccggactccgtgtatgtctcaaattacaattctttctttgcaaatgaaatatgaaatttagaggctcttctaaacactttaaatttgatttgacattttcaaagcagatgtaagttttagagaatgagattctccataaaaatgaccctttcatgctgtggcctccatagaagatgtcccaggccaggtgcccacatggcaggcatttattttctcacagatctggaagctgcaggtccaacttcgaggggtgggtggggttgtttcctctgaggccgctccttctggctggcagggagtctcttccagccgtgtcctctgtggcctttcctctatgcacacgcacctctgggatctctctgcctccaaatatcatctttttttttttttttttttttgagacagagtgttgctcctcttgtccaggctggaatgcaatggcncaatctggactcactgcaacctccgcctcccgngtttaagcgattcttctgcttcagcctcccgagtaaaaggcatgcatcaccacacctggttaattttgtagttttagtagagatggggtctcaccatgttggccagactggtctcgaactcctgacctcaggtgatccgcctgtctcngcctctccaagtgctgggattncnggcntcagccactatgcccggctgggatcatatgttccacacatgtttgttcaataagcatggactgcaaccacctacatgaatattcatagctcctcctgtagcctgttgaatatgtatgtttagccaacctcttcagcataaagctcctgcccaaacccctcctgctcctaaatgtctgtctctggtgttaaccagaggctgctcttcccaggctgctggatggctaccttgcaggctgtcacccttaacaagaaataaagtgtcctttgcaaatgca

SEQ ID NO: 458815 - DNA, 844 bp, Homo sapiens
cagataaagacagagcagcctgtctttatcggaggttcctctgccagtaggaggggcccggagaaaaccagaaagagggccagagccagagaaacatgaagcaccccggggcctcccacaccagtgcctgagcaggaatggggaggggccatgattcacaaggccctgggaggtcactttaaagagggctgctcaactgcaaggacgctgtaagcaggaagagaagccacagcgcttcagaaaagagtgggacagggacaagcatatctaagaggctgaacatgaatccacagatcagaaacccgatgaaggcaatgtatccaggcacattctacttccaatttaaaaacctatgggaagccaacgatcggaacgaaacttggctgtgcttcaccgtggaaggtataaagcgccgctcagttgtctcctggaagacgggcgtcttccgaaaccaggtggattctgagacccattgtcatgcagaaaggtgcttcctctcttggttctgcgacgacatactgtctcctaacacaaagtaccaggtcacctggtacacatcttggagcccttgcccagactgtgcaggggaggtggccgagttcctggccaggcacagcaacgtgaatctcaccatcttcaccgcccgcctctactacttccagtatccatgttaccaggaggggctccgcagcctgagtcaggaaggggtcgctgtggagatcatggactatgaagattttaaatattgttgggaaaactttgtgtacaatgataatgagctgctggatggctaccttgcaggctgtcacccttaacaagaaataaagtgtcctttgcaaatgca

SEQ ID NO: 458816 - DNA, 2512 bp, Homo sapiens
cgcaatgctgccgtgcgccgcgggagccagggggcgtggggccatggtggtcttgcgggcggggaagaagacctttctccccgctctctgccgcgccttcgcctgccgcggctgtcaactcgctccggagcgcggcgccgagcgcagggatacggcgcccagcggggtctcaagattctgccctccaagaaagtcttgccatgattggataggacccccagataaatattcaaaccttcgacctgttcacttttacatacctgaaaatgaatctccattggaacaaaagcttagaaaattaagacaagaaacacaagaatggaatcaacagttctgggcaaaccagaatttgacttttagtaaggaaaaagaagaatttattcactcaagactaaaaactaaaggcctgggcctgagaactgaatcaggtcagaaagcaacattgaatgcagaagaaatggcggacttctacaaggaatttttaagtaaaaattttcagaagcacatgtattataacagagattggtacaagcgcaattttgccatcaccttcttcatgggaaaagtggccctggaaaggatttggaacaagcttaaacagaaacaaaagaagaggagcaactaggagtccactctgacccagccagagtccaggtttccacaggaagcagatggagctcctttcacaggggctctgagaaaaactggagctgatctcaagaagccccacatcttcctaaggggccccatggcctgtttgggggcagggtaggtcctggggcactgtgggccgcctgcctgctgatgtgggctctaggccagcttgttgtcacgtacgtggtgtgaaataaagcccaagcactgggtgcccgtttcctgtgtttcgaattataccaattcaaaacagaactatttaaaaatattggccaggcacggtggctcacacctgtaatcccagcactttgggaggccgaggcgggtggatcacttgagatcaggagttcaagatcagtctggacaacatggcaaaaccctgtctctacaaaaaattagctgggtgtggtggcacgcacctgtaatcccagctgctctggaggctgaggcatgcgacgcttgaacccaggaggcggaggttgcagtgatccaagatcgcaccactgcactccagcctggaagaccaaacgagactctgtatcaaaaaataataataattaataaagttttactggaaaaaagaagtctgctgacgggaatgatgtggaagctgactgccaagcgatcggtgtgctggccgtggagtcagcaccaccctcactgtgagtcgtcagctggtgggtcctcacaggctgcgtcctgaatgcagtgcggtgtgaggacatgaaagcaaatgcaattttattgcatgccaaaaagtttaacttgattcttggtgttaactatgttagtagattcttcaatgctataagcaaattaacaagaaacagcagcactattttcctcttttcttaaacacgaaggttaaatggccaggcatggtgactcatacctgtaatcccaacaatttgggaggccaaggcaagcaaatcacttgagctcaggagttcgaaccagtttgggcaacatggcgaaaccctgcctctacaaaacatgcaaaaattagctgggcatggtagcatgcgcctgtagtcccagctactcgggaggctgagcttcgaggattgattgagccagtgaggtccaggctgcactaagccaagatcctaccactaggcaacagagccagaccctgtctcaaataaaaatttaaaaaaataataaaaaaggccgggcgcactggctcacgcctgtaatctcagcactttgggtggccaaggtgggcggatcacctgaggtcagttcaagaccagcctggccaaacatggtgaaaccctgtctacaaaaattagccaggcatgatggagggtgcctttagtcccagctctttgggaagctgaggcgggagaatagcatgaaccagggaggtggagggtgcctgtaatcccagctccttgggaggctaaggcaggagaatagcatgaacccggtaggtggaggttgcagtgagccgagatcgcgccactgcactccagcctgggcgacagagcaatactcccgtctcaaaaaaaaaaaaaaattaaatgattgtgatatgtgttacttttggtcacaaataaattgtaattaagattattctggccaggtgcggtggctcacgcctataatcccagcactttgggaggccgaggtgggcagatcatgaggtcaggagatcgagaccatcctgcccaacatggtgaaaccccgtttctactaaaaatgcaaaaattagctgggtgtggtggcgtgtgcctgtaatgccagctactcgggaggctgaggcacgagaatcacttgaacccagcaggcagaggttgcagtgagccaagattgcgccactgcactccagcctgacgacaaagcgagactccgtctc

SEQ ID NO: 458817 - DNA, 2250 bp, Homo sapiens
cgcaatgctgccgtgcgccgcgggagccagggggcgtggggccatggtggtcttgcgggcggggaagaagacctttctccccgctctctgccgcgccttcgcctgccgcggctgtcaactcgctccggagcgcggcgccgagcgcagggatacggcgcccagcggggtcagaaagcaacattgaatgcagaagaaatggcggacttctacaaggaatttttaagtaaaaattttcagaagcacatgtattataacagagattggtacaagcgcaattttgccatcaccttcttcatgggaaaagtggccctggaaaggatttggaacaagcttaaacagaaacaaaagaagaggagcaactaggagtccactctgacccagccagagtccaggtttccacaggaagcagatggagctcctttcacaggggctctgagaaaaactggagctgatctcaagaagccccacatcttcctaaggggccccatggcctgtttgggggcagggtaggtcctggggcactgtgggccgcctgcctgctgatgtgggctctaggccagcttgttgtcacgtacgtggtgtgaaataaagcccaagcactgggtgcccgtttcctgtgtttcgaattataccaattcaaaacagaactatttaaaaatattggccaggcacggtggctcacacctgtaatcccagcactttgggaggccgaggcgggtggatcacttgagatcaggagttcaagatcagtctggacaacatggcaaaaccctgtctctacaaaaaattagctgggtgtggtggcacgcacctgtaatcccagctgctctggaggctgaggcatgcgacgcttgaacccaggaggcggaggttgcagtgatccaagatcgcaccactgcactccagcctggaagaccaaacgagactctgtatcaaaaaataataataattaataaagttttactggaaaaaagaagtctgctgacgggaatgatgtggaagctgactgccaagcgatcggtgtgctggccgtggagtcagcaccaccctcactgtgagtcgtcagctggtgggtcctcacaggctgcgtcctgaatgcagtgcggtgtgaggacatgaaagcaaatgcaattttattgcatgccaaaaagtttaacttgattcttggtgttaactatgttagtagattcttcaatgctataagcaaattaacaagaaacagcagcactattttcctcttttcttaaacacgaaggttaaatggccaggcatggtgactcatacctgtaatcccaacaatttgggaggccaaggcaagcaaatcacttgagctcaggagttcgaaccagtttgggcaacatggcgaaaccctgcctctacaaaacatgcaaaaattagctgggcatggtagcatgcgcctgtagtcccagctactcgggaggctgagcttcgaggattgattgagccagtgaggtccaggctgcactaagccaagatcctaccactaggcaacagagccagaccctgtctcaaataaaaatttaaaaaaataataaaaaaggccgggcgcactggctcacgcctgtaatctcagcactttgggtggccaaggtgggcggatcacctgaggtcagttcaagaccagcctggccaaacatggtgaaaccctgtctacaaaaattagccaggcatgatggagggtgcctttagtcccagctctttgggaagctgaggcgggagaatagcatgaaccagggaggtggagggtgcctgtaatcccagctccttgggaggctaaggcaggagaatagcatgaacccggtaggtggaggttgcagtgagccgagatcgcgccactgcactccagcctgggcgacagagcaatactcccgtctcaaaaaaaaaaaaaaattaaatgattgtgatatgtgttacttttggtcacaaataaattgtaattaagattattctggccaggtgcggtggctcacgcctataatcccagcactttgggaggccgaggtgggcagatcatgaggtcaggagatcgagaccatcctgcccaacatggtgaaaccccgtttctactaaaaatgcaaaaattagctgggtgtggtggcgtgtgcctgtaatgccagctactcgggaggctgaggcacgagaatcacttgaacccagcaggcagaggttgcagtgagccaagattgcgccactgcactccagcctgacgacaaagcgagactccgtctc

SEQ ID NO: 458818 - DNA, 1713 bp, Homo sapiens
gcactgggtgcccgtttcctgtgtttgggctttatttcacaccacgtacgtgacaacaagcactgggtgcccgtttcctgtgtttcgaattataccaattcaaaacagaactatttaaaaatattggccaggcacggtggctcacacctgtaatcccagcactttgggaggccgaggcgggtggatcacttgagatcaggagttcaagatcagtctggacaacatggcaaaaccctgtctctacaaaaaattagctgggtgtggtggcacgcacctgtaatcccagctgctctggaggctgaggcatgcgacgcttgaacccaggaggcggaggttgcagtgatccaagatcgcaccactgcactccagcctggaagaccaaacgagactctgtatcaaaaaataataataattaataaagttttactggaaaaaagaagtctgctgacgggaatgatgtggaagctgactgccaagcgatcggtgtgctggccgtggagtcagcaccaccctcactgtgagtcgtcagctggtgggtcctcacaggctgcgtcctgaatgcagtgcggtgtgaggacatgaaagcaaatgcaattttattgcatgccaaaaagtttaacttgattcttggtgttaactatgttagtagattcttcaatgctataagcaaattaacaagaaacagcagcactattttcctcttttcttaaacacgaaggttaaatggccaggcatggtgactcatacctgtaatcccaacaatttgggaggccaaggcaagcaaatcacttgagctcaggagttcgaaccagtttgggcaacatggcgaaaccctgcctctacaaaacatgcaaaaattagctgggcatggtagcatgcgcctgtagtcccagctactcgggaggctgagcttcgaggattgattgagccagtgaggtccaggctgcactaagccaagatcctaccactaggcaacagagccagaccctgtctcaaataaaaatttaaaaaaataataaaaaaggccgggcgcactggctcacgcctgtaatctcagcactttgggtggccaaggtgggcggatcacctgaggtcagttcaagaccagcctggccaaacatggtgaaaccctgtctacaaaaattagccaggcatgatggagggtgcctttagtcccagctctttgggaagctgaggcgggagaatagcatgaaccagggaggtggagggtgcctgtaatcccagctccttgggaggctaaggcaggagaatagcatgaacccggtaggtggaggttgcagtgagccgagatcgcgccactgcactccagcctgggcgacagagcaatactcccgtctcaaaaaaaaaaaaaaattaaatgattgtgatatgtgttacttttggtcacaaataaattgtaattaagattattctggccaggtgcggtggctcacgcctataatcccagcactttgggaggccgaggtgggcagatcatgaggtcaggagatcgagaccatcctgcccaacatggtgaaaccccgtttctactaaaaatgcaaaaattagctgggtgtggtggcgtgtgcctgtaatgccagctactcgggaggctgaggcacgagaatcacttgaacccagcaggcagaggttgcagtgagccaagattgcgccactgcactccagcctgacgacaaagcgagactccgtctc

SEQ ID NO: 458819 - DNA, 2609 bp, Homo sapiens
actctgtctcaaaaaaaaaaaagaaagcttagcaaaggtggttgagtttcgggaaagggctgttattatttaaaccagaaactaggccctgtgtggtggctcctacttgtaatcccagcactttggctgagatcacgccactacactccagtctggcaacagagcgagctccgtctctaagtaaataaataaatccagattgtacattttataatactagagattcattttgtcatatgttaatccaatttactttgttaaaggtctcaagattctgccctccaagaaagtcttgccatgattggataggacccccagataaatattcaaaccttcgacctgttcacttttacatacctgaaaatgaatctccattggaacaaaagcttagaaaattaagacaagaaacacaagaatggaatcaacagttctgggcaaaccagaatttgacttttagtaaggaaaaagaagaatttattcactcaagactaaaaactaaaggcctgggcctgagaactgaatcaggtcagaaagcaacattgaatgcagaagaaatggcggacttctacaaggaatttttaagtaaaaattttcagaagcacatgtattataacagagattggtacaagcgcaattttgccatcaccttcttcatgggaaaagtggccctggaaaggatttggaacaagcttaaacagaaacaaaagaagaggagcaactaggagtccactctgacccagccagagtccaggtttccacaggaagcagatggagctcctttcacaggggctctgagaaaaactggagctgatctcaagaagccccacatcttcctaaggggccccatggcctgtttgggggcagggtaggtcctggggcactgtgggccgcctgcctgctgatgtgggctctaggccagcttgttgtcacgtacgtggtgtgaaataaagcccaagcactgggtgcccgtttcctgtgtttcgaattataccaattcaaaacagaactatttaaaaatattggccaggcacggtggctcacacctgtaatcccagcactttgggaggccgaggcgggtggatcacttgagatcaggagttcaagatcagtctggacaacatggcaaaaccctgtctctacaaaaaattagctgggtgtggtggcacgcacctgtaatcccagctgctctggaggctgaggcatgcgacgcttgaacccaggaggcggaggttgcagtgatccaagatcgcaccactgcactccagcctggaagaccaaacgagactctgtatcaaaaaataataataattaataaagttttactggaaaaaagaagtctgctgacgggaatgatgtggaagctgactgccaagcgatcggtgtgctggccgtggagtcagcaccaccctcactgtgagtcgtcagctggtgggtcctcacaggctgcgtcctgaatgcagtgcggtgtgaggacatgaaagcaaatgcaattttattgcatgccaaaaagtttaacttgattcttggtgttaactatgttagtagattcttcaatgctataagcaaattaacaagaaacagcagcactattttcctcttttcttaaacacgaaggttaaatggccaggcatggtgactcatacctgtaatcccaacaatttgggaggccaaggcaagcaaatcacttgagctcaggagttcgaaccagtttgggcaacatggcgaaaccctgcctctacaaaacatgcaaaaattagctgggcatggtagcatgcgcctgtagtcccagctactcgggaggctgagcttcgaggattgattgagccagtgaggtccaggctgcactaagccaagatcctaccactaggcaacagagccagaccctgtctcaaataaaaatttaaaaaaataataaaaaaggccgggcgcactggctcacgcctgtaatctcagcactttgggtggccaaggtgggcggatcacctgaggtcagttcaagaccagcctggccaaacatggtgaaaccctgtctacaaaaattagccaggcatgatggagggtgcctttagtcccagctctttgggaagctgaggcgggagaatagcatgaaccagggaggtggagggtgcctgtaatcccagctccttgggaggctaaggcaggagaatagcatgaacccggtaggtggaggttgcagtgagccgagatcgcgccactgcactccagcctgggcgacagagcaatactcccgtctcaaaaaaaaaaaaaaattaaatgattgtgatatgtgttacttttggtcacaaataaattgtaattaagattattctggccaggtgcggtggctcacgcctataatcccagcactttgggaggccgaggtgggcagatcatgaggtcaggagatcgagaccatcctgcccaacatggtgaaaccccgtttctactaaaaatgcaaaaattagctgggtgtggtggcgtgtgcctgtaatgccagctactcgggaggctgaggcacgagaatcacttgaacccagcaggcagaggttgcagtgagccaagattgcgccactgcactccagcctgacgacaaagcgagactccgtctc

SEQ ID NO: 458820 - DNA, 2633 bp, Homo sapiens
cgcaatgctgccgtgcgccgcgggagccagggggcgtggggccatggtggtcttgcgggcggggaagaagacctttctccccgctctctgccgcgccttcgcctgccgcggctgtcaactcgctccggagcgcggcgccgagcgcagggatacggcgcccagcggggtctcaagattctgccctccaagaaagtcttgccatgattggataggacccccagataaatattcaaaccttcgacctgttcacttttacatacctgaaaatgaatctccattggaacaaaagcttagaaaattaagacaagaaacacaagaatggaatcaacagttctgggcaaaccagaatttgacttttagtaaggaaaaagaagaatttattcactcaagactaaaaactaaaggcctgggcctgagaactgaatcagatggagtctcactctgtcacccaggctggagtgcagtggcacgatctcggctcactgcaaactctgcctcctggttcaagcgattctcctgcctcagccttctgagtagctgggactacaggtcagaaagcaacattgaatgcagaagaaatggcggacttctacaaggaatttttaagtaaaaattttcagaagcacatgtattataacagagattggtacaagcgcaattttgccatcaccttcttcatgggaaaagtggccctggaaaggatttggaacaagcttaaacagaaacaaaagaagaggagcaactaggagtccactctgacccagccagagtccaggtttccacaggaagcagatggagctcctttcacaggggctctgagaaaaactggagctgatctcaagaagccccacatcttcctaaggggccccatggcctgtttgggggcagggtaggtcctggggcactgtgggccgcctgcctgctgatgtgggctctaggccagcttgttgtcacgtacgtggtgtgaaataaagcccaagcactgggtgcccgtttcctgtgtttcgaattataccaattcaaaacagaactatttaaaaatattggccaggcacggtggctcacacctgtaatcccagcactttgggaggccgaggcgggtggatcacttgagatcaggagttcaagatcagtctggacaacatggcaaaaccctgtctctacaaaaaattagctgggtgtggtggcacgcacctgtaatcccagctgctctggaggctgaggcatgcgacgcttgaacccaggaggcggaggttgcagtgatccaagatcgcaccactgcactccagcctggaagaccaaacgagactctgtatcaaaaaataataataattaataaagttttactggaaaaaagaagtctgctgacgggaatgatgtggaagctgactgccaagcgatcggtgtgctggccgtggagtcagcaccaccctcactgtgagtcgtcagctggtgggtcctcacaggctgcgtcctgaatgcagtgcggtgtgaggacatgaaagcaaatgcaattttattgcatgccaaaaagtttaacttgattcttggtgttaactatgttagtagattcttcaatgctataagcaaattaacaagaaacagcagcactattttcctcttttcttaaacacgaaggttaaatggccaggcatggtgactcatacctgtaatcccaacaatttgggaggccaaggcaagcaaatcacttgagctcaggagttcgaaccagtttgggcaacatggcgaaaccctgcctctacaaaacatgcaaaaattagctgggcatggtagcatgcgcctgtagtcccagctactcgggaggctgagcttcgaggattgattgagccagtgaggtccaggctgcactaagccaagatcctaccactaggcaacagagccagaccctgtctcaaataaaaatttaaaaaaataataaaaaaggccgggcgcactggctcacgcctgtaatctcagcactttgggtggccaaggtgggcggatcacctgaggtcagttcaagaccagcctggccaaacatggtgaaaccctgtctacaaaaattagccaggcatgatggagggtgcctttagtcccagctctttgggaagctgaggcgggagaatagcatgaaccagggaggtggagggtgcctgtaatcccagctccttgggaggctaaggcaggagaatagcatgaacccggtaggtggaggttgcagtgagccgagatcgcgccactgcactccagcctgggcgacagagcaatactcccgtctcaaaaaaaaaaaaaaattaaatgattgtgatatgtgttacttttggtcacaaataaattgtaattaagattattctggccaggtgcggtggctcacgcctataatcccagcactttgggaggccgaggtgggcagatcatgaggtcaggagatcgagaccatcctgcccaacatggtgaaaccccgtttctactaaaaatgcaaaaattagctgggtgtggtggcgtgtgcctgtaatgccagctactcgggaggctgaggcacgagaatcacttgaacccagcaggcagaggttgcagtgagccaagattgcgccactgcactccagcctgacgacaaagcgagactccgtctc

SEQ ID NO: 458821 - DNA, 2293 bp, Homo sapiens
ggaagacaaacccgggcctcggggccactccctgttctgcacagccgcctcaggcctttgtccaggtgctctcgcgtcctatcccgaacagtcccgcagccccgaggctcccgcatcaacgccctcagtcggatgggactgagggtgccgccgccaccacgccggggactgttgacagccagaacctttaagcgtaacagagtcacctggtcagaaagcaacattgaatgcagaagaaatggcggacttctacaaggaatttttaagtaaaaattttcagaagcacatgtattataacagagattggtacaagcgcaattttgccatcaccttcttcatgggaaaagtggccctggaaaggatttggaacaagcttaaacagaaacaaaagaagaggagcaactaggagtccactctgacccagccagagtccaggtttccacaggaagcagatggagctcctttcacaggggctctgagaaaaactggagctgatctcaagaagccccacatcttcctaaggggccccatggcctgtttgggggcagggtaggtcctggggcactgtgggccgcctgcctgctgatgtgggctctaggccagcttgttgtcacgtacgtggtgtgaaataaagcccaagcactgggtgcccgtttcctgtgtttcgaattataccaattcaaaacagaactatttaaaaatattggccaggcacggtggctcacacctgtaatcccagcactttgggaggccgaggcgggtggatcacttgagatcaggagttcaagatcagtctggacaacatggcaaaaccctgtctctacaaaaaattagctgggtgtggtggcacgcacctgtaatcccagctgctctggaggctgaggcatgcgacgcttgaacccaggaggcggaggttgcagtgatccaagatcgcaccactgcactccagcctggaagaccaaacgagactctgtatcaaaaaataataataattaataaagttttactggaaaaaagaagtctgctgacgggaatgatgtggaagctgactgccaagcgatcggtgtgctggccgtggagtcagcaccaccctcactgtgagtcgtcagctggtgggtcctcacaggctgcgtcctgaatgcagtgcggtgtgaggacatgaaagcaaatgcaattttattgcatgccaaaaagtttaacttgattcttggtgttaactatgttagtagattcttcaatgctataagcaaattaacaagaaacagcagcactattttcctcttttcttaaacacgaaggttaaatggccaggcatggtgactcatacctgtaatcccaacaatttgggaggccaaggcaagcaaatcacttgagctcaggagttcgaaccagtttgggcaacatggcgaaaccctgcctctacaaaacatgcaaaaattagctgggcatggtagcatgcgcctgtagtcccagctactcgggaggctgagcttcgaggattgattgagccagtgaggtccaggctgcactaagccaagatcctaccactaggcaacagagccagaccctgtctcaaataaaaatttaaaaaaataataaaaaaggccgggcgcactggctcacgcctgtaatctcagcactttgggtggccaaggtgggcggatcacctgaggtcagttcaagaccagcctggccaaacatggtgaaaccctgtctacaaaaattagccaggcatgatggagggtgcctttagtcccagctctttgggaagctgaggcgggagaatagcatgaaccagggaggtggagggtgcctgtaatcccagctccttgggaggctaaggcaggagaatagcatgaacccggtaggtggaggttgcagtgagccgagatcgcgccactgcactccagcctgggcgacagagcaatactcccgtctcaaaaaaaaaaaaaaattaaatgattgtgatatgtgttacttttggtcacaaataaattgtaattaagattattctggccaggtgcggtggctcacgcctataatcccagcactttgggaggccgaggtgggcagatcatgaggtcaggagatcgagaccatcctgcccaacatggtgaaaccccgtttctactaaaaatgcaaaaattagctgggtgtggtggcgtgtgcctgtaatgccagctactcgggaggctgaggcacgagaatcacttgaacccagcaggcagaggttgcagtgagccaagattgcgccactgcactccagcctgacgacaaagcgagactccgtctc

SEQ ID NO: 458822 - DNA, 2992 bp, Homo sapiens
ctcggttttcagtaagtgtggtgaactcggtgttttgcctctttccctgaacttagcggtaggttcggtattaagctgcagtgctgcagtgtggatggtgccctgcttagcagatattacagtgcttctgctgcttgttgagccttggcctgggggtgtttgagccaaatgcaaggagacctgtcctgagggacgcccatgtcaatggagtcaggtggcagcagctggtacccctgcctttgggatactcccgtggtcaccctaacagcagtgaccacaagcaagcacttctgtgccagccgcgcccctcctgccacactgacggagtgtagcttcatgaggtgcgcggttgctgtcacacactagagaggaagaaactgagatggaggtaagtcacagctctggggccacacagccaggtggggacagtcttggcctctgtccatcccagatgaggtctcgctatgttgaccaggctggcctcaagcagtcttcctgcctcaacctctgagtacggacacagttttgagcgccctatatgtgtattaacagtaacacatgagacagagtaggccctctttatccgagggatacattccaagacccccagtgaatgcctaagactgaggctagtaccaagccctgtatgtacactaggtttttccctacacggttgtccctcccctatgtcctcagttcaaccaaccacagattgaaaaatattgaaaacaataaacatataaacaataaaatattgaaaataaaaaatacaattttttctttttagatggagtctcactctgtcacccaggctggagtgcagtggcacgatctcggctcactgcaaactctgcctcctggttcaagcgattctcctgcctcagccttctgagtagctgggactacaggtcagaaagcaacattgaatgcagaagaaatggcggacttctacaaggaatttttaagtaaaaattttcagaagcacatgtattataacagagattggtacaagcgcaattttgccatcaccttcttcatgggaaaagtggccctggaaaggatttggaacaagcttaaacagaaacaaaagaagaggagcaactaggagtccactctgacccagccagagtccaggtttccacaggaagcagatggagctcctttcacaggggctctgagaaaaactggagctgatctcaagaagccccacatcttcctaaggggccccatggcctgtttgggggcagggtaggtcctggggcactgtgggccgcctgcctgctgatgtgggctctaggccagcttgttgtcacgtacgtggtgtgaaataaagcccaagcactgggtgcccgtttcctgtgtttcgaattataccaattcaaaacagaactatttaaaaatattggccaggcacggtggctcacacctgtaatcccagcactttgggaggccgaggcgggtggatcacttgagatcaggagttcaagatcagtctggacaacatggcaaaaccctgtctctacaaaaaattagctgggtgtggtggcacgcacctgtaatcccagctgctctggaggctgaggcatgcgacgcttgaacccaggaggcggaggttgcagtgatccaagatcgcaccactgcactccagcctggaagaccaaacgagactctgtatcaaaaaataataataattaataaagttttactggaaaaaagaagtctgctgacgggaatgatgtggaagctgactgccaagcgatcggtgtgctggccgtggagtcagcaccaccctcactgtgagtcgtcagctggtgggtcctcacaggctgcgtcctgaatgcagtgcggtgtgaggacatgaaagcaaatgcaattttattgcatgccaaaaagtttaacttgattcttggtgttaactatgttagtagattcttcaatgctataagcaaattaacaagaaacagcagcactattttcctcttttcttaaacacgaaggttaaatggccaggcatggtgactcatacctgtaatcccaacaatttgggaggccaaggcaagcaaatcacttgagctcaggagttcgaaccagtttgggcaacatggcgaaaccctgcctctacaaaacatgcaaaaattagctgggcatggtagcatgcgcctgtagtcccagctactcgggaggctgagcttcgaggattgattgagccagtgaggtccaggctgcactaagccaagatcctaccactaggcaacagagccagaccctgtctcaaataaaaatttaaaaaaataataaaaaaggccgggcgcactggctcacgcctgtaatctcagcactttgggtggccaaggtgggcggatcacctgaggtcagttcaagaccagcctggccaaacatggtgaaaccctgtctacaaaaattagccaggcatgatggagggtgcctttagtcccagctctttgggaagctgaggcgggagaatagcatgaaccagggaggtggagggtgcctgtaatcccagctccttgggaggctaaggcaggagaatagcatgaacccggtaggtggaggttgcagtgagccgagatcgcgccactgcactccagcctgggcgacagagcaatactcccgtctcaaaaaaaaaaaaaaattaaatgattgtgatatgtgttacttttggtcacaaataaattgtaattaagattattctggccaggtgcggtggctcacgcctataatcccagcactttgggaggccgaggtgggcagatcatgaggtcaggagatcgagaccatcctgcccaacatggtgaaaccccgtttctactaaaaatgcaaaaattagctgggtgtggtggcgtgtgcctgtaatgccagctactcgggaggctgaggcacgagaatcacttgaacccagcaggcagaggttgcagtgagccaagattgcgccactgcactccagcctgacgacaaagcgagactccgtctc

SEQ ID NO: 458823 - DNA, 2663 bp, Homo sapiens
cgcaatgctgccgtgcgccgcgggagccagggggcgtggggccatggtggtcttgcgggcggggaagaagacctttctccccgctctctgccgcgccttcgcctgccgcggctgtcaactcgctccggagcgcggcgccgagcgcagggatacggcgcccagcgggccgcctcaggcctttgtccaggtgctctcgcgtcctatcccgaacagtcccgcagccccgaggctcccgcatcaacgccctcagtcggatgggactgagggtgccgccgccaccacgccggggactgttgacagccagaacctttaagcgtaacagagtcacctggtctcaagattctgccctccaagaaagtcttgccatgattggataggacccccagataaatattcaaaccttcgacctgttcacttttacatacctgaaaatgaatctccattggaacaaaagcttagaaaattaagacaagaaacacaagaatggaatcaacagttctgggcaaaccagaatttgacttttagtaaggtcagaaagcaacattgaatgcagaagaaatggcggacttctacaaggaatttttaagtaaaaattttcagaagcacatgtattataacaggttggatacggtggctcgcacctggaatcccatgactttgggaggccaagagattggtacaagcgcaattttgccatcaccttcttcatgggaaaagtggccctggaaaggatttggaacaagcttaaacagaaacaaaagaagaggagcaactaggagtccactctgacccagccagagtccaggtttccacaggaagcagatggagctcctttcacaggggctctgagaaaaactggagctgatctcaagaagccccacatcttcctaaggggccccatggcctgtttgggggcagggtaggtcctggggcactgtgggccgcctgcctgctgatgtgggctctaggccagcttgttgtcacgtacgtggtgtgaaataaagcccaagcactgggtgcccgtttcctgtgtttcgaattataccaattcaaaacagaactatttaaaaatattggccaggcacggtggctcacacctgtaatcccagcactttgggaggccgaggcgggtggatcacttgagatcaggagttcaagatcagtctggacaacatggcaaaaccctgtctctacaaaaaattagctgggtgtggtggcacgcacctgtaatcccagctgctctggaggctgaggcatgcgacgcttgaacccaggaggcggaggttgcagtgatccaagatcgcaccactgcactccagcctggaagaccaaacgagactctgtatcaaaaaataataataattaataaagttttactggaaaaaagaagtctgctgacgggaatgatgtggaagctgactgccaagcgatcggtgtgctggccgtggagtcagcaccaccctcactgtgagtcgtcagctggtgggtcctcacaggctgcgtcctgaatgcagtgcggtgtgaggacatgaaagcaaatgcaattttattgcatgccaaaaagtttaacttgattcttggtgttaactatgttagtagattcttcaatgctataagcaaattaacaagaaacagcagcactattttcctcttttcttaaacacgaaggttaaatggccaggcatggtgactcatacctgtaatcccaacaatttgggaggccaaggcaagcaaatcacttgagctcaggagttcgaaccagtttgggcaacatggcgaaaccctgcctctacaaaacatgcaaaaattagctgggcatggtagcatgcgcctgtagtcccagctactcgggaggctgagcttcgaggattgattgagccagtgaggtccaggctgcactaagccaagatcctaccactaggcaacagagccagaccctgtctcaaataaaaatttaaaaaaataataaaaaaggccgggcgcactggctcacgcctgtaatctcagcactttgggtggccaaggtgggcggatcacctgaggtcagttcaagaccagcctggccaaacatggtgaaaccctgtctacaaaaattagccaggcatgatggagggtgcctttagtcccagctctttgggaagctgaggcgggagaatagcatgaaccagggaggtggagggtgcctgtaatcccagctccttgggaggctaaggcaggagaatagcatgaacccggtaggtggaggttgcagtgagccgagatcgcgccactgcactccagcctgggcgacagagcaatactcccgtctcaaaaaaaaaaaaaaattaaatgattgtgatatgtgttacttttggtcacaaataaattgtaattaagattattctggccaggtgcggtggctcacgcctataatcccagcactttgggaggccgaggtgggcagatcatgaggtcaggagatcgagaccatcctgcccaacatggtgaaaccccgtttctactaaaaatgcaaaaattagctgggtgtggtggcgtgtgcctgtaatgccagctactcgggaggctgaggcacgagaatcacttgaacccagcaggcagaggttgcagtgagccaagattgcgccactgcactccagcctgacgacaaagcgagactccgtctc

SEQ ID NO: 458824 - DNA, 694 bp, Homo sapiens
tccaagttctcttgcacacccagttcccaggcatggctctccaatctcagctccctcctttctctccggattttaggtggttatgatggatgaccaacctctgacctttgactttcgtactgaggtctcagcctttgcagcttctccctccaaagcagcttttcttctgattcctgatctcagttcagtgctcaaaatagcctctccttattttctcctggtgtcagtgttaggcctgaataacatctcatgctgttcgttaaacagatgtctgctgccaaaaagttgttctgatagaaaatccaaaatcatcgaccccaaaagccaagtctgtcattgggctaaagtgccattcctactaatcctttgcctcacctgattcatttggaataaagggccaggagcttgagtcacccccaaaccaggacctctgttgctatttgctggctgctggagaggtggggtcttgcgggccctggagaggtggggtcttgtggggcagagctggagcagatgctgcatccagcagtaagcatgagaatgagcactcacagttttgggtcctgtgctggacactgtgcaagtcctgtgcatatatcacctgttgcatttcccacagtgacccaatgaagtagatactgttatctttaccattttatagatgagcaacctgaggcttcaccagaattgcaca

SEQ ID NO: 458825 - DNA, 285 bp, Homo sapiens
ctgaactcatttattagctctaatagttttttgtttatcctttctccttaagtcttaatgtttaagctgaaattacctttcaggtcagaaagcaacattgaatgcagaagaaatggcggacttctacaaggaatttttaagtaaaaattttcagaagcacatgtattataacaggtaggtgtttactcttttcctgaaaatttgaatagcacatccagattaggtaggagtgttttcttacctgaatttaacaacattcatgtttatatcagaggtagaagttgc

SEQ ID NO: 458826 - DNA, 2448 bp, Homo sapiens
cgcaatgctgccgtgcgccgcgggagccagggggcgtggggccatggtggtcttgcgggcggggaagaagacctttctccccgctctctgccgcgccttcgcctgccgcggctgtcaactcgctccggagcgcggcgccgagcgcagggatacggcgcccagcggggtctcaagattctgccctccaagaaagtcttgccatgattggataggacccccagataaatattcaaaccttcgacctgttcacttttacatacctgaaaatgaatctccattggaacaaaagcttagaaaattaagacaagaaacacaagaatggaatcaacagttctgggcaaaccagaatttgacttttagtaaggtcagaaagcaacattgaatgcagaagaaatggcggacttctacaaggaatttttaagtaaaaattttcagaagcacatgtattataacagagattggtacaagcgcaattttgccatcaccttcttcatgggaaaagtggccctggaaaggatttggaacaagcttaaacagaaacaaaagaagaggagcaactaggagtccactctgacccagccagagtccaggtttccacaggaagcagatggagctcctttcacaggggctctgagaaaaactggagctgatctcaagaagccccacatcttcctaaggggccccatggcctgtttgggggcagggtaggtcctggggcactgtgggccgcctgcctgctgatgtgggctctaggccagcttgttgtcacgtacgtggtgtgaaataaagcccaagcactgggtgcccgtttcctgtgtttcgaattataccaattcaaaacagaactatttaaaaatattggccaggcacggtggctcacacctgtaatcccagcactttgggaggccgaggcgggtggatcacttgagatcaggagttcaagatcagtctggacaacatggcaaaaccctgtctctacaaaaaattagctgggtgtggtggcacgcacctgtaatcccagctgctctggaggctgaggcatgcgacgcttgaacccaggaggcggaggttgcagtgatccaagatcgcaccactgcactccagcctggaagaccaaacgagactctgtatcaaaaaataataataattaataaagttttactggaaaaaagaagtctgctgacgggaatgatgtggaagctgactgccaagcgatcggtgtgctggccgtggagtcagcaccaccctcactgtgagtcgtcagctggtgggtcctcacaggctgcgtcctgaatgcagtgcggtgtgaggacatgaaagcaaatgcaattttattgcatgccaaaaagtttaacttgattcttggtgttaactatgttagtagattcttcaatgctataagcaaattaacaagaaacagcagcactattttcctcttttcttaaacacgaaggttaaatggccaggcatggtgactcatacctgtaatcccaacaatttgggaggccaaggcaagcaaatcacttgagctcaggagttcgaaccagtttgggcaacatggcgaaaccctgcctctacaaaacatgcaaaaattagctgggcatggtagcatgcgcctgtagtcccagctactcgggaggctgagcttcgaggattgattgagccagtgaggtccaggctgcactaagccaagatcctaccactaggcaacagagccagaccctgtctcaaataaaaatttaaaaaaataataaaaaaggccgggcgcactggctcacgcctgtaatctcagcactttgggtggccaaggtgggcggatcacctgaggtcagttcaagaccagcctggccaaacatggtgaaaccctgtctacaaaaattagccaggcatgatggagggtgcctttagtcccagctctttgggaagctgaggcgggagaatagcatgaaccagggaggtggagggtgcctgtaatcccagctccttgggaggctaaggcaggagaatagcatgaacccggtaggtggaggttgcagtgagccgagatcgcgccactgcactccagcctgggcgacagagcaatactcccgtctcaaaaaaaaaaaaaaattaaatgattgtgatatgtgttacttttggtcacaaataaattgtaattaagattattctggccaggtgcggtggctcacgcctataatcccagcactttgggaggccgaggtgggcagatcatgaggtcaggagatcgagaccatcctgcccaacatggtgaaaccccgtttctactaaaaatgcaaaaattagctgggtgtggtggcgtgtgcctgtaatgccagctactcgggaggctgaggcacgagaatcacttgaacccagcaggcagaggttgcagtgagccaagattgcgccactgcactccagcctgacgacaaagcgagactccgtctc

SEQ ID NO: 458827 - DNA, 2677 bp, Homo sapiens
cgcaatgctgccgtgcgccgcgggagccagggggcgtggggccatggtggtcttgcgggcggggaagaagacctttctccccgctctctgccgcgccttcgcctgccgcggctgtcaactcgctccggagcgcggcgccgagcgcagggatacggcgcccagcgggccgcctcaggcctttgtccaggtgctctcgcgtcctatcccgaacagtcccgcagccccgaggctcccgcatcaacgccctcagtcggatgggactgagggtgccgccgccaccacgccggggactgttgacagccagaacctttaagcgtaacagagtcacctggtctcaagattctgccctccaagaaagtcttgccatgattggataggacccccagataaatattcaaaccttcgacctgttcacttttacatacctgaaaatgaatctccattggaacaaaagcttagaaaattaagacaagaaacacaagaatggaatcaacagttctgggcaaaccagaatttgacttttagtaaggaaaaagaagaatttattcactcaagactaaaaactaaaggcctgggcctgagaactgaatcaggtcagaaagcaacattgaatgcagaagaaatggcggacttctacaaggaatttttaagtaaaaattttcagaagcacatgtattataacagagattggtacaagcgcaattttgccatcaccttcttcatgggaaaagtggccctggaaaggatttggaacaagcttaaacagaaacaaaagaagaggagcaactaggagtccactctgacccagccagagtccaggtttccacaggaagcagatggagctcctttcacaggggctctgagaaaaactggagctgatctcaagaagccccacatcttcctaaggggccccatggcctgtttgggggcagggtaggtcctggggcactgtgggccgcctgcctgctgatgtgggctctaggccagcttgttgtcacgtacgtggtgtgaaataaagcccaagcactgggtgcccgtttcctgtgtttcgaattataccaattcaaaacagaactatttaaaaatattggccaggcacggtggctcacacctgtaatcccagcactttgggaggccgaggcgggtggatcacttgagatcaggagttcaagatcagtctggacaacatggcaaaaccctgtctctacaaaaaattagctgggtgtggtggcacgcacctgtaatcccagctgctctggaggctgaggcatgcgacgcttgaacccaggaggcggaggttgcagtgatccaagatcgcaccactgcactccagcctggaagaccaaacgagactctgtatcaaaaaataataataattaataaagttttactggaaaaaagaagtctgctgacgggaatgatgtggaagctgactgccaagcgatcggtgtgctggccgtggagtcagcaccaccctcactgtgagtcgtcagctggtgggtcctcacaggctgcgtcctgaatgcagtgcggtgtgaggacatgaaagcaaatgcaattttattgcatgccaaaaagtttaacttgattcttggtgttaactatgttagtagattcttcaatgctataagcaaattaacaagaaacagcagcactattttcctcttttcttaaacacgaaggttaaatggccaggcatggtgactcatacctgtaatcccaacaatttgggaggccaaggcaagcaaatcacttgagctcaggagttcgaaccagtttgggcaacatggcgaaaccctgcctctacaaaacatgcaaaaattagctgggcatggtagcatgcgcctgtagtcccagctactcgggaggctgagcttcgaggattgattgagccagtgaggtccaggctgcactaagccaagatcctaccactaggcaacagagccagaccctgtctcaaataaaaatttaaaaaaataataaaaaaggccgggcgcactggctcacgcctgtaatctcagcactttgggtggccaaggtgggcggatcacctgaggtcagttcaagaccagcctggccaaacatggtgaaaccctgtctacaaaaattagccaggcatgatggagggtgcctttagtcccagctctttgggaagctgaggcgggagaatagcatgaaccagggaggtggagggtgcctgtaatcccagctccttgggaggctaaggcaggagaatagcatgaacccggtaggtggaggttgcagtgagccgagatcgcgccactgcactccagcctgggcgacagagcaatactcccgtctcaaaaaaaaaaaaaaattaaatgattgtgatatgtgttacttttggtcacaaataaattgtaattaagattattctggccaggtgcggtggctcacgcctataatcccagcactttgggaggccgaggtgggcagatcatgaggtcaggagatcgagaccatcctgcccaacatggtgaaaccccgtttctactaaaaatgcaaaaattagctgggtgtggtggcgtgtgcctgtaatgccagctactcgggaggctgaggcacgagaatcacttgaacccagcaggcagaggttgcagtgagccaagattgcgccactgcactccagcctgacgacaaagcgagactccgtctc

SEQ ID NO: 458828 - DNA, 2491 bp, Homo sapiens
ggaagacaaacccgggcctcggggccactccctgttctgcacagccgcctcaggcctttgtccaggtgctctcgcgtcctatcccgaacagtcccgcagccccgaggctcccgcatcaacgccctcagtcggatgggactgagggtgccgccgccaccacgccggggactgttgacagccagaacctttaagcgtaacagagtcacctggtctcaagattctgccctccaagaaagtcttgccatgattggataggacccccagataaatattcaaaccttcgacctgttcacttttacatacctgaaaatgaatctccattggaacaaaagcttagaaaattaagacaagaaacacaagaatggaatcaacagttctgggcaaaccagaatttgacttttagtaaggtcagaaagcaacattgaatgcagaagaaatggcggacttctacaaggaatttttaagtaaaaattttcagaagcacatgtattataacagagattggtacaagcgcaattttgccatcaccttcttcatgggaaaagtggccctggaaaggatttggaacaagcttaaacagaaacaaaagaagaggagcaactaggagtccactctgacccagccagagtccaggtttccacaggaagcagatggagctcctttcacaggggctctgagaaaaactggagctgatctcaagaagccccacatcttcctaaggggccccatggcctgtttgggggcagggtaggtcctggggcactgtgggccgcctgcctgctgatgtgggctctaggccagcttgttgtcacgtacgtggtgtgaaataaagcccaagcactgggtgcccgtttcctgtgtttcgaattataccaattcaaaacagaactatttaaaaatattggccaggcacggtggctcacacctgtaatcccagcactttgggaggccgaggcgggtggatcacttgagatcaggagttcaagatcagtctggacaacatggcaaaaccctgtctctacaaaaaattagctgggtgtggtggcacgcacctgtaatcccagctgctctggaggctgaggcatgcgacgcttgaacccaggaggcggaggttgcagtgatccaagatcgcaccactgcactccagcctggaagaccaaacgagactctgtatcaaaaaataataataattaataaagttttactggaaaaaagaagtctgctgacgggaatgatgtggaagctgactgccaagcgatcggtgtgctggccgtggagtcagcaccaccctcactgtgagtcgtcagctggtgggtcctcacaggctgcgtcctgaatgcagtgcggtgtgaggacatgaaagcaaatgcaattttattgcatgccaaaaagtttaacttgattcttggtgttaactatgttagtagattcttcaatgctataagcaaattaacaagaaacagcagcactattttcctcttttcttaaacacgaaggttaaatggccaggcatggtgactcatacctgtaatcccaacaatttgggaggccaaggcaagcaaatcacttgagctcaggagttcgaaccagtttgggcaacatggcgaaaccctgcctctacaaaacatgcaaaaattagctgggcatggtagcatgcgcctgtagtcccagctactcgggaggctgagcttcgaggattgattgagccagtgaggtccaggctgcactaagccaagatcctaccactaggcaacagagccagaccctgtctcaaataaaaatttaaaaaaataataaaaaaggccgggcgcactggctcacgcctgtaatctcagcactttgggtggccaaggtgggcggatcacctgaggtcagttcaagaccagcctggccaaacatggtgaaaccctgtctacaaaaattagccaggcatgatggagggtgcctttagtcccagctctttgggaagctgaggcgggagaatagcatgaaccagggaggtggagggtgcctgtaatcccagctccttgggaggctaaggcaggagaatagcatgaacccggtaggtggaggttgcagtgagccgagatcgcgccactgcactccagcctgggcgacagagcaatactcccgtctcaaaaaaaaaaaaaaattaaatgattgtgatatgtgttacttttggtcacaaataaattgtaattaagattattctggccaggtgcggtggctcacgcctataatcccagcactttgggaggccgaggtgggcagatcatgaggtcaggagatcgagaccatcctgcccaacatggtgaaaccccgtttctactaaaaatgcaaaaattagctgggtgtggtggcgtgtgcctgtaatgccagctactcgggaggctgaggcacgagaatcacttgaacccagcaggcagaggttgcagtgagccaagattgcgccactgcactccagcctgacgacaaagcgagactccgtctc

SEQ ID NO: 458829 - DNA, 2683 bp, Homo sapiens
cgcaatgctgccgtgcgccgcgggagccagggggcgtggggccatggtggtcttgcgggcggggaagaagacctttctccccgctctctgccgcgccttcgcctgccgcggctgtcaactcgctccggagcgcggcgccgagcgcagggatacggcgcccagcggggtctcaagattctgccctccaagaaagtcttgccatgattggataggacccccagataaatattcaaaccttcgacctgttcacttttacatacctgaaaatgaatctccattggaacaaaagcttagaaaattaagacaagaaacacaagaatggaatcaacagttctgggcaaaccagaatttgacttttagtaaggaaaaagaagaatttattcactcaagactaaaaactaaaggcctgggcctgagaactgaatcagatggagtctcactctgtcacccaggctggagtgcagtggcacgatctcggctcactgcaaactctgcctcctggttcaagcgattctcctgcctcagccttctgagtagctgggactacaggtcagaaagcaacattgaatgcagaagaaatggcggacttctacaaggaatttttaagtaaaaattttcagaagcacatgtattataacaggttggatacggtggctcgcacctggaatcccatgactttgggaggccaagagattggtacaagcgcaattttgccatcaccttcttcatgggaaaagtggccctggaaaggatttggaacaagcttaaacagaaacaaaagaagaggagcaactaggagtccactctgacccagccagagtccaggtttccacaggaagcagatggagctcctttcacaggggctctgagaaaaactggagctgatctcaagaagccccacatcttcctaaggggccccatggcctgtttgggggcagggtaggtcctggggcactgtgggccgcctgcctgctgatgtgggctctaggccagcttgttgtcacgtacgtggtgtgaaataaagcccaagcactgggtgcccgtttcctgtgtttcgaattataccaattcaaaacagaactatttaaaaatattggccaggcacggtggctcacacctgtaatcccagcactttgggaggccgaggcgggtggatcacttgagatcaggagttcaagatcagtctggacaacatggcaaaaccctgtctctacaaaaaattagctgggtgtggtggcacgcacctgtaatcccagctgctctggaggctgaggcatgcgacgcttgaacccaggaggcggaggttgcagtgatccaagatcgcaccactgcactccagcctggaagaccaaacgagactctgtatcaaaaaataataataattaataaagttttactggaaaaaagaagtctgctgacgggaatgatgtggaagctgactgccaagcgatcggtgtgctggccgtggagtcagcaccaccctcactgtgagtcgtcagctggtgggtcctcacaggctgcgtcctgaatgcagtgcggtgtgaggacatgaaagcaaatgcaattttattgcatgccaaaaagtttaacttgattcttggtgttaactatgttagtagattcttcaatgctataagcaaattaacaagaaacagcagcactattttcctcttttcttaaacacgaaggttaaatggccaggcatggtgactcatacctgtaatcccaacaatttgggaggccaaggcaagcaaatcacttgagctcaggagttcgaaccagtttgggcaacatggcgaaaccctgcctctacaaaacatgcaaaaattagctgggcatggtagcatgcgcctgtagtcccagctactcgggaggctgagcttcgaggattgattgagccagtgaggtccaggctgcactaagccaagatcctaccactaggcaacagagccagaccctgtctcaaataaaaatttaaaaaaataataaaaaaggccgggcgcactggctcacgcctgtaatctcagcactttgggtggccaaggtgggcggatcacctgaggtcagttcaagaccagcctggccaaacatggtgaaaccctgtctacaaaaattagccaggcatgatggagggtgcctttagtcccagctctttgggaagctgaggcgggagaatagcatgaaccagggaggtggagggtgcctgtaatcccagctccttgggaggctaaggcaggagaatagcatgaacccggtaggtggaggttgcagtgagccgagatcgcgccactgcactccagcctgggcgacagagcaatactcccgtctcaaaaaaaaaaaaaaattaaatgattgtgatatgtgttacttttggtcacaaataaattgtaattaagattattctggccaggtgcggtggctcacgcctataatcccagcactttgggaggccgaggtgggcagatcatgaggtcaggagatcgagaccatcctgcccaacatggtgaaaccccgtttctactaaaaatgcaaaaattagctgggtgtggtggcgtgtgcctgtaatgccagctactcgggaggctgaggcacgagaatcacttgaacccagcaggcagaggttgcagtgagccaagattgcgccactgcactccagcctgacgacaaagcgagactccgtctc

SEQ ID NO: 458830 - DNA, 774 bp, Homo sapiens
cgcaatgctgccgtgcgccgcgggagccagggggcgtggggccatggtggtcttgcgggcggggaagaagacctttctccccgctctctgccgcgccttcgcctgccgcggctgtcaactcgctccggagcgcggcgccgagcgcagggatacggcgcccagcggggtctcaagattctgccctccaagaaagtcttgccatgattggataggacccccagataaatattcaaaccttcgacctgttcacttttacatacctgaaaatgaatctccattggaacaaaagcttagaaaattaagacaagaaacacaagaatggaatcaacagttctgggcaaaccagaatttgacttttagtaaggaaaaagaagaatttattcactcaagactaaaaactaaaggcctgggcctgagaactgaatcaggtggttatgatggatgaccaacctctgacctttgactttcgtactgaggtctcagcctttgcagcttctccctccaaagcagcttttcttctgattcctgatctcagttcagtgctcaaaatagcctctccttattttctcctggtgtcagtgttaggcctgaataacatctcatgctgttcgttaaacagatgtctgctgccaaaaagttgttctgatagaaaatccaaaatcatcgaccccaaaagccaagtctgtcattgggctaaagtgccattcctactaatcctttgcctcacctgattcatttggaataaagggccaggagcttgagtcacccccaaac

SEQ ID NO: 458831 - DNA, 1223 bp, Homo sapiens
ccagaacacgaaggggggaaaaaacgcttctaatgatccctcagaacttgcatattttcatacgcttttctggggggaggcactaattggggcgcttttcctttgcgaacttacttatcttaaagtcggagcggaaaataaagcacgcacgcaacccaatttccggagaaccgagattgcgacgaacaaccaggaagcggctgggttgagagctgtccccggttctccgttctgctctcgggggcaccttccggggttcctaagccgcggggcccctcgctgcccctcgaggccctttccctgacctaggctttggcctgggctactcgttccggagccgccatgtcgtccgacttcgaaggttacgagcaggacttcgcggtgctcactgcagagatcaccagcaagattgcgagggtcccacgactcccgcctgatgaaaagaaacagatggttgcaaatgtggagaaacagcttgaagaagcgaaagaactgcttgaacagatggatttggaagtccgagagataccaccccaaagtcgagggatgtacagcaacagaatgagaagctacaaacaagaaatgggaaaactcgaaacagattttaaaaggtcacggatcgcctacagtgacgaagtacggaatgagctcctgggggatgatgggaattcctcagagaaccagagggcacatctgctcgataacacagagaggctggaaaggtcatctcggagactagaggctggataccaaatagcagtggaaaccgagcaaattggtcaggagatgttggaaaaccttagtcatgacagagaaaagatacagcgagcacgtgaaagacttcgggaaacagatgctaatttgggaaaaagctccaggattctgacagggatgttgcgaagaatcatccagaaccgcatcctgctcgtcatcctagggatcatcgtggtcatcaccatcctgatggcgatcactttttctgtcagaagacactgatgtatctgctctcccttgataaacagcaacaacagcttgttctgagtaattaagacaaaatggtcacatgaatcattctgttgcgctgacaggccccaggtgaccctctctctccctcaccgccgttgggctgaagtgcaaagagtgtaaaaatattttctattcctgtttgcatgtgggttggtttccttttcgaggtttgtcttcacccagattcgttttttaga

SEQ ID NO: 458832 - DNA, 1133 bp, Homo sapiens
ccagaacacgaaggggggaaaaaacgcttctaatgatccctcagaacttgcatattttcatacgcttttctggggggaggcactaattggggcgcttttcctttgcgaacttacttatcttaaagtcggagcggaaaataaagcacgcacgcaacccaatttccggagaaccgagattgcgacgaacaaccaggaagcggctgggttgagagctgtccccggttctccgttctgctctcgggggcaccttccggggttcctaagccgcggggcccctcgctgcccctcgaggccctttccctgacctaggctttggcctgggctactcgttccggagccgccatgtcgtccgacttcgaaggttacgagcaggacttcgcggtgctcactgcagagatcaccagcaagattgcgagggtcccacgactcccgcctgatgaaaagaaacagatggttgcaaatgtggagaaacagcttgaagaagcgaaagaactgcttgaacagatggatttggaagtccgagagataccaccccaaagtcgagggatgtacagcaacagaatgagaagctacaaacaagaaatgggaaaactcgaaacagattttaaaaggtcacggatcgcctacagtgacgaagtacggaatgagctcctgggggatgatgggaattcctcagagaaccagagggcacatctgctcgataacacagagaggctggaaaggtcatctcggagactagaggctggataccaaatagcagtggaaaccgagcaaattggtcaggagatgttggaaaaccttagtcatgacagagaaaagatacagcgagcacgtgaaagacttcgggaaacagatgctaatttgggaaaaagctccaggattctgacagggatgttgcgaagatgctgtatacaacaagggatctatattcagataagatttgactatcgcaaggacagaaaaccaaacaccacatgttctcactcataggtgggaattgaacaatgagaacacttggacacagggtgagggacatcacacaccgggacctgtcgttgggtggggggatgggggagggataacattaggagaaatacctaatgtaaatgacgagttaatgggtgcagcacacc

SEQ ID NO: 458833 - DNA, 1069 bp, Homo sapiens
ccagaacacgaaggggggaaaaaacgcttctaatgatccctcagaacttgcatattttcatacgcttttctggggggaggcactaattggggcgcttttcctttgcgaacttacttatcttaaagtcggagcggaaaataaagcacgcacgcaacccaatttccggagaaccgagattgcgacgaacaaccaggaagcggctgggttgagagctgtccccggttctccgttctgctctcgggggcaccttccggggttcctaagccgcggggcccctcgctgcccctcgaggccctttccctgacctaggctttggcctgggctactcgttccggagccgccatgtcgtccgacttcgaaggttacgagcaggacttcgcggtgctcactgcagagatcaccagcaagattgcgagggtcccacgactcccgcctgatgaaaagaaacagatggttgcaaatgtggagaaacagcttgaagaagcgaaagaactgcttgaacagatggatttggaagtccgagagataccaccccaaagtcgagggatgtacagcaacagaatgagaagctacaaacaagaaatgggaaaactcgaaacagattttaaaaggtcacggatcgcctacagtgacgaagtacggaatgagctcctgggggatgatgggaattcctcagagaaccagagggcacatctgctcgataacacagagaggctggaaaggtcatctcggagactagaggctggataccaaatagcagtggaaaccgagcaaattggtcaggagatgttggaaaaccttagtcatgacagagaaaagatacagcgagcacgtgaaagacttcgggaaacagatgctaatttgggaaaaagctccaggattctgacagggatgttgcgaagaggggttgttctgtgaaaaaacaatgtaacctgtctctggccccaaaggcttgaaccagaaccagccagtggaaattactcaaacacgtattgtgccttcaatgagaagccttctcactgaaagagctgccctggacggaaaatgagtagtgagatgatgctggtgg

SEQ ID NO: 458834 - DNA, 1218 bp, Homo sapiens
ccagaacacgaaggggggaaaaaacgcttctaatgatccctcagaacttgcatattttcatacgcttttctggggggaggcactaattggggcgcttttcctttgcgaacttacttatcttaaagtcggagcggaaaataaagcacgcacgcaacccaatttccggagaaccgagattgcgacgaacaaccaggaagcggctgggttgagagctgtccccggttctccgttctgctctcgggggcaccttccggggttcctaagccgcggggcccctcgctgcccctcgaggccctttccctgacctaggctttggcctgggctactcgttccggagccgccatgtcgtccgacttcgaaggttacgagcaggacttcgcggtgctcactgcagagatcaccagcaagattgcgagggtcccacgactcccgcctgggatatttgcttgaagccaggatctctgaacttataccccactcatctcctgaagtccccagttagttctggaggagatggatgatgtcttaaagaggtttatgagtccaagtaagggaacaagaggagagaaccaaggtagtatataccaccaagctctgctgcctcagagatttttgtgtcgaaagtggctgatggcctcatctcttcatgatacatcacctcgcctcttctcttcagttctgcttttctccactgccggagatcgtcttgatttttgttattgttggagactacttcctttgaattgagtcccagagcctcagagtatcaggacttgtggttccagttagagttttactcatttttaattgtaattgttttagcagtagaaacatttctttgggttattagtttttgtattgggaagctgttttacaaggtaacaaaatcatccttggatgcaaagttgtaaatttccaagaaaacagatcgtgttacaatttttttcttgcctttatattttaatgtgacaattcttaacacatagaaggaaactttttgaattcagtaccttaaaaataaaactgggcagagcccggtggctcatgcctataatcccaaaactttgggaggccgaggcagacggatcacctgaggtcgggagtttgagaccagcctggccaacatggagaaaccctgtctctactaaaaatacaaaactagctgggcgtggtggcacatgcctgtaactccagctgctcaggaggctgaggcaggag

SEQ ID NO: 458835 - DNA, 651 bp, Homo sapiens
ccagaacacgaaggggggaaaaaacgcttctaatgatccctcagaacttgcatattttcatacgcttttctggggggaggcactaattggggcgcttttcctttgcgaacttacttatcttaaagtcggagcggaaaataaagcacgcacgcaacccaatttccggagaaccgagattgcgacgaacaaccaggaagcggctgggttgagagctgtccccggttctccgttctgctctcgggggcaccttccggggttcctaagccgcggggcccctcgctgcccctcgaggccctttccctgacctaggctttggcctgggctactcgttccggagccgccatgtcgtccgacttcgaaggttacgagcaggacttcgcggtgctcactgcagagatcaccagcaagattgcgagggtcccacgactcccgcctgggatatttgcttgaagccaggatctctgaacttataccccactcatctcctgaagtccccagttagttctggaggagatggatgatgtcttaaagaggtttatgagtccaagtaagggaacaagaggagaggcgaggtgatgtatcatgaagagatgaggccatcagccactttgcacaaaatctctgagcagcagagcttggtgtaatacggta

SEQ ID NO: 458836 - DNA, 517 bp, Homo sapiens
  misc_feature (61)..(62): n is a, c, g, or t
gcggtaccgtgtggtctgtagctgtgcttaatcgaaggaggagccaaaaaaaaatagtcanngagcaaattggtcaggagatgttggaaaaccttagtcatgacagagaaaagatacagcgagcacgtgaaagacttcgggaaacagatgctaatttgggaaaaagctccaggattctgacagggatgttgcgaagaatcatccagaaccgcatcctgctcgtcatcctagggatcatcgtggtcatcaccatcctgatggcgatcactttttctgtcagaagacactgatgtatctgctctcccttgataaacagcaacaacagcttgttctgagtaattaagacaaaatggtcacatgaatcattctgttgcgctgacaggccccaggtgaccctctctctccctcaccgccgttgggctgaagtgcaaagagtgtaaaaatattttctattcctgtttgcatgtgggttggtttccttttcgaggtttgtcttcacccagattcgttttttaga

SEQ ID NO: 458837 - DNA, 1244 bp, Homo sapiens
ccagaacacgaaggggggaaaaaacgcttctaatgatccctcagaacttgcatattttcatacgcttttctggggggaggcactaattggggcgcttttcctttgcgaacttacttatcttaaagtcggagcggaaaataaagcacgcacgcaacccaatttccggagaaccgagattgcgacgaacaaccaggaagcggctgggttgagagctgtccccggttctccgttctgctctcgggggcaccttccggggttcctaagccgcggggcccctcgctgcccctcgaggccctttccctgacctaggctttggcctgggctactcgttccggagccgccatgtcgtccgacttcgaaggttacgagcaggacttcgcggtgctcactgcagagatcaccagcaagattgcgagggtcccacgactcccgcctgatgaaaagaaacagatggttgcaaatgtggagaaacagcttgaagaagcgaaagaactgcttgaacagatggatttggaagtccgagagataccaccccaaagtcgagggatgtacagcaacagaatgagaagctacaaacaagaaatgggaaaactcgaaacagattttaaaaggtcacggatcgcctacagtgacgaagtacggaatgagctcctgggggatgatgggaattcctcagagaaccagttgataaaattacgtgaagagagggcacatctgctcgataacacagagaggctggaaaggtcatctcggagactagaggctggataccaaatagcagtggaaaccgagcaaattggtcaggagatgttggaaaaccttagtcatgacagagaaaagatacagcgagcacgtgaaagacttcgggaaacagatgctaatttgggaaaaagctccaggattctgacagggatgttgcgaagaatcatccagaaccgcatcctgctcgtcatcctagggatcatcgtggtcatcaccatcctgatggcgatcactttttctgtcagaagacactgatgtatctgctctcccttgataaacagcaacaacagcttgttctgagtaattaagacaaaatggtcacatgaatcattctgttgcgctgacaggccccaggtgaccctctctctccctcaccgccgttgggctgaagtgcaaagagtgtaaaaatattttctattcctgtttgcatgtgggttggtttccttttcgaggtttgtcttcacccagattcgttttttaga

SEQ ID NO: 458838 - DNA, 1031 bp, Homo sapiens
ccagaacacgaaggggggaaaaaacgcttctaatgatccctcagaacttgcatattttcatacgcttttctggggggaggcactaattggggcgcttttcctttgcgaacttacttatcttaaagtcggagcggaaaataaagcacgcacgcaacccaatttccggagaaccgagattgcgacgaacaaccaggaagcggctgggttgagagctgtccccggttctccgttctgctctcgggggcaccttccggggttcctaagccgcggggcccctcgctgcccctcgaggccctttccctgacctaggctttggcctgggctactcgttccggagccgccatgtcgtccgacttcgaaggttacgagcaggacttcgcggtgctcactgcagagatcaccagcaagattgcgagggtcccacgactcccgcctgatgaaaagaaacagatggttgcaaatgtggagaaacagcttgaagaagcgaaagaactgcttgaacagatggatttggaagtccgagagataccaccccaaagtcgagggatgtacagcaacagaatgagaagctacaaacaagaaatgggaaaactcgaaacagattttaaaaggtcacggatcgcctacagtgacgaagtacggaatgagctcctgggggatgatgggaattcctcagagaaccagagggcacatctgctcgataacacagagaggctggaaaggtcatctcggagactagaggctggataccaaatagcagtggaaaccgagcaaattggtcaggagatgttggaaaaccttagtcatgacagagaaaagatacagcgagcacgtgaaagacttcgggaaacagatgctaatttgggaaaaagctccaggattctgacagggatgttgcgaagtaagagcaaggtagggacatatctttctctctgtgtgtttttttaaaatactatgttttcattcaattgcaatggggcatattacatgcttttgagcttctgctcttagtaccctgtgcaggacccatt

SEQ ID NO: 458839 - DNA, 661 bp, Homo sapiens
gagtacagaatgagaagctacaacagagaactcgaacagattttaaaaggtcacggatcgcctacagtgacgaagtacggaatgagctcctgggggatgatgggaattcctcagagaaccagagggcacatctgctcgataacacagagaggctggaaaggtcatctcggagactagaggctggataccaaatagcagtggaaaccgagcaaattggtcaggagatgttggaaaaccttagtcatgacagagaaaagatacagcgagcacgtgaaagacttcgggaaacagatgctaatttgggaaaaagctccaggattctgacagggatgttgcgaagaatcatccagaaccgcatcctgctcgtcatcctagggatcatcgtggtcatcaccatcctgatggcgatcactttttctgtcagaagacactgatgtatctgctctcccttgataaacagcaacaacagcttgttctgagtaattaagacaaaatggtcacatgaatcattctgttgcgctgacaggccccaggtgaccctctctctccctcaccgccgttgggctgaagtgcaaagagtgtaaaaatattttctattcctgtttgcatgtgggttggtttccttttcgaggtttgtcttcacccagattcgttttttaga

SEQ ID NO: 458840 - DNA, 1229 bp, Homo sapiens
ccagaacacgaaggggggaaaaaacgcttctaatgatccctcagaacttgcatattttcatacgcttttctggggggaggcactaattggggcgcttttcctttgcgaacttacttatcttaaagtcggagcggaaaataaagcacgcacgcaacccaatttccggagaaccgagattgcgacgaacaaccaggaagcggctgggttgagagctgtccccggttctccgttctgctctcgggggcaccttccggggttcctaagccgcggggcccctcgctgcccctcgaggccctttccctgacctaggctttggcctgggctactcgttccggagccgccatgtcgtccgacttcgaaggttacgagcaggacttcgcggtgctcactgcagagatcaccagcaagattgcgagggtcccacgactcccgcctgatgaaaagaaacagatggttgcaaatgtggagaaacagcttgaagaagcgaaagaactgcttgaacagatggatttggaagtccgagagataccaccccaaagtcgagggatgtacagcaacagaatgagaagctacaaacaagaaatgggaaaactcgaaacagattttaaaaggtcacggatcgcctacagtgacgaagtacggaatgagctcctgggggatgatgggaattcctcagagaaccagagggcacatctgctcgataacacagagaggctggaaaggtcatctcggagactagaggctggataccaaatagcagtggaaaccgagcaaattggtcaggagatgttggaaaaccttagtcatgacagagaaaagatacagcgagcacgtgaaagacttcgggaaacagatgctaatttgggaaaaagctccaggattctgacagggatgttgcgaagactggcgtcagcaggaaagatcagctctgccatttgaaacacccaactgctaccttctctcagaaatcaaaagatggagtctcgctctgtcacccagactggagtgcagtggcgtgatctcagctcactgcaacctctgcctcatgggttcaagcgattctcgtgcctcagcctccccagtaccctggaagtgctcagtacatcatatgagccagagtgctggccaggaatgagaccacgctttgcctgttggtcaccgcatctccagggaactcagaggcatctccaggaaacacctgaatatgtgagctggttccttacaacagt

SEQ ID NO: 458841 - DNA, 796 bp, Homo sapiens
ccagaacacgaaggggggaaaaaacgcttctaatgatccctcagaacttgcatattttcatacgcttttctggggggaggcactaattggggcgcttttcctttgcgaacttacttatcttaaagtcggagcggaaaataaagcacgcacgcaacccaatttccggagaaccgagattgcgacgaacaaccaggaagcggctgggttgagagctgtccccggttctccgttctgctctcgggggcaccttccggggttcctaagccgcggggcccctcgctgcccctcgaggccctttccctgacctaggctttggcctgggctactcgttccggagccgccatgtcgtccgacttcgaaggttacgagcaggacttcgcggtgctcactgcagagatcaccagcaagattgcgagggtcccacgactcccgcctgatgaaaagaaacagatggttgcaaatgtggagaaacagcttgaagaagcgaaagaactgcttgaacagatggatttggaagtccgagagataccaccccaaagtcgagggatgtacagcaacagaatgagaagctacaaacaagaaatgggaaaactcgaaacagattttaaaaggtcacggatcgcctacagtgacgaagtacggaatgagctcctgggggatgatgggaattcctcagagaaccagagggcacatctgctcgataacacagagaggctggaaaggtcatctcggagactagaggctggataccaaatagcagtggaaaccggtaagaattctgagagtgagcaaattg

SEQ ID NO: 458842 - DNA, 4440 bp, Homo sapiens
aggggcggggccggactcgagcggggcggggctcgcgccagcgcccccagctccgtggcggcttcgcccgcgagtccagaggcaggcgagcagctcggtcgcccccaccggccccatggcagcccccggcgccccagctgagtacggctacatccggaccgtcctgggccagcagatcctgggacaactggacagctccagcctggcgctgccctccgaggccaagctgaagctggcggggagcagcggccgcggcggccagacagtcaagagcctgcggatccaggagcaggtgcagcagaccctcgcccggaagggccgcagctccgtgggcaacggaaatcttcaccgaaccagcagtgttcctgagtatgtctacaacctacacttggttgaaaatgattttgttggaggccgttcccctgttcctaaaacctatgacatgctaaaggctggcacaactgccacttatgaaggtcgctggggaagaggaacagcacagtacagctcccagaagtccgtggaagaaaggtccttgaggcatcctctgaggagactggagatttctcctgacagcagcccggagagggctcactacacgcacagcgattaccagtacagccagagaagccaggctgggcacaccctgcaccaccaagaaagcaggcgggccgccctcctagtgccaccgagatatgctcgttccgagatcgtgggggtcagccgtgctggcaccacaagcaggcagcgccactttgacacataccacagacagtaccagcatggctctgttagcgacaccgtttttgacagcatccctgccaacccggccctgctcacgtaccccaggccagggaccagccgcagcatgggcaacctcttggagaaggagaactacctgacggcagggctcactgtcgggcaggtcaggccgctggtgcccctgcagcccgtcactcagaacagggcttccaggtcctcctggcatcagagctccttccacagcacccgcacgctgagggaagctgggcccagtgtcgccgtggattccagcgggaggagagcgcacttgactgtcggccaggcggccgcagggggaagtgggaatctgctcactgagagaagcactttcactgactcccagctggggaatgcagacatggagatgactctggagcgagcagtgagtatgctcgaggcagaccacatgctgccatccaggatttctgctgcagctactttcatacagcacgagtgcttccagaaatctgaagctcggaagagggttaaccagcttcgtggcatcctcaagcttctgcagctcctaaaagttcagaatgaagacgttcagcgagctgtgtgtggggccttgagaaacttagtatttgaagacaatgacaacaaattggaggtggctgaactaaatggggtacctcggctgctccaggtgctgaagcaaaccagagacttggagactaaaaaacaaataacagaccatacagtcaatttaagaagtaggaatggctggccgggcgcggtggctcacgcctgtaatcccagcactttgggaggccaaggcgggcggatcacgaggtcaggagttcgagaccagcctgaccaacatggtttgctgtggaatttgtcatctaatgacaaactcaagaatctcatgataacagaagcattgcttacgctgacggagaatatcatcatccccttttctgggtggcctgaaggagactacccaaaagcaaatggtttgctcgattttgacatattctacaacgtcactggatgcctaagaaacatgagttctgctggcgctgatgggagaaaagcgatgagaagatgtgacggactcattgactcactggtccattatgtcagaggaaccattgcagattaccagccagatgacaaggccacggagaattgtgtgtgcattcttcataacctctcctaccagctggaggcagagctcccagagaaatattcccagaatatctatattcaaaaccggaatatccagactgacaacaacaaaagtattggatgttttggcagtcgaagcaggaaagtaaaagagcaataccaggacgtgccgatgccggaggaaaagagcaaccccaagggcgtggagtggctgtggcattccattgttataaggatgtatctgtccttgatcgccaaaagtgtccgcaactacacacaagaagcatccttaggagctctgcagaacctcacggccggaagtggaccaatgccgacatcagtggctcagacagttgtccagaaggaaagtggcctgcagcacacccgaaagatgctgcatgttggtgacccaagtgtgaaaaagacagccatctcgctgctgaggaatctgtcccggaatctttctctgcagaatgaaattgccaaagaaactctccctgatttggtttccatcattcctgacacagtcccgagtactgaccttctcattgaaactacagcctctgcctgttacacattgaacaacataatccaaaacagttaccagaatgcacgcgaccttctaaacaccgggggcatccagaaaattatggccattagtgcaggcgatgcctatgcctccaacaaagcaagtaaagctgcttccgtccttctgtattctctgtgggcacacacggaactgcatcatgcctacaagaaggctcagtttaagaagacagattttgtcaacagccggactgccaaagcctaccactcccttaaagactgaggaaaatgacaaagtattctcggctgcaaaaatccccaaaggaaaacacctatttttctactacccagcccaagaaacctcaaaagcatgccttgtttctatccttctctatttccgtggtcccctgaatccagaaaacaaatagaacataattttatgagtcttccagaagacctttgcaagtttgccaccagtagataccggccacaggctcgacaaatagtggtctttgttattagggcttatggtagatggcttcctggaatcaaaatgtgaattcatgtggaagggacattaatccaataaataaggaaagaagctgttgcattactgggattttaaaagtttgatttacatttatattccttttctggttcccatgttttgtcactcatgtgcacattgcttcgccattgggcctccagtgtattgttctgcagtgttgaaacagaatggaaatgacaagaaatatctgcagttatccaggagaaagtataatggcaaaattattggtttctttctttactttgtgcttgtttttatccccttgggttgtttttctctgatttttaaataaacttaagaaatttagattacagagtatgcatgactgtaagaaaaagaaattgagaggaagtgatcatagcaaattaaagaagtcttttcctcccagaacttaaagtaaaataaaaaataaataaataaataaaatcttttccacagagaaaggcaactgtgatgataaaatttaacgttcccccaaacactgagtcaatgagatttttctcaggagatactttacctataacaacgccgttaaatccaaatctcttctaaacgatggcattctatgtaatgcctttcctggacttttttggccactgccctggactagtgaaagaatggactctatctttatctgcaagaggaactaaggccttctatcagactgcctggccagcctggggcactgaaaatacggctcatgttaatgagttacattatcagccagcccagccttgcccaccatttaagaaatatcacagagccactagatctcatatgatcttcttcaagccattattttaactcaagaaaactctagagaagaaaagtgaagaagtcatgttgaagaagatgtaagaatgtgtcaagaccatccagaaatgatatgagaaatactgatattttaaatagtgacatcatccagcgaaatgaatctacattaaatgttgttttaactgcgctatgattaaaaccattcatatagagttagtctttacaactactattctgttatttttttttttaatctgacaacatttgtcctaagtaagataagcaaaaaaattcttcaactccttttggcaagaaaactgtaacagaaaataaattttgaatgtgtacttaagtctttattatatttgaaacaattttttttcaattttaaaagctgaatgaagacaacttaggttgctaacctagttcaaaatgaaattatttagataccaatttttaaaatactggagagaatttatatgtctttttccagagttctgatgataagcatttggagtgcatttattcctccagataataaatgtgtgttcagaactttttgtgttttttaaggcattaataaagccttcgataatattaaatacaaaatgagaccaaag

SEQ ID NO: 458843 - DNA, 1105 bp, Homo sapiens
cgcgagtgtcgcagctttcaacaagatctgaagcctgagtgtgtgtacgtgcgcgcgtgcgtgaggccctgccacgattaaagaccaagaccctgcctcaaagataaataaaataaaaaataaataaataaataaaatcttttccacagagaaaggcaactgtgatgataaaatttaacgttcccccaaacactgagtcaatgagatttttctcaggagatactttacctataacaacgccgttaaatccaaatctcttctaaacgatggcattctatgtaatgcctttcctggacttttttggccactgccctggactagtgaaagaatggactctatctttatctgcaagaggaactaaggccttctatcagactgcctggccagcctggggcactgaaaatacggctcatgttaatgagttacattatcagccagcccagccttgcccaccatttaagaaatatcacagagccactagatctcatatgatcttcttcaagccattattttaactcaagaaaactctagagaagaaaagtgaagaagtcatgttgaagaagatgtaagaatgtgtcaagaccatccagaaatgatatgagaaatactgatattttaaatagtgacatcatccagcgaaatgaatctacattaaatgttgttttaactgcgctatgattaaaaccattcatatagagttagtctttacaactactattctgttatttttttttttaatctgacaacatttgtcctaagtaagataagcaaaaaaattcttcaactccttttggcaagaaaactgtaacagaaaataaattttgaatgtgtacttaagtctttattatatttgaaacaattttttttcaattttaaaagctgaatgaagacaacttaggttgctaacctagttcaaaatgaaattatttagataccaatttttaaaatactggagagaatttatatgtctttttccagagttctgatgataagcatttggagtgcatttattcctccagataataaatgtgtgttcagaactttttgtgttttttaaggcattaataaagccttcgataatattaaatacaaaatgagaccaaag

SEQ ID NO: 458844 - DNA, 494 bp, Homo sapiens
aggggcggggccggactcgagcggggcggggctcgcgccagcgcccccagctccgtggcggcttcgcccgcgagtccagaggcaggcgagcagctcggtcgcccccaccggccccatggcagcccccggcgccccagctgagtacggctacatccggaccgtcctgggccagcagatcctgggacaactggacagctccagcctggcgctgccctccgaggccaagctgaagctggcggggagcagcggccgcggcggccagacagtcaagagcctgcggatccaggagcaggtgcagcagaccctcgcccggaagggccgcagctccgtgggcaacggtccagtgctaaactgaaaccaaatcagcttcccctgcgtaggagacacaggaggcatattagatattctttcttatcctctgagaatggccagctaggaagagagcaagcagatacaactcttccataaatggagggaatggagccatgaacaga

SEQ ID NO: 458845 - DNA, 4459 bp, Homo sapiens
aggggcggggccggactcgagcggggcggggctcgcgccagcgcccccagctccgtggcggcttcgcccgcgagtccagaggcaggcgagcagctcggtcgcccccaccggccccatggcagcccccggcgccccagctgagtacggctacatccggaccgtcctgggccagcagatcctgggacaactggacagctccagcctggcgctgccctccgaggccaagctgaagctggcggggagcagcggccgcggcggccagacagtcaagagcctgcggatccaggagcaggtgcagcagaccctcgcccggaagggccgcagctccgtgggcaacggaaatcttcaccgaaccagcagtgttcctgagtatgtctacaacctacacttggttgaaaatgattttgttggaggccgttcccctgttcctaaaacctatgacatgctaaaggctggcacaactgccacttatgaaggtcgctggggaagaggaacagcacagtacagctcccagaagtccgtggaagaaaggtccttgaggcatcctctgaggagactggagatttctcctgacagcagcccggagagggctcactacacgcacagcgattaccagtacagccagagaagccaggctgggcacaccctgcaccaccaagaaagcaggcgggccgccctcctagtgccaccgagatatgctcgttccgagatcgtgggggtcagccgtgctggcaccacaagcaggcagcgccactttgacacataccacagacagtaccagcatggctctgttagcgacaccgtttttgacagcatccctgccaacccggccctgctcacgtaccccaggccagggaccagccgcagcatgggcaacctcttggagaaggagaactacctgacggcagggctcactgtcgggcaggtcaggccgctggtgcccctgcagcccgtcactcagaacagggcttccaggtcctcctggcatcagagctccttccacagcacccgcacgctgagggaagctgggcccagtgtcgccgtggattccagcgggaggagagcgcacttgactgtcggccaggcggccgcagggggaagtgggaatctgctcactgagagaagcactttcactgactcccagctggggaatgcagacatggagatgactctggagcgagcagtgagtatgctcgaggcagaccacatgctgccatccaggatttctgctgcagctactttcatacagcacgagtgcttccagaaatctgaagctcggaagagggttaaccagcttcgtggcatcctcaagcttctgcagctcctaaaagttcagaatgaagacgttcagcgagctgtgtgtggggccttgagaaacttagtatttgaagacaatgacaacaaattggaggtggctgaactaaatggggtacctcggctgctccaggtgctgaagcaaaccagagacttggagactaaaaaacaaataacaggtttgctgtggaatttgtcatctaatgacaaactcaagaatctcatgataacagaagcattgcttacgctgacggagaatatcatcatccccttttctgggtggcctgaaggagactacccaaaagcaaatggtttgctcgattttgacatattctacaacgtcactggatgcctaagaaacatgagttctgctggcgctgatgggagaaaagcgatgagaagatgtgacggactcattgactcactggtccattatgtcagaggaaccattgcagattaccagccagatgacaaggccacggagaattgtgtgtgcattcttcataacctctcctaccagctggaggcagagctcccagagaaatattcccagaatatctatattcaaaaccggaatatccagactgacaacaacaaaagtattggatgttttggcagtcgaagcaggaaagtaaaagagcaataccaggacgtgccgatgccggaggaaaagagcaaccccaagggcgtggagtggctgtggcattccattgttataaggatgtatctgtccttgatcgccaaaagtgtccgcaactacacacaagaagcatccttaggagctctgcagaacctcacggccggaagtggaccaatgccgacatcagtggctcagacagttgtccagaaggaaagtggcctgcagcacacccgaaagatgctgcatgttggtgacccaagtgtgaaaaagacagccatctcgctgctgaggaatctgtcccggaatctttctctgcagaatgaaattgccaaagaaactctccctgatttggtttccatcattcctgacacagtcccgagtactgaccttctcattgaaactacagcctctgcctgttacacattgaacaacataatccaaaacagttaccagaatgcacgcgaccttctaaacaccgggggcatccagaaaattatggccattagtgcaggcgatgcctatgcctccaacaaagcaagtaaagctgcttccgtccttctgtattctctgtgggcacacacggaactgcatcatgcctacaagaaggtaagaacatgaacaaggaatgtgtcatagttaacagagccaggtaataatggcccacttgacttgaccctgggaagaaatcgctaaaaaactgcattttcttgtgtgccagttttgttacctttcacgtttctgtttgcttattccaaaggctcagtttaagaagacagattttgtcaacagccggactgccaaagcctaccactcccttaaagactgaggaaaatgacaaagtattctcggctgcaaaaatccccaaaggaaaacacctatttttctactacccagcccaagaaacctcaaaagcatgccttgtttctatccttctctatttccgtggtcccctgaatccagaaaacaaatagaacataattttatgagtcttccagaagacctttgcaagtttgccaccagtagataccggccacaggctcgacaaatagtggtctttgttattagggcttatggtagatggcttcctggaatcaaaatgtgaattcatgtggaagggacattaatccaataaataaggaaagaagctgttgcattactgggattttaaaagtttgatttacatttatattccttttctggttcccatgttttgtcactcatgtgcacattgcttcgccattgggcctccagtgtattgttctgcagtgttgaaacagaatggaaatgacaagaaatatctgcagttatccaggagaaagtataatggcaaaattattggtttctttctttactttgtgcttgtttttatccccttgggttgtttttctctgatttttaaataaacttaagaaatttagattacagagtatgcatgactgtaagaaaaagaaattgagaggaagtgatcatagcaaattaaagaagtcttttcctcccagaacttaaagtaaaataaaaaataaataaataaataaaatcttttccacagagaaaggcaactgtgatgataaaatttaacgttcccccaaacactgagtcaatgagatttttctcaggagatactttacctataacaacgccgttaaatccaaatctcttctaaacgatggcattctatgtaatgcctttcctggacttttttggccactgccctggactagtgaaagaatggactctatctttatctgcaagaggaactaaggccttctatcagactgcctggccagcctggggcactgaaaatacggctcatgttaatgagttacattatcagccagcccagccttgcccaccatttaagaaatatcacagagccactagatctcatatgatcttcttcaagccattattttaactcaagaaaactctagagaagaaaagtgaagaagtcatgttgaagaagatgtaagaatgtgtcaagaccatccagaaatgatatgagaaatactgatattttaaatagtgacatcatccagcgaaatgaatctacattaaatgttgttttaactgcgctatgattaaaaccattcatatagagttagtctttacaactactattctgttatttttttttttaatctgacaacatttgtcctaagtaagataagcaaaaaaattcttcaactccttttggcaagaaaactgtaacagaaaataaattttgaatgtgtacttaagtctttattatatttgaaacaattttttttcaattttaaaagctgaatgaagacaacttaggttgctaacctagttcaaaatgaaattatttagataccaatttttaaaatactggagagaatttatatgtctttttccagagttctgatgataagcatttggagtgcatttattcctccagataataaatgtgtgttcagaactttttgtgttttttaaggcattaataaagccttcgataatattaaatacaaaatgagaccaaag

SEQ ID NO: 458846 - DNA, 2860 bp, Homo sapiens
aggggcggggccggactcgagcggggcggggctcgcgccagcgcccccagctccgtggcggcttcgcccgcgagtccagaggcaggcgagcagctcggtcgcccccaccggccccatggcagcccccggcgccccagctgagtacggctacatccggaccgtcctgggccagcagatcctgggacaactggacagctccagcctggcgctgccctccgaggccaagctgaagctggcggggagcagcggccgcggcggccagacagtcaagagcctgcggatccaggagcaggtgcagcagaccctcgcccggaagggccgcagctccgtgggcaacggaaatcttcaccgaaccagcagtgttcctgagtatgtctacaacctacacttggttgaaaatgattttgttggaggccgttcccctgttcctaaaacctatgacatgctaaaggctggcacaactgccacttatgaaggtcgctggggaagaggaacagcacagtacagctcccagaagtccgtggaagaaaggtccttgaggcatcctctgaggagactggagatttctcctgacagcagcccggagagggctcactacacgcacagcgattaccagtacagccagagaagccaggctgggcacaccctgcaccaccaagaaagcaggcgggccgccctcctagtgccaccgagatatgctcgttccgagatcgtgggggtcagccgtgctggcaccacaagcaggcagcgccactttgacacataccacagacagtaccagcatggctctgttagcgacaccgtttttgacagcatccctgccaacccggccctgctcacgtaccccaggccagggaccagccgcagcatgggcaacctcttggagaaggagaactacctgacggcagggctcactgtcgggcaggtcaggccgctggtgcccctgcagcccgtcactcagaacagggcttccaggtcctcctggcatcagagctccttccacagcacccgcacgctgagggaagctgggcccagtgtcgccgtggattccagcgggaggagagcgcacttgactgtcggccaggcggccgcagggggaagtgggaatctgctcactgagagaagcactttcactgactcccagctggggaatgcagacatggagatgactctggagcgagcagtgagtatgctcgaggcagaccacatgctgccatccaggatttctgctgcagctactttcatacagcacgagtgcttccagaaatctgaagctcggaagagggttaaccagcttcgtggcatcctcaagcttctgcagctcctaaaagttcagaatgaagacgttcagcgagctgtgtgtggggccttgagaaacttagtatttgaagacaatgacaacaaattggaggtggctgaactaaatggggtacctcggctgctccaggtgctgaagcaaaccagagacttggagactaaaaaacaaataacaggtttgctgtggaatttgtcatctaatgacaaactcaagaatctcatgataacagaagcattgcttacgctgacggagaatatcatcatccccttttctgggtggcctgaaggagactacccaaaagcaaatggtttgctcgattttgacatattctacaacgtcactggatgcctaagaaacatgagttctgctggcgctgatgggagaaaagcgatgagaagatgtgacggactcattgactcactggtccattatgtcagaggaaccattgcagattaccagccagatgacaaggccacggagaattgtgtgtgcattcttcataacctctcctaccagctggaggcagagctcccagagaaatattcccagaatatctatattcaaaaccggaatatccagactgacaacaacaaaagtattggatgttttggcagtcgaagcaggaaagtaaaagagcaataccaggacgtgccgatgccggaggaaaagagcaaccccaagggcgtggagtggctgtggcattccattgttataaggatgtatctgtccttgatcgccaaaagtgtccgcaactacacacaagaagcatccttaggagctctgcagaacctcacggccggaagtggaccaatgccgacatcagtggctcagacagttgtccagaaggaaagtggcctgcagcacacccgaaagatgctgcatgttggtgacccaagtgtgaaaaagacagccatctcgctgctgaggaatctgtcccggaatctttctctgcagaatgaaattgccaaagaaactctccctgatttggtttccatcattcctgacacagtcccgagtactgaccttctcattgaaactacagcctctgcctgttacacattgaacaacataatccaaaacagttaccagaatgcacgcgaccttctaaacaccgggggcatccagaaaattatggccattagtgcaggcgatgcctatgcctccaacaaagcaagtaaagagactttcttttctgtatttgccatcttttttcctgctgcaactggtattctggctggagcaaatatctcaggtgatcttgcagatcctcagtcagccatacccaaaggaacactcctagccattttaattactacattggtttacgtaggaattgcagtatctgtaggttcttgtgttgttcgagatgccactggaaacgttaatgacactatcgtaacagagctaacaaactgtactttcgccgcccgccaaattaaacttggatttttcatcttgtgaaagcagtccttgttcctatggcctaatgaacaacttccaggtaatgagtatggtgtcagatttacaccactaatttctgca

SEQ ID NO: 458847 - DNA, 612 bp, Homo sapiens
cctgacttcatggatggctgctgcggagtagcagttgaggagcgaagaggtcttacagaacacccacaggccgcatccagaagcctcactcattctccctgatctcagaatgtccttttcttttcagctatgcctccaacaaagcaagtaaagctgcttccgtccttctgtattctctgtgggcacacacggaactgcatcatgcctacaagaaggtaagaacatgaacaaggaatgtgtcatagttaacagagccaggtaataatggcccacttgacttgaccctgggaagaaatcgctaaaaaactgcattttcttgtgtgccagttttgttacctttcacgtttctgtttgcttattccaaaggctcagtttaagaagacagattttgtcaacagccggactgccaaagcctaccactcccttaaagactgaggaaaatgacaaagtattctcggctgcaaaaatccccaaaggaaaacacctatttttctactacccagcccaagaaacctcaaaagcatgccttgtttctatccttctctatttccgtggtcccctgaatccagaaaacaaatagaacataattttatgagtcttccagaagacctt

SEQ ID NO: 458848 - DNA, 4308 bp, Homo sapiens
aggggcggggccggactcgagcggggcggggctcgcgccagcgcccccagctccgtggcggcttcgcccgcgagtccagaggcaggcgagcagctcggtcgcccccaccggccccatggcagcccccggcgccccagctgagtacggctacatccggaccgtcctgggccagcagatcctgggacaactggacagctccagcctggcgctgccctccgaggccaagctgaagctggcggggagcagcggccgcggcggccagacagtcaagagcctgcggatccaggagcaggtgcagcagaccctcgcccggaagggccgcagctccgtgggcaacggaaatcttcaccgaaccagcagtgttcctgagtatgtctacaacctacacttggttgaaaatgattttgttggaggccgttcccctgttcctaaaacctatgacatgctaaaggctggcacaactgccacttatgaaggtcgctggggaagaggaacagcacagtacagctcccagaagtccgtggaagaaaggtccttgaggcatcctctgaggagactggagatttctcctgacagcagcccggagagggctcactacacgcacagcgattaccagtacagccagagaagccaggctgggcacaccctgcaccaccaagaaagcaggcgggccgccctcctagtgccaccgagatatgctcgttccgagatcgtgggggtcagccgtgctggcaccacaagcaggcagcgccactttgacacataccacagacagtaccagcatggctctgttagcgacaccgtttttgacagcatccctgccaacccggccctgctcacgtaccccaggccagggaccagccgcagcatgggcaacctcttggagaaggagaactacctgacggcagggctcactgtcgggcaggtcaggccgctggtgcccctgcagcccgtcactcagaacagggcttccaggtcctcctggcatcagagctccttccacagcacccgcacgctgagggaagctgggcccagtgtcgccgtggattccagcgggaggagagcgcacttgactgtcggccaggcggccgcagggggaagtgggaatctgctcactgagagaagcactttcactgactcccagctggggaatgcagacatggagatgactctggagcgagcagtgagtatgctcgaggcagaccacatgctgccatccaggatttctgctgcagctactttcatacagcacgagtgcttccagaaatctgaagctcggaagagggttaaccagcttcgtggcatcctcaagcttctgcagctcctaaaagttcagaatgaagacgttcagcgagctgtgtgtggggccttgagaaacttagtatttgaagacaatgacaacaaattggaggtggctgaactaaatggggtacctcggctgctccaggtgctgaagcaaaccagagacttggagactaaaaaacaaataacaggtttgctgtggaatttgtcatctaatgacaaactcaagaatctcatgataacagaagcattgcttacgctgacggagaatatcatcatccccttttctgggtggcctgaaggagactacccaaaagcaaatggtttgctcgattttgacatattctacaacgtcactggatgcctaagaaacatgagttctgctggcgctgatgggagaaaagcgatgagaagatgtgacggactcattgactcactggtccattatgtcagaggaaccattgcagattaccagccagatgacaaggccacggagaattgtgtgtgcattcttcataacctctcctaccagctggaggcagagctcccagagaaatattcccagaatatctatattcaaaaccggaatatccagactgacaacaacaaaagtattggatgttttggcagtcgaagcaggaaagtaaaagagcaataccaggacgtgccgatgccggaggaaaagagcaaccccaagggcgtggagtggctgtggcattccattgttataaggatgtatctgtccttgatcgccaaaagtgtccgcaactacacacaagaagcatccttaggagctctgcagaacctcacggccggaagtggaccaatgccgacatcagtggctcagacagttgtccagaaggaaagtggcctgcagcacacccgaaagatgctgcatgttggtgacccaagtgtgaaaaagacagccatctcgctgctgaggaatctgtcccggaatctttctctgcagaatgaaattgccaaagaaactctccctgatttggtttccatcattcctgacacagtcccgagtactgaccttctcattgaaactacagcctctgcctgttacacattgaacaacataatccaaaacagttaccagaatgcacgcgaccttctaaacaccgggggcatccagaaaattatggccattagtgcaggcgatgcctatgcctccaacaaagcaagtaaagctgcttccgtccttctgtattctctgtgggcacacacggaactgcatcatgcctacaagaaggctcagtttaagaagacagattttgtcaacagccggactgccaaagcctaccactcccttaaagactgaggaaaatgacaaagtattctcggctgcaaaaatccccaaaggaaaacacctatttttctactacccagcccaagaaacctcaaaagcatgccttgtttctatccttctctatttccgtggtcccctgaatccagaaaacaaatagaacataattttatgagtcttccagaagacctttgcaagtttgccaccagtagataccggccacaggctcgacaaatagtggtctttgttattagggcttatggtagatggcttcctggaatcaaaatgtgaattcatgtggaagggacattaatccaataaataaggaaagaagctgttgcattactgggattttaaaagtttgatttacatttatattccttttctggttcccatgttttgtcactcatgtgcacattgcttcgccattgggcctccagtgtattgttctgcagtgttgaaacagaatggaaatgacaagaaatatctgcagttatccaggagaaagtataatggcaaaattattggtttctttctttactttgtgcttgtttttatccccttgggttgtttttctctgatttttaaataaacttaagaaatttagattacagagtatgcatgactgtaagaaaaagaaattgagaggaagtgatcatagcaaattaaagaagtcttttcctcccagaacttaaagtaaaataaaaaataaataaataaataaaatcttttccacagagaaaggcaactgtgatgataaaatttaacgttcccccaaacactgagtcaatgagatttttctcaggagatactttacctataacaacgccgttaaatccaaatctcttctaaacgatggcattctatgtaatgcctttcctggacttttttggccactgccctggactagtgaaagaatggactctatctttatctgcaagaggaactaaggccttctatcagactgcctggccagcctggggcactgaaaatacggctcatgttaatgagttacattatcagccagcccagccttgcccaccatttaagaaatatcacagagccactagatctcatatgatcttcttcaagccattattttaactcaagaaaactctagagaagaaaagtgaagaagtcatgttgaagaagatgtaagaatgtgtcaagaccatccagaaatgatatgagaaatactgatattttaaatagtgacatcatccagcgaaatgaatctacattaaatgttgttttaactgcgctatgattaaaaccattcatatagagttagtctttacaactactattctgttatttttttttttaatctgacaacatttgtcctaagtaagataagcaaaaaaattcttcaactccttttggcaagaaaactgtaacagaaaataaattttgaatgtgtacttaagtctttattatatttgaaacaattttttttcaattttaaaagctgaatgaagacaacttaggttgctaacctagttcaaaatgaaattatttagataccaatttttaaaatactggagagaatttatatgtctttttccagagttctgatgataagcatttggagtgcatttattcctccagataataaatgtgtgttcagaactttttgtgttttttaaggcattaataaagccttcgataatattaaatacaaaatgagaccaaag

SEQ ID NO: 458849 - DNA, 2654 bp, Homo sapiens
gctcaacagcagcctgaaaaccattctagaatgacctatgcttaattctctgaattttctctcactgggagaaatatcaagttaggggtgtggagtgttattaggaagaaataatcattatgggctaaaagttaagtgattagaaattatatatatttgcttttaaaatttctatttcaagggcttcttatgcaaattatgagcctttctagacagtatttctggtctcctggtttgagtgtgaaattatagccatcacctgacatgcattaattctggattccttttgtgtgtggtcagcaataccaggacgtgccgatgccggaggaaaagagcaaccccaagggcgtggagtggctgtggcattccattgttataaggatgtatctgtccttgatcgccaaaagtgtccgcaactacacacaagaagcatccttaggagctctgcagaacctcacggccggaagtggaccaatgccgacatcagtggctcagacagttgtccagaaggaaagtggcctgcagcacacccgaaagatgctgcatgttggtgacccaagtgtgaaaaagacagccatctcgctgctgaggaatctgtcccggaatctttctctgcagaatgaaattgccaaagaaactctccctgatttggtttccatcattcctgacacagtcccgagtactgaccttctcattgaaactacagcctctgcctgttacacattgaacaacataatccaaaacagttaccagaatgcacgcgaccttctaaacaccgggggcatccagaaaattatggccattagtgcaggcgatgcctatgcctccaacaaagcaagtaaagctgcttccgtccttctgtattctctgtgggcacacacggaactgcatcatgcctacaagaaggctcagtttaagaagacagattttgtcaacagccggactgccaaagcctaccactcccttaaagactgaggaaaatgacaaagtattctcggctgcaaaaatccccaaaggaaaacacctatttttctactacccagcccaagaaacctcaaaagcatgccttgtttctatccttctctatttccgtggtcccctgaatccagaaaacaaatagaacataattttatgagtcttccagaagacctttgcaagtttgccaccagtagataccggccacaggctcgacaaatagtggtctttgttattagggcttatggtagatggcttcctggaatcaaaatgtgaattcatgtggaagggacattaatccaataaataaggaaagaagctgttgcattactgggattttaaaagtttgatttacatttatattccttttctggttcccatgttttgtcactcatgtgcacattgcttcgccattgggcctccagtgtattgttctgcagtgttgaaacagaatggaaatgacaagaaatatctgcagttatccaggagaaagtataatggcaaaattattggtttctttctttactttgtgcttgtttttatccccttgggttgtttttctctgatttttaaataaacttaagaaatttagattacagagtatgcatgactgtaagaaaaagaaattgagaggaagtgatcatagcaaattaaagaagtcttttcctcccagaacttaaagtaaaataaaaaataaataaataaataaaatcttttccacagagaaaggcaactgtgatgataaaatttaacgttcccccaaacactgagtcaatgagatttttctcaggagatactttacctataacaacgccgttaaatccaaatctcttctaaacgatggcattctatgtaatgcctttcctggacttttttggccactgccctggactagtgaaagaatggactctatctttatctgcaagaggaactaaggccttctatcagactgcctggccagcctggggcactgaaaatacggctcatgttaatgagttacattatcagccagcccagccttgcccaccatttaagaaatatcacagagccactagatctcatatgatcttcttcaagccattattttaactcaagaaaactctagagaagaaaagtgaagaagtcatgttgaagaagatgtaagaatgtgtcaagaccatccagaaatgatatgagaaatactgatattttaaatagtgacatcatccagcgaaatgaatctacattaaatgttgttttaactgcgctatgattaaaaccattcatatagagttagtctttacaactactattctgttatttttttttttaatctgacaacatttgtcctaagtaagataagcaaaaaaattcttcaactccttttggcaagaaaactgtaacagaaaataaattttgaatgtgtacttaagtctttattatatttgaaacaattttttttcaattttaaaagctgaatgaagacaacttaggttgctaacctagttcaaaatgaaattatttagataccaatttttaaaatactggagagaatttatatgtctttttccagagttctgatgataagcatttggagtgcatttattcctccagataataaatgtgtgttcagaactttttgtgttttttaaggcattaataaagccttcgataatattaaatacaaaatgagaccaaag

SEQ ID NO: 458850 - DNA, 2598 bp, Homo sapiens
aggggcggggccggactcgagcggggcggggctcgcgccagcgcccccagctccgtggcggcttcgcccgcgagtccagaggcaggcgagcagctcggtcgcccccaccggccccatggcagcccccggcgccccagctgagtacggctacatccggaccgtcctgggccagcagatcctgggacaactggacagctccagcctggcgctgccctccgaggccaagctgaagctggcggggagcagcggccgcggcggccagacagtcaagagcctgcggatccaggagcaggtgcagcagaccctcgcccggaagggccgcagctccgtgggcaacggaaatcttcaccgaaccagcagtgttcctgagtatgtctacaacctacacttggttgaaaatgattttgttggaggccgttcccctgttcctaaaacctatgacatgctaaaggctggcacaactgccacttatgaaggtcgctggggaagaggaacagcacagtacagctcccagaagtccgtggaagaaaggtccttgaggcatcctctgaggagactggagatttctcctgacagcagcccggagagggctcactacacgcacagcgattaccagtacagccagagaagccaggctgggcacaccctgcaccaccaagaaagcaggcgggccgccctcctagtgccaccgagatatgctcgttccgagatcgtgggggtcagccgtgctggcaccacaagcaggcagcgccactttgacacataccacagacagtaccagcatggctctgttagcgacaccgtttttgacagcatccctgccaacccggccctgctcacgtaccccaggccagggaccagccgcagcatgggcaacctcttggagaaggagaactacctgacggcagggctcactgtcgggcaggtcaggccgctggtgcccctgcagcccgtcactcagaacagggcttccaggtcctcctggcatcagagctccttccacagcacccgcacgctgagggaagctgggcccagtgtcgccgtggattccagcgggaggagagcgcacttgactgtcggccaggcggccgcagggggaagtgggaatctgctcactgagagaagcactttcactgactcccagctggggaatgcagacatggagatgactctggagcgagcagtgagtatgctcgaggcagaccacatgctgccatccaggatttctgctgcagctactttcatacagcacgagtgcttccagaaatctgaagctcggaagagggttaaccagcttcgtggcatcctcaagcttctgcagctcctaaaagttcagaatgaagacgttcagcgagctgtgtgtggggccttgagaaacttagtatttgaagacaatgacaacaaattggaggtggctgaactaaatggggtacctcggctgctccaggtgctgaagcaaaccagagacttggagactaaaaaacaaataacaggtttgctgtggaatttgtcatctaatgacaaactcaagaatctcatgataacagaagcattgcttacgctgacggagaatatcatcatccccttttctgggtggcctgaaggagactacccaaaagcaaatggtttgctcgattttgacatattctacaacgtcactggatgcctaagaaacatgagttctgctggcgctgatgggagaaaagcgatgagaagatgtgacggactcattgactcactggtccattatgtcagaggaaccattgcagattaccagccagatgacaaggccacggagaattgtgtgtgcattcttcataacctctcctaccagctggaggcagagctcccagagaaatattcccagaatatctatattcaaaaccggaatatccagactgacaacaacaaaagtattggatgttttggcagtcgaagcaggaaagtaaaagagcaataccaggacgtgccgatgccggaggaaaagagcaaccccaagggcgtggagtggctgtggcattccattgttataaggatgtatctgtccttgatcgccaaaagtgtccgcaactacacacaagaagcatccttaggagctctgcagaacctcacggccggaagtggaccagtgagtattgggcctgatttcctactttttaaaataatgatattgtagacatacctacattcaattcagagatgaaacagtgagggaagagaaaaaggtttcttattttagtaaagacaattctcagaaattacagagggcttcggtctcagcttatgcaaagtcaagtcaggctgcttgactgacaagtcaagtcagtactctttcagttacagatctcagaatcctgcctcaagctggtttaagcaaaaaagaggaaatttttggcttatggcactgaaaactccagggtgggccttctttctgtcgtgactggacttaggtgcaccagtgattacagttgactttcttcatctccgggcttggttttcctctgctgggtttgttctcaaaggctctctccatagggtaacaaagacagccatgaattatttcaggctcacgttttatcagcccaatgtgtcccccac

SEQ ID NO: 458851 - DNA, 740 bp, Homo sapiens
gcccatggacaatggcttccccggcaaagggcccggttccaccgggtggctcccgggtaccggggagacaaggcgccggggcccgttgggcctggcgggagctgcggcgccccgacggacggacggacggacggactgactcaccgacggcgcgcgctaacggctcggctccacacgctctcgccgcggctgcgcctgcacctgcctgtcgctgtttgcgggtctccgcgcgggaccggggcgcagcggggtcgctgaggcgagggtgtcatgtcagacaacgaggacaattttgatggcgacgactttgatgatgtggaggaggatgaagggctagatgacttggagaatgccgaagaggaaggccaggagaatgtcgagatcctcccctctggggagcgaccgcaggccaaccagaagcgaatcaccacaccatacatgaccaagtacgagcgagcccgcgtgctgggcacccgagcgctccagattgcgatgtgtgcccctgtgatggtggagctggagggggagacagatcctctgctcattgccatgaaggaactcaaggcccgaaagatccccatcatcattcgccgttacctgccagatgggagctatgaagactggggggtggacgagctcatcatcaccgactgagctggagtcatcttcctgcccttgccccatgcccaattttcattctcactttatatgtgtaaataataaaatattcaactttccaa

SEQ ID NO: 458852 - DNA, 559 bp, Homo sapiens
ttgctcccacttgcctggctggagaagttgatgcttattcctacagatccttaggaacagctcaccaggaagtaggaggaagagagaagaggaggcagggaaagtgggagggcactgatgagacatggacgtcttctggctgttggaatttccctgttcctgctgcaggaggccttaccaatattctgtcattcttccccctcttgtctgatataaaaactttctttttcttgtaattgctttcttacaaagtacactcatcagccccaagaggctgctcctaagacttctctttgcttgtgttttgcacacaatctgttccttctgcggcagagctggggtcaccagccctcatgtacttgtgacttctcccctgccacagggcccgaaagatccccatcatcattcgccgttacctgccagatgggagctatgaagactggggggtggacgagctcatcatcaccgactgagctggagtcatcttcctgcccttgccccatgcccaattttcattctcactttatatgtgtaaataataaaatattcaactttccaa

SEQ ID NO: 458853 - DNA, 644 bp, Homo sapiens
  misc_feature (48)..(48): n is a, c, g, or t
  misc_feature (52)..(52): n is a, c, g, or t
  misc_feature (68)..(68): n is a, c, g, or t
gcctcgaaaccttccgcctcggaacgaaagccgggagagtttttacgngccngcaagtgccggcccanaaggaattgcgcaagataagctaggagccgcgcgagtcgtagtgtcgctgtttgcgggtctccgcgcgggaccggggcgcagcggggtcgctgaggcgagggtgtcatgtcagacaacgaggacaattttgatggcgacgactttgatgatgtggaggaggatgaagggctagatgacttggagaatgccgaagaggaaggccaggagaatgtcgagatcctcccctctggggagcgaccgcaggccaaccagaagcgaatcaccacaccatacatgaccaagtacgagcgagcccgcgtgctgggcacccgagcgctccagattgcgatgtgtgcccctgtgatggtggagctggagggggagacagatcctctgctcattgccatgaaggaactcaaggcccgaaagatccccatcatcattcgccgttacctgccagatgggagctatgaagactggggggtggacgagctcatcatcaccgactgagctggagtcatcttcctgcccttgccccatgcccaattttcattctcactttatatgtgtaaataataaaatattcaactttccaa

SEQ ID NO: 458854 - DNA, 2162 bp, Homo sapiens
  misc_feature (48)..(48): n is a, c, g, or t
  misc_feature (52)..(52): n is a, c, g, or t
  misc_feature (68)..(68): n is a, c, g, or t
gcctcgaaaccttccgcctcggaacgaaagccgggagagtttttacgngccngcaagtgccggcccanaaggaattgcgcaagataagctaggagccgcgcgagtcgtagtgtcgctgtttgcgggtctccgcgcgggaccggggcgcagcggggtcgctgaggcgagggtgtcatgtcagacaacgaggacaattttgatggcgacgactttgatgatgtggaggaggatgaagggctagatgacttggagaatgccgaagaggaaggccaggagaatgtcgagatcctcccctctggggagcgaccgcaggccaaccagaagcgaatcaccacaccatacatgaccaagtacgagcgagcccgcgtgctgggcacccgagcgctccagattgcgatgtgtgcccctgtgatggtggagctggagggggagacagatcctctgctcattgccatgaaggaactcaaggcccgaaagatccccatcatcattcgccgttacctgccagatgggagctatgaagactggggggtggacgagctcatcatcaccgactgagctggagtcatcttcctgcccttgccccatgcccaattttcattctcactttatatgtgtaaataataaaatattcaactttccaacaacccccttcccctctgcttatctgcaatgtcaccacctgttgcttccccgttaccgccatgctgcgtggagcatgcacctattccagtggccctgtgactgtcagctccttaagaagcaccaggggcccttagcccctttggatcccccacatccttccctccatctccctgttccccagagcaaaggctgctgcaggggagacacctcagctgccttccaagcagacagacaagtctttgtgcccagggagctggttgccacggaaacccccaatttcctttccagtggggactggctgcaggggcttctcccttctcaggagtatcacagagcaggtctcatcaagccacccattgtttcctaaggacctgcttcgagcctcttatcgtgggctcggatcccctttcaggagcagtgccccagcaggaagcgtgggggtgtgctgatctcccaccctccccaggcagagccctgctgggcaagtcagcagctggagcaaggaccgagcacctgcctacccctgcccccatggctctgtccccactcctcctcaggactctgcccacacgctgtcctctgtggcccacctctttggtgtgccacacccatgccttcttcctagcctctataagatatcctttccctcctatttggggctggtgatcccctgaggccttggggacatggtgctggggtggtggtgctcctgggttccaggtgttacattaagtcagagctggagttcccccttcctctgcctgaggttctaatgggtcctcttcctttctccaccctgcttacccaacctgaggtaagaccagtcacactggctcctccctcctagagggggtcagggggagggtgtatattgacatgaacagggatagagggtaaactggctccctgaatatgccagccttaacctccattccactgccagctccccttcaaagaggaggagctgggcttccctaacctctgcaggaggcagggcctccaggcctaggtgcagcctggccctgggatgggatgtggggagtgaatggtgaggatctgcattggtgggaggggtgtccgctgccctggagaagggttaattcagggagcagtggacttcacactcccatccaccctcctccaagcctgtggaatcctttaatcaagttgggtgctgaaatttcagctctgaaatgccgcctttgtgctggcatccaggcagccgccccagagtgcgggggtcactttctcggccccatttctctaaatggtctctttgttccctgctgggctgctcagtatcagatgtgattaaagggagatggggtttgggctggggaggaggggaattgggggttaacccttaggggatagagtgcaagggaaatgggacagaaggggtgtttttcctcctgtcttcctcttcccattctcctcttttggggagtcccctgctattcagctgtctgggcctggcttttgacttctcttgaataaaatgtcccggtcaccactat

SEQ ID NO: 458855 - DNA, 1101 bp, Homo sapiens
  misc_feature (48)..(48): n is a, c, g, or t
  misc_feature (52)..(52): n is a, c, g, or t
  misc_feature (68)..(68): n is a, c, g, or t
  misc_feature (692)..(692): n is a, c, g, or t
gcctcgaaaccttccgcctcggaacgaaagccgggagagtttttacgngccngcaagtgccggcccanaaggaattgcgcaagataagctaggagccgcgcgagtcgtagtgtcgctgtttgcgggtctccgcgcgggaccggggcgcagcggggtcgctgaggcgagggtgtcatgtcagacaacgaggacaattttgatggcgacgactttgatgatgtggaggaggatgaagggctagatgacttggagaatgccgaagaggaaggccaggagaatgtcgagatcctcccctctggggagcgaccgcaggccaaccagaagcgaatcaccacaccatacatgaccaagtacgagcgagcccgcgtgctgggcacccgagcgctccagattgcgatgtgtgcccctgtgatggtggagctggagggggagacagatcctctgctcattgccatgaaggaactcaaggcccgaaagatccccatcatcattcgccgttacctgccagatgggagctatgaagactggggggtggacgagctcatcatcaccgactgagctggagtcatcttcctgcccttgccccatgcccaattttcattctcactttatatgtgtaaataataaaatattcaactttccaacagcgttggacataccgagtaggtttcctacaattacagctctaacanaataggctgtcccgaaccccgtggtaatagaattggttaacctttataccaagaaggtggcgaaagcacaaatttgcttgttggtgtgtgcccaggcagacttcgaggggtcgtgcggtaagacctaaagtcctaattgagattgtcaaaaaaaggaactgtaggagggctatggtggtcatgggtctaaattgtgtcgtgaaagggttcaggggttcctatgggagcgaaatggtgggaagggtgaggcaggcagggtggaagtataaaatgacttttggtataaatgcacgggttaaaaaaaacggggttttggggaaaggtaaagacgttgtctggcctttaaggattggtcttggtatgggttattatagtgaaaggaagaggaggaaagaaaaaaaagagagag

SEQ ID NO: 458856 - DNA, 757 bp, Homo sapiens
  misc_feature (48)..(48): n is a, c, g, or t
  misc_feature (52)..(52): n is a, c, g, or t
  misc_feature (68)..(68): n is a, c, g, or t
gcctcgaaaccttccgcctcggaacgaaagccgggagagtttttacgngccngcaagtgccggcccanaaggaattgcgcaagataagctaggagccgcgcgagtcgtagtgtcgctgtttgcgggtctccgcgcgggaccggggcgcagcggggtcgctgaggcgagggtgtcatgtcagacaacgaggacaagtgagtgcgggagcggagtggcctttgcggcaaccttggaaggggcggatgagttttgatggcgacgactttgatgatgtggaggaggatgaagggctagatgacttggagaatgccgaagaggtcagtattcagcctcaggctcccacctctgcagcccaagctgccaaatcgtctgacagggaaggccaggagaatgtcgagatcctcccctctggggagcgaccgcaggccaaccagaagcgaatcaccacaccatacatgaccaagtacgagcgagcccgcgtgctgggcacccgagcgctccagattgcgatgtgtgcccctgtgatggtggagctggagggggagacagatcctctgctcattgccatgaaggaactcaaggcccgaaagatccccatcatcattcgccgttacctgccagatgggagctatgaagactggggggtggacgagctcatcatcaccgactgagctggagtcatcttcctgcccttgccccatgcccaattttcattctcactttatatgtgtaaataataaaatattcaactttccaa

SEQ ID NO: 458857 - DNA, 2077 bp, Homo sapiens
ttgctcccacttgcctggctggagaagttgatgcttattcctacagatccttaggaacagctcaccaggaagtaggaggaagagagaagaggaggcagggaaagtgggagggcactgatgagacatggacgtcttctggctgttggaatttccctgttcctgctgcaggaggccttaccaatattctgtcattcttccccctcttgtctgatataaaaactttctttttcttgtaattgctttcttacaaagtacactcatcagccccaagaggctgctcctaagacttctctttgcttgtgttttgcacacaatctgttccttctgcggcagagctggggtcaccagccctcatgtacttgtgacttctcccctgccacagggcccgaaagatccccatcatcattcgccgttacctgccagatgggagctatgaagactggggggtggacgagctcatcatcaccgactgagctggagtcatcttcctgcccttgccccatgcccaattttcattctcactttatatgtgtaaataataaaatattcaactttccaacaacccccttcccctctgcttatctgcaatgtcaccacctgttgcttccccgttaccgccatgctgcgtggagcatgcacctattccagtggccctgtgactgtcagctccttaagaagcaccaggggcccttagcccctttggatcccccacatccttccctccatctccctgttccccagagcaaaggctgctgcaggggagacacctcagctgccttccaagcagacagacaagtctttgtgcccagggagctggttgccacggaaacccccaatttcctttccagtggggactggctgcaggggcttctcccttctcaggagtatcacagagcaggtctcatcaagccacccattgtttcctaaggacctgcttcgagcctcttatcgtgggctcggatcccctttcaggagcagtgccccagcaggaagcgtgggggtgtgctgatctcccaccctccccaggcagagccctgctgggcaagtcagcagctggagcaaggaccgagcacctgcctacccctgcccccatggctctgtccccactcctcctcaggactctgcccacacgctgtcctctgtggcccacctctttggtgtgccacacccatgccttcttcctagcctctataagatatcctttccctcctatttggggctggtgatcccctgaggccttggggacatggtgctggggtggtggtgctcctgggttccaggtgttacattaagtcagagctggagttcccccttcctctgcctgaggttctaatgggtcctcttcctttctccaccctgcttacccaacctgaggtaagaccagtcacactggctcctccctcctagagggggtcagggggagggtgtatattgacatgaacagggatagagggtaaactggctccctgaatatgccagccttaacctccattccactgccagctccccttcaaagaggaggagctgggcttccctaacctctgcaggaggcagggcctccaggcctaggtgcagcctggccctgggatgggatgtggggagtgaatggtgaggatctgcattggtgggaggggtgtccgctgccctggagaagggttaattcagggagcagtggacttcacactcccatccaccctcctccaagcctgtggaatcctttaatcaagttgggtgctgaaatttcagctctgaaatgccgcctttgtgctggcatccaggcagccgccccagagtgcgggggtcactttctcggccccatttctctaaatggtctctttgttccctgctgggctgctcagtatcagatgtgattaaagggagatggggtttgggctggggaggaggggaattgggggttaacccttaggggatagagtgcaagggaaatgggacagaaggggtgtttttcctcctgtcttcctcttcccattctcctcttttggggagtcccctgctattcagctgtctgggcctggcttttgacttctcttgaataaaatgtcccggtcaccactat

SEQ ID NO: 458858 - DNA, 659 bp, Homo sapiens
  misc_feature (48)..(48): n is a, c, g, or t
  misc_feature (52)..(52): n is a, c, g, or t
  misc_feature (68)..(68): n is a, c, g, or t
gcctcgaaaccttccgcctcggaacgaaagccgggagagtttttacgngccngcaagtgccggcccanaaggaattgcgcaagataagctaggagccgcgcgagtcgtagtgtcgctgtttgcgggtctccgcgcgggaccggggcgcagcggggtcgctgaggcgagggtgtcatgtcagacaacgaggacaagtgagtgcgggagcggagtggcctttgcggcaaccttggaaggggcggatgagttttgatggcgacgactttgatgatgtggaggaggatgaagggctagatgacttggagaatgccgaagaggtcagtattcagcctcaggctcccacctctgcagcccaagctgccaaatcgtctgacaggaaggccaggagaatgtcgagcgctccagattgcgatgtgtgcccctgtgatggtggagctggagggggagacagatcctctgctcattgccatgaaggaactcaaggcccgaaagatccccatcatcattcgccgttacctgccagatgggagctatgaagactggggggtggacgagctcatcatcaccgactgagctggagtcatcttcctgcccttgccccatgcccaattttcattctcactttatatgtgtaaataataaaatattcaactttccaa

SEQ ID NO: 458859 - DNA, 940 bp, Homo sapiens
ccaaaaagtagagagagaaaatagaaattgaaatgaggtgcactgggcactgaggcaaggctctggggttggagcagttagaatggtgtgcctttgcacatgtctccctttccaccaggacattctgctgtggccgctggactccggagtctgtgataggcctctgccagggaagatctctggcagtgcccctacacaccactccctactgtgcctgcctacctagaagatgacgtttctaggtggggaccaggatgccgttccaccctcactgcctgttgggcccttctccctgggtttgtagtctccctaacacctgtccctatccctacaggatgtgtgcccctgtgatggtggagctggagggggagacagatcctctgctcattgccatgaaggaactcaagtaagtcactcaaatcatggttcacttctccaaatctctgggaggcatctgttgggctctctgttgcaccctttgctcccacttgcctggctggagaagttgatgcttattcctacagatccttaggaacagctcaccaggaagtaggaggaagagagaagaggaggcagggaaagtgggagggcactgatgagacatggacgtcttctggctgttggaatttccctgttcctgctgcaggaggccttaccaatattctgtcattcttccccctcttgtctgatataaaaactttctttttcttgtaattgctttcttacaaagtacactcatcagccccaagaggctgctcctaagacttctctttgcttgtgttttgcacacaatctgttccttctgcggcagagctggggtcaccagccctcatgtacttgtgacttctcccctgccacagggcccgaaagatccccatcatcattcgccgttacctgccagatgggagctatgaagactggggggtggacgagctcatca

SEQ ID NO: 458860 - DNA, 831 bp, Homo sapiens
  misc_feature (48)..(48): n is a, c, g, or t
  misc_feature (52)..(52): n is a, c, g, or t
  misc_feature (68)..(68): n is a, c, g, or t
gcctcgaaaccttccgcctcggaacgaaagccgggagagtttttacgngccngcaagtgccggcccanaaggaattgcgcaagataagctaggagccgcgcgagtcgtagtgtcgctgtttgcgggtctccgcgcgggaccggggcgcagcggggtcgctgaggcgagggtgtcatgtcagacaacgaggacaattttgatggcgacgactttgatgatgtggaggaggatgaagggctagatgacttggagaatgccgaagaggaaggccaggagaatgtcgagatcctcccctctggggagcgaccgcaggccaaccagaagcgaatcaccacaccatacatgaccaagtacgagcgagcccgcgtgctgggcacccgagcgctccagattgcgatgtgtgcccctgtgatggtggagctggagggggagacagatcctctgctcattgccatgaaggaactcaaggcccgaaagatccccatcatcattcgccgttacctgccagatgggagctatgaagactggggggtggacgagctcatcatcaccgactgagctggagtcatcttcctgcccttgccccatgcccaattttcattctcactttatatgtgtaaataataaaatattcaactttccaaaaaaaaaaaaaaaaagaaaagaaaaactgccggggacttataatgtgggggggggggaaaaacagggttgggaaggggccagtgggaataggggttcccgggcaccaggttttttgttccccaggggggaaattggcggggccccattatgaggggcggattatttggaaaacccggtacccggttg

SEQ ID NO: 458861 - DNA, 697 bp, Homo sapiens
  misc_feature (48)..(48): n is a, c, g, or t
  misc_feature (52)..(52): n is a, c, g, or t
  misc_feature (68)..(68): n is a, c, g, or t
gcctcgaaaccttccgcctcggaacgaaagccgggagagtttttacgngccngcaagtgccggcccanaaggaattgcgcaagataagctaggagccgcgcgagtcgtagtgtcgctgtttgcgggtctccgcgcgggaccggggcgcagcggggtcgctgaggcgagggtgtcatgtcagacaacgaggacaagtgagtgcgggagcggagtggcctttgcggcaaccttggaaggggcggatgagttttgatggcgacgactttgatgatgtggaggaggatgaagggctagatgacttggagaatgccgaagaggaaggccaggagaatgtcgagatcctcccctctggggagcgaccgcaggccaaccagaagcgaatcaccacaccatacatgaccaagtacgagcgagcccgcgtgctgggcacccgagcgctccagattgcgatgtgtgcccctgtgatggtggagctggagggggagacagatcctctgctcattgccatgaaggaactcaaggcccgaaagatccccatcatcattcgccgttacctgccagatgggagctatgaagactggggggtggacgagctcatcatcaccgactgagctggagtcatcttcctgcccttgccccatgcccaattttcattctcactttatatgtgtaaataataaaatattcaactttccaa

SEQ ID NO: 458862 - DNA, 2177 bp, Homo sapiens
  misc_feature (48)..(48): n is a, c, g, or t
  misc_feature (52)..(52): n is a, c, g, or t
  misc_feature (68)..(68): n is a, c, g, or t
gcctcgaaaccttccgcctcggaacgaaagccgggagagtttttacgngccngcaagtgccggcccanaaggaattgcgcaagataagctaggagccgcgcgagtcgtagtgtcgctgtttgcgggtctccgcgcgggaccggggcgcagcggggtcgctgaggcgagggtgtcatgtcagacaacgaggacaagtgagtgcgggagcggagtggcctttgcggcaaccttggaaggggcggatgagttttgatggcgacgactttgatgatgtggaggaggatgaagggctagatgacttggagaatgccgaagaggtcagtattcagcctcaggctcccacctctgcagcccaagctgccaaatcgtctgacaggaaggccaggagaatgtcgagcgctccagattgcgatgtgtgcccctgtgatggtggagctggagggggagacagatcctctgctcattgccatgaaggaactcaaggcccgaaagatccccatcatcattcgccgttacctgccagatgggagctatgaagactggggggtggacgagctcatcatcaccgactgagctggagtcatcttcctgcccttgccccatgcccaattttcattctcactttatatgtgtaaataataaaatattcaactttccaacaacccccttcccctctgcttatctgcaatgtcaccacctgttgcttccccgttaccgccatgctgcgtggagcatgcacctattccagtggccctgtgactgtcagctccttaagaagcaccaggggcccttagcccctttggatcccccacatccttccctccatctccctgttccccagagcaaaggctgctgcaggggagacacctcagctgccttccaagcagacagacaagtctttgtgcccagggagctggttgccacggaaacccccaatttcctttccagtggggactggctgcaggggcttctcccttctcaggagtatcacagagcaggtctcatcaagccacccattgtttcctaaggacctgcttcgagcctcttatcgtgggctcggatcccctttcaggagcagtgccccagcaggaagcgtgggggtgtgctgatctcccaccctccccaggcagagccctgctgggcaagtcagcagctggagcaaggaccgagcacctgcctacccctgcccccatggctctgtccccactcctcctcaggactctgcccacacgctgtcctctgtggcccacctctttggtgtgccacacccatgccttcttcctagcctctataagatatcctttccctcctatttggggctggtgatcccctgaggccttggggacatggtgctggggtggtggtgctcctgggttccaggtgttacattaagtcagagctggagttcccccttcctctgcctgaggttctaatgggtcctcttcctttctccaccctgcttacccaacctgaggtaagaccagtcacactggctcctccctcctagagggggtcagggggagggtgtatattgacatgaacagggatagagggtaaactggctccctgaatatgccagccttaacctccattccactgccagctccccttcaaagaggaggagctgggcttccctaacctctgcaggaggcagggcctccaggcctaggtgcagcctggccctgggatgggatgtggggagtgaatggtgaggatctgcattggtgggaggggtgtccgctgccctggagaagggttaattcagggagcagtggacttcacactcccatccaccctcctccaagcctgtggaatcctttaatcaagttgggtgctgaaatttcagctctgaaatgccgcctttgtgctggcatccaggcagccgccccagagtgcgggggtcactttctcggccccatttctctaaatggtctctttgttccctgctgggctgctcagtatcagatgtgattaaagggagatggggtttgggctggggaggaggggaattgggggttaacccttaggggatagagtgcaagggaaatgggacagaaggggtgtttttcctcctgtcttcctcttcccattctcctcttttggggagtcccctgctattcagctgtctgggcctggcttttgacttctcttgaataaaatgtcccggtcaccactat

SEQ ID NO: 458863 - DNA, 907 bp, Homo sapiens
actgaaaataattttgctctaccctctaatattctgctctgttaaaggaattttgagttaatttatttcccattttctcagtttaaattttttttttattttctgcagtaaaaactagattttcatatgcctttccaaaggaatttccttataggatgaatcatgtaagtatatgatataaaatggaacaattatcaaagctatatataaactagctctattttatattagactaaatttaatagtttcctagaaatggcagtttcaaatattacataaatacagacattattctaaattaaagctaaatagcttttaccatttaaaaaaaatacttcatagtggcgattatcaaccctggctgctcattaaatcaccttgggaacttgtaaataatactgatgttggatcctttccagaacaacaaaatcagaattttcagccttggggctcccaacattggtactgtgtaaaaggtcccaggtgatactactatttagctgggattaaaaactaatggaacaatatgaaatataaggtgaatttctattgacattttaataggtatgtcctttttccaccttgcaagggatttgtttattctctttaagttacattttttaaattaagtagaaataattgtatttttgcatttgctgagtagaaagtatactggaaaatctgatggttttacaggatattttaaataaaagtgagtaataagaatgattgtgagaagctggcttttccttacaaggattaaaatccttataatcataattgcatttctaatagtaattttttattgcagatatttattttaatataaactatgtttattgtctggatttttaaaactttttagtaaaaatttttgataaattactataatgtctgtaatttatgt

SEQ ID NO: 458864 - DNA, 484 bp, Homo sapiens
catacctatatatttcttaacacatttgcaaatcctagaattagaccactgtgactcacatagagcatgtgtaggttttttcctttgttaaaaatgaacataattatgatttaaccacatggaagttactgttcaatgttaatattataatgataccagaagatacatttaaaatttcattatttgccttttagttatccaagcattaggtgaacatcttaaattaagacaacaagttattgccactgctacggtatatttcaagagattctatgccaggtattctctgaaaagtatagatcctgtattaatggctcctacatgtgtgtttttggcatccaaagtagaggaatttggagtagtttcaaatacaagattgattgctgctgctacttctgtatgtaagtgcaaaaagtatatctgctttaaggatgtaattctaaagaaagctccagagtacatagatttttttttttttagttta

SEQ ID NO: 458865 - DNA, 2593 bp, Homo sapiens
tttttccctgagaacaaagtcatcttcatttatttctctttccaatcacaggaaaaataagtcacaaaaccttgtactttattacaatgccacattgttctgtttttgaagtcctggaagaggtaataacagaaccccgtatctgagccacttcgcctaggttagacccactcagcaactcccgtgctgaagacaggagaccgagcggcttgggcccccggccagaattctcaagacgctctcgcgagagccttccaaccgccgcgagctctcgtgaacactagttctcttcaatctcagcacctccaagggtcagcacctcccctccggctccctccgctaccgcgggccggaacttttgtcgataggaacgggtttgcacagttgagtgttgtcggccggcgtgaaggagactagggggccatcctcttcctttcgccgtcgccgccgcggagcggagtcgagccgagctgatttgatcgaggagcgcggttaccggacgggctgggtctatggtcgctccgcgggccgctccgccggctggtgcttttttatcagggcaagctgtgttccatggcagggaacttttggcagagctcccactatttgcaatggattttggataaacaagatctgttgaaggagcgccaaaaggatttaaagtttctctcagaggaagaatattggaagttacaaatattttttacaaatgttatccaagcattaggtgaacatcttaaattaagacaacaagttattgccactgctacggtatatttcaagagattctatgccaggtattctctgaaaagtatagatcctgtattaatggctcctacatgtgtgtttttggcatccaaagtagaggaatttggagtagtttcaaatacaagattgattgctgctgctacttctgtattaaaaactagattttcatatgcctttccaaaggaatttccttataggatgaatcatatattagaatgtgaattctatctgttagaactaatggattgttgcttgatagtgtatcatccttatagacctttgctccagtatgtgcaggacatgggccaagaagacatgttgcttccccttgcatggaggatagtgaatgatacctacagaacggatctttgcctactgtatcctcctttcatgatagctttagcttgcctacatgtagcctgtgttgtacagcagaaagatgccaggcaatggtttgctgagctttctgtggatatggaaaagattttggaaataatcagggttattttaaaactatatgagcagtggaagaatttcgatgagagaaaagagatggcaaccattcttagtaagatgccaaaaccaaaaccacctccaaacagtgaaggagagcagggtccaaatggaagtcagaactctagctacagccaatcttaaaacattccgaagaattccatagtggaccacttggaaataaaccattggacagatttcagtaatgtcttcagtggaacacaaatgaaaatgaatagcttgtttctgtcaagcatattggaaagtgattttatttttgcaaaataagtttttctttaatatgattctagtacataattgattaaaatctcttgattataaatgtttggaaaggttctaaggggacctacagacagacatacatagacatttcaaaattaatagcttttgattagtataatatttcttaatttggataataaaaattgtagctttttattaagccaggaaacatgaagcataatttgtttaaaattctctttggtcattgagggaccaaaaaaggacgtaaaatttacagtcaatctatgagggtttttttccctccataagtttaactttaaaactgtatttaaggaatcaaatcttacaaaatcctggaagattttggtaatgatgttgataatttcagggaaattaatcaagtacctatattgatttaaaagtgtattttattcagtagtttgaggatcttgccatggaagatactagcccagcctagcagaaaagtgcaatatgtatagcatactttgacattttaaacatgatagtccataaccattttgaaatgctgggcaaactacatgaagttatttataattaattcacagctaatcaggcattttgaaagcttaattggattcaaaaaccataatgttggaatttggtaaaattttaatgttgatttttactgtgaaaaggtttttataagatatacacaccctagtttaatgttgtgtcttggtgtggatttacagatttactacaggtattctgaaccaggaacacaatcaggtttcaggccagtttgatactggctgtccttaattctaatatgagagtaggacatcatactaaatgttatgtcagtgggactgtactgtctgtggaacttagcaaattaatcattttcttcagacttgaaggagagtgataaataaaatttggagtcataggatattgatgcacaatttaaggattaaacatttttaatcaattgtggatgatggcttattaaatgttgacttcctagtataaaactgcaagaataaaagtaacttctccagctgta

SEQ ID NO: 458866 - DNA, 2539 bp, Homo sapiens
tttttccctgagaacaaagtcatcttcatttatttctctttccaatcacaggaaaaataagtcacaaaaccttgtactttattacaatgccacattgttctgtttttgaagtcctggaagaggtaataacagaaccccgtatctgagccacttcgcctaggttagacccactcagcaactcccgtgctgaagacaggagaccgagcggcttgggcccccggccagaattctcaagacgctctcgcgagagccttccaaccgccgcgagctctcgtgaacactagttctcttcaatctcagcacctccaagggtcagcacctcccctccggctccctccgctaccgcgggccggaacttttgtcgataggaacgggtttgcacagttgagtgttgtcggccggcgtgaaggagactagggggccatcctcttcctttcgccgtcgccgccgcggagcggagtcgagccgagctgatttgatcgaggagcgcggttaccggacgggctgggtctatggtcgctccgcgggccgctccgccggctggtgcttttttatcagggcaagctgtgttccatggcagggaacttttggcagagctcccactatttgcaatggattttggataaacaagatctgttgaaggagcgccaaaaggatttaaagtttctctcagaggaagaatattggaagttacaaatattttttacaaatgttatccaagcattaggtgaacatcttaaattaagacaacaagttattgccactgctacggtatatttcaagagattctatgccaggtattctctgaaaagtatagatcctgtattaatggctcctacatgtgtgtttttggcatccaaagtagaggaatttggagtagtttcaaatacaagattgattgctgctgctacttctgtattaaaaactagattttcatatgcctttccaaaggaatttccttataggatgaatcatatattagaatgtgaattctatctgttagaactaatggattgttgcttgatagtgtatcatccttatagacctttgctccagtatgtgcaggacatgggccaagaagacatgttgcttccccttgcatggaggatagtgaatgatacctacagaacggatctttgcctactgtatcctcctttcatgatagctttagcttgcctacatgtagcctgtgttgtacagcagaaagatgccaggcaatggtttgctgagctttctgtggatatggaaaagattttggaaataatcagggttattttaaaactatatgagcagtggaagaatttcgatgagagaaaagagatggcaaccattcttagtaagatgccaaaaccaaaaccacctccaaacagtgaaggagagcagggtccaaatggaagtcagaactctagctacagccaatcttaaaacattccgaagaattccatagtggaccacttggaaataaaccattggacagatttcagtaatgtcttcagtggaacacaaatgaaaatgaatagcttgtttctgtcaagcatattggaaagtgattttatttttgcaaaataagtttttctttaatatgattctagtacataattgattaaaatctcttgattataaatgtttggaaaggttctaaggggacctacagacagacatacatagacatttcaaaattaatagcttttgattagtataatatttcttaatttggataataaaaattgtagctttttattaagccaggaaacatgaagcataatttgtttaaaattctctttggtcattgagggaccaaaaaaggacgtaaaatttacagtcaatctatgagggtttttttccctccataagtttaactttaaaactgtatttaaggaatcaaatcttacaaaatcctggaagattttggtaatgatgttgataatttcagggaaattaatcaagtacctatattgatttaaaagtgtattttattcagtagtttgaggatcttgccatggaagatactagcccagcctagcagcattttgaaatgctgggcaaactacatgaagttatttataattaattcacagctaatcaggcattttgaaagcttaattggattcaaaaaccataatgttggaatttggtaaaattttaatgttgatttttactgtgaaaaggtttttataagatatacacaccctagtttaatgttgtgtcttggtgtggatttacagatttactacaggtattctgaaccaggaacacaatcaggtttcaggccagtttgatactggctgtccttaattctaatatgagagtaggacatcatactaaatgttatgtcagtgggactgtactgtctgtggaacttagcaaattaatcattttcttcagacttgaaggagagtgataaataaaatttggagtcataggatattgatgcacaatttaaggattaaacatttttaatcaattgtggatgatggcttattaaatgttgacttcctagtataaaactgcaagaataaaagtaacttctccagctgta

SEQ ID NO: 458867 - DNA, 2539 bp, Homo sapiens
tttttccctgagaacaaagtcatcttcatttatttctctttccaatcacaggaaaaataagtcacaaaaccttgtactttattacaatgccacattgttctgtttttgaagtcctggaagaggtaataacagaaccccgtatctgagccacttcgcctaggttagacccactcagcaactcccgtgctgaagacaggagaccgagcggcttgggcccccggccagaattctcaagacgctctcgcgagagccttccaaccgccgcgagctctcgtgaacactagttctcttcaatctcagcacctccaagggtcagcacctcccctccggctccctccgctaccgcgggccggaacttttgtcgataggaacgggtttgcacagttgagtgttgtcggccggcgtgaaggagactagggggccatcctcttcctttcgccgtcgccgccgcggagcggagtcgagccgagctgatttgatcgaggagcgcggttaccggacgggctgggtctatggtcgctccgcgggccgctccgccggctggtgcttttttatcagggcaagctgtgttccatggcagggaacttttggcagagctcccactatttgcaatggattttggataaacaagatctgttgaaggagcgccaaaaggatttaaagtttctctcagaggaagaatattggaagttacaaatattttttacaaatgttatccaagcattaggtgaacatcttaaattaagacaacaagttattgccactgctacggtatatttcaagagattctatgccaggtattctctgaaaagtatagatcctgtattaatggctcctacatgtgtgtttttggcatccaaagtagaggaatttggagtagtttcaaatacaagattgattgctgctgctacttctgtattaaaaactagattttcatatgcctttccaaaggaatttccttataggatgaatcatatattagaatgtgaattctatctgttagaactaatggattgttgcttgatagtgtatcatccttatagacctttgctccagtatgtgcaggacatgggccaagaagacatgttgcttccccttgcatggaggatagtgaatgatacctacagaacggatctttgcctactgtatcctcctttcatgatagctttagcttgcctacatgtagcctgtgttgtacagcagaaagatgccaggcaatggtttgctgagctttctgtggatatggaaaagattttggaaataatcagggttattttaaaactatatgagcagtggaagaatttcgatgagagaaaagagatggcaaccattcttagtaagatgccaaaaccaaaaccacctccaaacagtgaaggagagcagggtccaaatggaagtcagaactctagctacagccaatcttaaaacattccgaagaattccatagtggaccacttggaaataaaccattggacagatttcagtaatgtcttcagtggaacacaaatgaaaatgaatagcttgtttctgtcaagcatattggaaagtgattttatttttgcaaaataagtttttctttaatatgattctagtacataattgattaaaatctcttgattataaatgtttggaaaggttctaaggggacctacagacagacatacatagacatttcaaaattaatagcttttgattagtataatatttcttaatttggataataaaaattgtagctttttattaagccaggaaacatgaagcataatttgtttaaaattctctttggtcattgagggaccaaaaaaggacgtaaaatttacagtcaatctatgagggtttttttccctccataagtttaactttaaaactgtatttaaggaatcaaatcttacaaaatcctggaagattttggtaatgatgttgataatttcagggaaattaatcaagtacctatattgatttaaaagtgtattttattcagtagtttgaggatcttgccatggaagatactagcccagcctagcagaaaagtgcaatatgtatagcatactttgacattttaaacatgatagtccataaccattttgaaatgctgggcaaactacatgaagttatttataattaattcacagctaatcaggcattttgaaagcttaattggattcaaaaaccataatgttggaatttggtaaaattttaatgttgatttttactgtgatttacagatttactacaggtattctgaaccaggaacacaatcaggtttcaggccagtttgatactggctgtccttaattctaatatgagagtaggacatcatactaaatgttatgtcagtgggactgtactgtctgtggaacttagcaaattaatcattttcttcagacttgaaggagagtgataaataaaatttggagtcataggatattgatgcacaatttaaggattaaacatttttaatcaattgtggatgatggcttattaaatgttgacttcctagtataaaactgcaagaataaaagtaacttctccagctgta

SEQ ID NO: 458868 - DNA, 2495 bp, Homo sapiens
tttttccctgagaacaaagtcatcttcatttatttctctttccaatcacaggaaaaataagtcacaaaaccttgtactttattacaatgccacattgttctgtttttgaagtcctggaagaggtaataacagaaccccgtatctgagccacttcgcctaggttagacccactcagcaactcccgtgctgaagacaggagaccgagcggcttgggcccccggccagaattctcaagacgctctcgcgagagccttccaaccgccgcgagctctcgtgaacactagttctcttcaatctcagcacctccaagggtcagcacctcccctccggctccctccgctaccgcgggccggaacttttgtcgataggaacgggtttgcacagttgagtgttgtcggccggcgtgaaggagactagggggccatcctcttcctttcgccggctggtgcttttttatcagggcaagctgtgttccatggcagggaacttttggcagagctcccactatttgcaatggattttggataaacaagatctgttgaaggagcgccaaaaggatttaaagtttctctcagaggaagaatattggaagttacaaatattttttacaaatgttatccaagcattaggtgaacatcttaaattaagacaacaagttattgccactgctacggtatatttcaagagattctatgccaggtattctctgaaaagtatagatcctgtattaatggctcctacatgtgtgtttttggcatccaaagtagaggaatttggagtagtttcaaatacaagattgattgctgctgctacttctgtattaaaaactagattttcatatgcctttccaaaggaatttccttataggatgaatcatatattagaatgtgaattctatctgttagaactaatggattgttgcttgatagtgtatcatccttatagacctttgctccagtatgtgcaggacatgggccaagaagacatgttgcttccccttgcatggaggatagtgaatgatacctacagaacggatctttgcctactgtatcctcctttcatgatagctttagcttgcctacatgtagcctgtgttgtacagcagaaagatgccaggcaatggtttgctgagctttctgtggatatggaaaagattttggaaataatcagggttattttaaaactatatgagcagtggaagaatttcgatgagagaaaagagatggcaaccattcttagtaagatgccaaaaccaaaaccacctccaaacagtgaaggagagcagggtccaaatggaagtcagaactctagctacagccaatcttaaaacattccgaagaattccatagtggaccacttggaaataaaccattggacagatttcagtaatgtcttcagtggaacacaaatgaaaatgaatagcttgtttctgtcaagcatattggaaagtgattttatttttgcaaaataagtttttctttaatatgattctagtacataattgattaaaatctcttgattataaatgtttggaaaggttctaaggggacctacagacagacatacatagacatttcaaaattaatagcttttgattagtataatatttcttaatttggataataaaaattgtagctttttattaagccaggaaacatgaagcataatttgtttaaaattctctttggtcattgagggaccaaaaaaggacgtaaaatttacagtcaatctatgagggtttttttccctccataagtttaactttaaaactgtatttaaggaatcaaatcttacaaaatcctggaagattttggtaatgatgttgataatttcagggaaattaatcaagtacctatattgatttaaaagtgtattttattcagtagtttgaggatcttgccatggaagatactagcccagcctagcagaaaagtgcaatatgtatagcatactttgacattttaaacatgatagtccataaccattttgaaatgctgggcaaactacatgaagttatttataattaattcacagctaatcaggcattttgaaagcttaattggattcaaaaaccataatgttggaatttggtaaaattttaatgttgatttttactgtgaaaaggtttttataagatatacacaccctagtttaatgttgtgtcttggtgtggatttacagatttactacaggtattctgaaccaggaacacaatcaggtttcaggccagtttgatactggctgtccttaattctaatatgagagtaggacatcatactaaatgttatgtcagtgggactgtactgtctgtggaacttagcaaattaatcattttcttcagacttgaaggagagtgataaataaaatttggagtcataggatattgatgcacaatttaaggattaaacatttttaatcaattgtggatgatggcttattaaatgttgacttcctagtataaaactgcaagaataaaagtaacttctccagctgta

SEQ ID NO: 458869 - DNA, 2371 bp, Homo sapiens
tttttccctgagaacaaagtcatcttcatttatttctctttccaatcacaggaaaaataagtcacaaaaccttgtactttattacaatgccacattgttctgtttttgaagtcctggaagaggtaataacagaaccccgtatctgagccacttcgcctaggttagacccactcagcaactcccgtgctgaagacaggagaccgagcggcttgggcccccggccagaattctcaagacgctctcgcgagagccttccaaccgccgcgagctctcgtgaacactagttctcttcaatctcagcacctccaagggtcagcacctcccctccggctccctccgctaccgcgggccggaacttttgtcgataggaacgggtttgcacatttgcaatggattttggataaacaagatctgttgaaggagcgccaaaaggatttaaagtttctctcagaggaagaatattggaagttacaaatattttttacaaatgttatccaagcattaggtgaacatcttaaattaagacaacaagttattgccactgctacggtatatttcaagagattctatgccaggtattctctgaaaagtatagatcctgtattaatggctcctacatgtgtgtttttggcatccaaagtagaggaatttggagtagtttcaaatacaagattgattgctgctgctacttctgtattaaaaactagattttcatatgcctttccaaaggaatttccttataggatgaatcatatattagaatgtgaattctatctgttagaactaatggattgttgcttgatagtgtatcatccttatagacctttgctccagtatgtgcaggacatgggccaagaagacatgttgcttccccttgcatggaggatagtgaatgatacctacagaacggatctttgcctactgtatcctcctttcatgatagctttagcttgcctacatgtagcctgtgttgtacagcagaaagatgccaggcaatggtttgctgagctttctgtggatatggaaaagattttggaaataatcagggttattttaaaactatatgagcagtggaagaatttcgatgagagaaaagagatggcaaccattcttagtaagatgccaaaaccaaaaccacctccaaacagtgaaggagagcagggtccaaatggaagtcagaactctagctacagccaatcttaaaacattccgaagaattccatagtggaccacttggaaataaaccattggacagatttcagtaatgtcttcagtggaacacaaatgaaaatgaatagcttgtttctgtcaagcatattggaaagtgattttatttttgcaaaataagtttttctttaatatgattctagtacataattgattaaaatctcttgattataaatgtttggaaaggttctaaggggacctacagacagacatacatagacatttcaaaattaatagcttttgattagtataatatttcttaatttggataataaaaattgtagctttttattaagccaggaaacatgaagcataatttgtttaaaattctctttggtcattgagggaccaaaaaaggacgtaaaatttacagtcaatctatgagggtttttttccctccataagtttaactttaaaactgtatttaaggaatcaaatcttacaaaatcctggaagattttggtaatgatgttgataatttcagggaaattaatcaagtacctatattgatttaaaagtgtattttattcagtagtttgaggatcttgccatggaagatactagcccagcctagcagaaaagtgcaatatgtatagcatactttgacattttaaacatgatagtccataaccattttgaaatgctgggcaaactacatgaagttatttataattaattcacagctaatcaggcattttgaaagcttaattggattcaaaaaccataatgttggaatttggtaaaattttaatgttgatttttactgtgaaaaggtttttataagatatacacaccctagtttaatgttgtgtcttggtgtggatttacagatttactacaggtattctgaaccaggaacacaatcaggtttcaggccagtttgatactggctgtccttaattctaatatgagagtaggacatcatactaaatgttatgtcagtgggactgtactgtctgtggaacttagcaaattaatcattttcttcagacttgaaggagagtgataaataaaatttggagtcataggatattgatgcacaatttaaggattaaacatttttaatcaattgtggatgatggcttattaaatgttgacttcctagtataaaactgcaagaataaaagtaacttctccagctgta

SEQ ID NO: 458870 - DNA, 2537 bp, Homo sapiens
tttttccctgagaacaaagtcatcttcatttatttctctttccaatcacaggaaaaataagtcacaaaaccttgtactttattacaatgccacattgttctgtttttgaagtcctggaagaggtaataacagaaccccgtatctgagccacttcgcctaggttagacccactcagcaactcccgtgctgaagacaggagaccgagcggcttgggcccccggccagaattctcaagacgctctcgcgagagccttccaaccgccgcgagctctcgtgaacactagttctcttcaatctcagcacctccaagggtcagcacctcccctccggctccctccgctaccgcgggccggaacttttgtcgataggaacgggtttgcacagttgagtgttgtcggccggcgtgaaggagactagggggccatcctcttcctttcgccgtcgccgccgcggagcggagtcgagccgagctgatttgatcgaggagcgcggttaccggacgggctgggtctatggtcgctccgcgggccgctccgccggctggtgcttttttatcagggcaagctgtgttccatggcagggaacttttggcagagctcccactatttgcaatggattttggataaacaagatctgttgaaggagcgccaaaaggatttaaagtttctctcagaggaagaatattggaagttacaaatattttttacaaatgttatccaagcattaggtgaacatcttaaattaagacaacaagttattgccactgctacggtatatttcaagagattctatgccaggtattctctgaaaagtatagatcctgtattaatggctcctacatgtgtgtttttggcatccaaagtagaggaatttggagtagtttcaaatacaagattgattgctgctgctacttctgtatatattagaatgtgaattctatctgttagaactaatggattgttgcttgatagtgtatcatccttatagacctttgctccagtatgtgcaggacatgggccaagaagacatgttgcttccccttgcatggaggatagtgaatgatacctacagaacggatctttgcctactgtatcctcctttcatgatagctttagcttgcctacatgtagcctgtgttgtacagcagaaagatgccaggcaatggtttgctgagctttctgtggatatggaaaagattttggaaataatcagggttattttaaaactatatgagcagtggaagaatttcgatgagagaaaagagatggcaaccattcttagtaagatgccaaaaccaaaaccacctccaaacagtgaaggagagcagggtccaaatggaagtcagaactctagctacagccaatcttaaaacattccgaagaattccatagtggaccacttggaaataaaccattggacagatttcagtaatgtcttcagtggaacacaaatgaaaatgaatagcttgtttctgtcaagcatattggaaagtgattttatttttgcaaaataagtttttctttaatatgattctagtacataattgattaaaatctcttgattataaatgtttggaaaggttctaaggggacctacagacagacatacatagacatttcaaaattaatagcttttgattagtataatatttcttaatttggataataaaaattgtagctttttattaagccaggaaacatgaagcataatttgtttaaaattctctttggtcattgagggaccaaaaaaggacgtaaaatttacagtcaatctatgagggtttttttccctccataagtttaactttaaaactgtatttaaggaatcaaatcttacaaaatcctggaagattttggtaatgatgttgataatttcagggaaattaatcaagtacctatattgatttaaaagtgtattttattcagtagtttgaggatcttgccatggaagatactagcccagcctagcagaaaagtgcaatatgtatagcatactttgacattttaaacatgatagtccataaccattttgaaatgctgggcaaactacatgaagttatttataattaattcacagctaatcaggcattttgaaagcttaattggattcaaaaaccataatgttggaatttggtaaaattttaatgttgatttttactgtgaaaaggtttttataagatatacacaccctagtttaatgttgtgtcttggtgtggatttacagatttactacaggtattctgaaccaggaacacaatcaggtttcaggccagtttgatactggctgtccttaattctaatatgagagtaggacatcatactaaatgttatgtcagtgggactgtactgtctgtggaacttagcaaattaatcattttcttcagacttgaaggagagtgataaataaaatttggagtcataggatattgatgcacaatttaaggattaaacatttttaatcaattgtggatgatggcttattaaatgttgacttcctagtataaaactgcaagaataaaagtaacttctccagctgta

SEQ ID NO: 458871 - DNA, 1562 bp, Homo sapiens
ctctctggaggaaatatacaatcagatgaggtagttctgctttcagtaataatatgatttacatttctataggaggatagtgaatgatacctacagaacggatctttgcctactgtatcctcctttcatgatagctttagcttgcctacatgtagcctgtgttgtacagcagaaagatgccaggcaatggtttgctgagctttctgtggatatggaaaagattttggaaataatcagggttattttaaaactatatgagcagtggaagaatttcgatgagagaaaagagatggcaaccattcttagtaagatgccaaaaccaaaaccacctccaaacagtgaaggagagcagggtccaaatggaagtcagaactctagctacagccaatcttaaaacattccgaagaattccatagtggaccacttggaaataaaccattggacagatttcagtaatgtcttcagtggaacacaaatgaaaatgaatagcttgtttctgtcaagcatattggaaagtgattttatttttgcaaaataagtttttctttaatatgattctagtacataattgattaaaatctcttgattataaatgtttggaaaggttctaaggggacctacagacagacatacatagacatttcaaaattaatagcttttgattagtataatatttcttaatttggataataaaaattgtagctttttattaagccaggaaacatgaagcataatttgtttaaaattctctttggtcattgagggaccaaaaaaggacgtaaaatttacagtcaatctatgagggtttttttccctccataagtttaactttaaaactgtatttaaggaatcaaatcttacaaaatcctggaagattttggtaatgatgttgataatttcagggaaattaatcaagtacctatattgatttaaaagtgtattttattcagtagtttgaggatcttgccatggaagatactagcccagcctagcagaaaagtgcaatatgtatagcatactttgacattttaaacatgatagtccataaccattttgaaatgctgggcaaactacatgaagttatttataattaattcacagctaatcaggcattttgaaagcttaattggattcaaaaaccataatgttggaatttggtaaaattttaatgttgatttttactgtgaaaaggtttttataagatatacacaccctagtttaatgttgtgtcttggtgtggatttacagatttactacaggtattctgaaccaggaacacaatcaggtttcaggccagtttgatactggctgtccttaattctaatatgagagtaggacatcatactaaatgttatgtcagtgggactgtactgtctgtggaacttagcaaattaatcattttcttcagacttgaaggagagtgataaataaaatttggagtcataggatattgatgcacaatttaaggattaaacatttttaatcaattgtggatgatggcttattaaatgttgacttcctagtataaaactgcaagaataaaagtaacttctccagctgta

SEQ ID NO: 458872 - DNA, 1416 bp, Homo sapiens
  misc_feature (35)..(36): n is a, c, g, or t
atatcattaaaaacaaattggcagaggaaggaganncctagttggtgacgacctcttaatttccaccgctacacattttggaaataatcagggttattttaaaactatatgagcagtggaagaatttcgatgagagaaaagagatggcaaccattcttagtaagatgccaaaaccaaaaccacctccaaacagtgaaggagagcagggtccaaatggaagtcagaactctagctacagccaatcttaaaacattccgaagaattccatagtggaccacttggaaataaaccattggacagatttcagtaatgtcttcagtggaacacaaatgaaaatgaatagcttgtttctgtcaagcatattggaaagtgattttatttttgcaaaataagtttttctttaatatgattctagtacataattgattaaaatctcttgattataaatgtttggaaaggttctaaggggacctacagacagacatacatagacatttcaaaattaatagcttttgattagtataatatttcttaatttggataataaaaattgtagctttttattaagccaggaaacatgaagcataatttgtttaaaattctctttggtcattgagggaccaaaaaaggacgtaaaatttacagtcaatctatgagggtttttttccctccataagtttaactttaaaactgtatttaaggaatcaaatcttacaaaatcctggaagattttggtaatgatgttgataatttcagggaaattaatcaagtacctatattgatttaaaagtgtattttattcagtagtttgaggatcttgccatggaagatactagcccagcctagcagaaaagtgcaatatgtatagcatactttgacattttaaacatgatagtccataaccattttgaaatgctgggcaaactacatgaagttatttataattaattcacagctaatcaggcattttgaaagcttaattggattcaaaaaccataatgttggaatttggtaaaattttaatgttgatttttactgtgaaaaggtttttataagatatacacaccctagtttaatgttgtgtcttggtgtggatttacagatttactacaggtattctgaaccaggaacacaatcaggtttcaggccagtttgatactggctgtccttaattctaatatgagagtaggacatcatactaaatgttatgtcagtgggactgtactgtctgtggaacttagcaaattaatcattttcttcagacttgaaggagagtgataaataaaatttggagtcataggatattgatgcacaatttaaggattaaacatttttaatcaattgtggatgatggcttattaaatgttgacttcctagtataaaactgcaagaataaaagtaacttctccagctgta

SEQ ID NO: 458873 - DNA, 1337 bp, Homo sapiens
ttgttttgtatagttgtgccacagaataatgaatttaaaagtcagtaggcttatcagggtgtaaaaatggatcttttaattggtataaaatctctttcttccccatttgaacagtgaaggagagcagggtccaaatggaagtcagaactctagctacagccaatcttaaaacattccgaagaattccatagtggaccacttggaaataaaccattggacagatttcagtaatgtcttcagtggaacacaaatgaaaatgaatagcttgtttctgtcaagcatattggaaagtgattttatttttgcaaaataagtttttctttaatatgattctagtacataattgattaaaatctcttgattataaatgtttggaaaggttctaaggggacctacagacagacatacatagacatttcaaaattaatagcttttgattagtataatatttcttaatttggataataaaaattgtagctttttattaagccaggaaacatgaagcataatttgtttaaaattctctttggtcattgagggaccaaaaaaggacgtaaaatttacagtcaatctatgagggtttttttccctccataagtttaactttaaaactgtatttaaggaatcaaatcttacaaaatcctggaagattttggtaatgatgttgataatttcagggaaattaatcaagtacctatattgatttaaaagtgtattttattcagtagtttgaggatcttgccatggaagatactagcccagcctagcagaaaagtgcaatatgtatagcatactttgacattttaaacatgatagtccataaccattttgaaatgctgggcaaactacatgaagttatttataattaattcacagctaatcaggcattttgaaagcttaattggattcaaaaaccataatgttggaatttggtaaaattttaatgttgatttttactgtgaaaaggtttttataagatatacacaccctagtttaatgttgtgtcttggtgtggatttacagatttactacaggtattctgaaccaggaacacaatcaggtttcaggccagtttgatactggctgtccttaattctaatatgagagtaggacatcatactaaatgttatgtcagtgggactgtactgtctgtggaacttagcaaattaatcattttcttcagacttgaaggagagtgataaataaaatttggagtcataggatattgatgcacaatttaaggattaaacatttttaatcaattgtggatgatggcttattaaatgttgacttcctagtataaaactgcaagaataaaagtaacttctccagctgta

SEQ ID NO: 458874 - DNA, 1182 bp, Homo sapiens
cactatggaattcttcggaatgttttaagattggctgtagctagagttctgacttccattggacagatttcagtaatgtcttcagtggaacacaaatgaaaatgaatagcttgtttctgtcaagcatattggaaagtgattttatttttgcaaaataagtttttctttaatatgattctagtacataattgattaaaatctcttgattataaatgtttggaaaggttctaaggggacctacagacagacatacatagacatttcaaaattaatagcttttgattagtataatatttcttaatttggataataaaaattgtagctttttattaagccaggaaacatgaagcataatttgtttaaaattctctttggtcattgagggaccaaaaaaggacgtaaaatttacagtcaatctatgagggtttttttccctccataagtttaactttaaaactgtatttaaggaatcaaatcttacaaaatcctggaagattttggtaatgatgttgataatttcagggaaattaatcaagtacctatattgatttaaaagtgtattttattcagtagtttgaggatcttgccatggaagatactagcccagcctagcagaaaagtgcaatatgtatagcatactttgacattttaaacatgatagtccataaccattttgaaatgctgggcaaactacatgaagttatttataattaattcacagctaatcaggcattttgaaagcttaattggattcaaaaaccataatgttggaatttggtaaaattttaatgttgatttttactgtgaaaaggtttttataagatatacacaccctagtttaatgttgtgtcttggtgtggatttacagatttactacaggtattctgaaccaggaacacaatcaggtttcaggccagtttgatactggctgtccttaattctaatatgagagtaggacatcatactaaatgttatgtcagtgggactgtactgtctgtggaacttagcaaattaatcattttcttcagacttgaaggagagtgataaataaaatttggagtcataggatattgatgcacaatttaaggattaaacatttttaatcaattgtggatgatggcttattaaatgttgacttcctagtataaaactgcaagaataaaagtaacttctccagctgta

SEQ ID NO: 458875 - DNA, 1718 bp, Homo sapiens
tttttccctgagaacaaagtcatcttcatttatttctctttccaatcacaggaaaaataagtcacaaaaccttgtactttattacaatgccacattgttctgtttttgaagtcctggaagaggtaataacagaaccccgtatctgagccacttcgcctaggttagacccactcagcaactcccgtgctgaagacaggagaccgagcggcttgggcccccggccagaattctcaagacgctctcgcgagagccttccaaccgccgcgagctctcgtgaacactagttctcttcaatctcagcacctccaagggtcagcacctcccctccggctccctccgctaccgcgggccggaacttttgtcgataggaacgggtttgcacagttgagtgttgtcggccggcgtgaaggagactagggggccatcctcttcctttcgccgtcgccgccgcggagcggagtcgagccgagctgatttgatcgaggagcgcggttaccggacgggctgggtctatggtcgctccgcgggccgctccgccggctggtgcttttttatcagggcaagctgtgttccatggcagggaacttttggcagagctcccactatttgcaatggattttggataaacaagatctgttgaaggagcgccaaaaggatttaaagtttctctcagaggaagaatattggaagttacaaatattttttacaaatgttatccaagcattaggtgaacatcttaaattaagacaacaagttattgccactgctacggtatatttcaagagattctatgccaggtattctctgaaaagtatagatcctgtattaatggctcctacatgtgtgtttttggcatccaaagtagaggaatttggagtagtttcaaatacaagattgattgctgctgctacttctgtattaaaaactagattttcatatgcctttccaaaggaatttccttataggatgaatcatgtaagtatatgatataaaatggaacaattatcaaagctatatataaactagctctattttatattagactaaatttaatagtttcctagaaatggcagtttcaaatattacataaatacagacattattctaaattaaagctaaatagcttttaccatttaaaaaaaatacttcatagtggcgattatcaaccctggctgctcattaaatcaccttgggaacttgtaaataatactgatgttggatcctttccagaacaacaaaatcagaattttcagccttggggctcccaacattggtactgtgtaaaaggtcccaggtgatactactatttagctgggattaaaaactaatggaacaatatgaaatataaggtgaatttctattgacattttaataggtatgtcctttttccaccttgcaagggatttgtttattctctttaagttacattttttaaattaagtagaaataattgtatttttgcatttgctgagtagaaagtatactggaaaatctgatggttttacaggatattttaaataaaagtgagtaataagaatgattgtgagaagctggcttttccttacaaggattaaaatccttataatcataattgcatttctaatagtaattttttattgcagatatttattttaatataaactatgtttattgtctggatttttaaaactttttagtaaaaatttttgataaattactataatgtctgtaatttatgt

SEQ ID NO: 458876 - DNA, 781 bp, Homo sapiens
tttttccctgagaacaaagtcatcttcatttatttctctttccaatcacaggaaaaataagtcacaaaaccttgtactttattacaatgccacattgttctgtttttgaagtcctggaagaggtaataacagaaccccgtatctgagccacttcgcctaggttagacccactcagcaactcccgtgctgaagacaggagaccgagcggcttgggcccccggccagaattctcaagacgctctcgcgagagccttccaaccgccgcgagctctcgtgaacactagttctcttcaatctcagcacctccaagggtcagcacctcccctccggctccctccgctaccgcgggccggaacttttgtcgataggaacgggtttgcacagttgagtgttgtcggccggcgtgaaggagactagggggccatcctcttcctttcgccgtcgccgccgcggagcggagtcgagccgagctgatttgatcgaggagcgcggttaccggacgggctgggtctatggtcgctccgcgggccgctccgccggctggtgcttttttatcagggcaagctgtgttccatggcagggaacttttggcagagctcccactatttgcaatggattttggataaacaagatctgttgaaggagcgccaaaaggatttaaagtttctctcagaggaagaatattggaagttacaaatattttttacaaatggtaaacttttttaaaaattggttcaaattgtatagttggttacctctgaataaaaatgtttttgtgtgg

SEQ ID NO: 458877 - DNA, 344 bp, Homo sapiens
gaacatcttaaattaagacaacaagttattgccactgctacggtatatttcaagagattctatgccaggtaggattgtttttattttatttatttgaactcttatctaatgttgatgaaccttagcacagtgtaaatgaatcatgtgtctaccatagagttatcttgatttttttcccagtgtgttttctgtatgaatgatatttaactttgttttatcatattttaggtattctctgaaaagtatagatcctgtattaatggctcctacatgtgtgtttttggcatccaaagtagaggtataaaacaattttctgttcttcatcaaagacgtagaaagtgtat

SEQ ID NO: 458878 - DNA, 2740 bp, Homo sapiens
tttttccctgagaacaaagtcatcttcatttatttctctttccaatcacaggaaaaataagtcacaaaaccttgtactttattacaatgccacattgttctgtttttgaagtcctggaagaggtaataacagaaccccgtatctgagccacttcgcctaggttagacccactcagcaactcccgtgctgaagacaggagaccgagcggcttgggcccccggccagaattctcaagacgctctcgcgagagccttccaaccgccgcgagctctcgtgaacactagttctcttcaatctcagcacctccaagggtcagcacctcccctccggctccctccgctaccgcgggccggaacttttgtcgataggaacgggtttgcacagttgagtgttgtcggccggcgtgaaggagactagggggccatcctcttcctttcgccgtcgccgccgcggagcggagtcgagccgagctgatttgatcgaggagcgcggttaccggacgggctgggtctatggtcgctccgcgggccgctccgccggctggtgcttttttatcagggcaagctgtgttccatggcagggaacttttggcagagctcccactatttgcaatggattttggataaacaagatctgttgaaggagcgccaaaaggatttaaagtttctctcagaggaagaatattggaagttacaaatattttttacaaatgttatccaagcattaggtgaacatcttaaattaagacaacaagttattgccactgctacggtatatttcaagagattctatgccaggtattctctgaaaagtatagatcctgtattaatggctcctacatgtgtgtttttggcatccaaagtagaggaatttggagtagtttcaaatacaagattgattgctgctgctacttctgtattaaaaactagattttcatatgcctttccaaaggaatttccttataggatgaatcatatattagaatgtgaattctatctgttagaactaatggattgttgcttgatagtgtatcatccttatagacctttgctccagtatgtgcaggacatgggccaagaagacatgttgcttccccttgcatggaggatagtgaatgatacctacagaacggatctttgcctactgtatcctcctttcatgatagctttagcttgcctacatgtagcctgtgttgtacagcagaaagatgccaggcaatggtttgctgagctttctgtggatatggaaaagattttggaaataatcagggttattttaaaactatatgagcagtggaagaatttcgatgagagaaaagagatggcaaccattcttagtaagatgccaaaaccaaaaccacctccaaacagtgaaggagagcagggtccaaatggaagtcagaactctagctacagccaatcttaaaacattccgaagaattccatagtggaccacttggaaataaaccattggacagatttcagtaatgtcttcagtggaacacaaatgaaaatgaatagcttgtttctgtcaagcatattggaaagtgattttatttttgcaaaataagtttttctttaatatgattctagtacataattgattaaaatctcttgattataaatgtttggaaaggttctaaggggacctacagacagacatacatagacatttcaaaattaatagcttttgattagtataatatttcttaatttggataataaaaattgtagctttttattaagccaggaaacatgaagcataatttgtttaaaattctctttggtcattgagggaccaaaaaaggacgtaaaatttacagtcaatctatgagggtttttttccctccataagtttaactttaaaactgtatttaaggaatcaaatcttacaaaatcctggaagattttggtaatgatgttgataatttcagggaaattaatcaagtacctatattgatttaaaagtgtattttattcagtagtttgaggatcttgccatggaagatactagcccagcctagcagaaaagtgcaatatgtatagcatactttgacattttaaacatgatagtccataaccattttgaaatgctgggcaaactacatgaagttatttataattaattcacagctaatcaggcattttgaaagcttaattggattcaaaaaccataatgttggaatttggtaaaattttaatgttgatttttactgtgaaaaggtttttataagatatacacaccctagtttaatgttgtgtcttggtgtggatttacagatttactacaggtattctgaaccaggaacacaatcaggtttcaggccagtttgatactggctgtccttaattctaatatgagagtaggacatcatactaaatgttatgtcagtgggactgtactgtctgtggaacttagcaaattaatcattttcttcagacttgaaggagagtgataaataaaatttggagtcataggatattgatgcacaatttaaggattaaacatttttaatcaattgtggatgatggcttattaaatgttgacttcctagtataaaactgcaagaataaaagtaacttctccagctgtaaaaaaaaaagtcttgaatttatctttttgaatttgcctgatgttgttttttgagaattcttcttcctttagttaagtgttaaagccttttataggttgtcaagggggtaatttcaaatcattacaaacagattttaaatagaaaatt

SEQ ID NO: 458879 - DNA, 2661 bp, Homo sapiens
tttttccctgagaacaaagtcatcttcatttatttctctttccaatcacaggaaaaataagtcacaaaaccttgtactttattacaatgccacattgttctgtttttgaagtcctggaagaggtaataacagaaccccgtatctgagccacttcgcctaggttagacccactcagcaactcccgtgctgaagacaggagaccgagcggcttgggcccccggccagaattctcaagacgctctcgcgagagccttccaaccgccgcgagctctcgtgaacactagttctcttcaatctcagcacctccaagggtcagcacctcccctccggctccctccgctaccgcgggccggaacttttgtcgataggaacgggtttgcacagttgagtgttgtcggccggcgtgaaggagactagggggccatcctcttcctttcgccgtcgccgccgcggagcggagtcgagccgagctgatttgatcgaggagcgcggttaccggacgggctgggtctatggtcgctccgcgggccgctccgccggctggtgcttttttatcagggcaagctgtgttccatggcagggaacttttggcagagctcccactatttgcaatggattttggataaacaagatctgttgaaggagcgccaaaaggatttaaagtttctctcagaggaagaatattggaagttacaaatattttttacaaatgttatccaagcattaggtgaacatcttaaattaagacaacaagttattgccactgctacggtatatttcaagagattctatgccaggtattctctgaaaagtatagatcctgtattaatggctcctacatgtgtgtttttggcatccaaagtagaggaatttggagtagtttcaaatacaagattgattgctgctgctacttctgtattaaaaactagattttcatatgcctttccaaaggaatttccttataggatgaatcatatattagaatgtgaattctatctgttagaactaatggattgttgcttgatagtgtatcatccttatagacctttgctccagtatgtgcaggacatgggccaagaagacatgttgcttccccttgcatggaggatagtgaatgatacctacagaacggatctttgcctactgtatcctcctttcatgatagctttagcttgcctacatgtagcctgtgttgtacagcagaaagatgccaggcaatggtttgctgagctttctgtggatatggaaaagattttggaaataatcagggttattttaaaactatatgagcagtggaagaatttcgatgagagaaaagagatggcaaccattcttagtaagatgccaaaaccaaaaccacctccaaacagaaattccctgagtgattctccactagtggcagggcctgaagctgcaagatgatggtggacaagataagtgaaggagagcagggtccaaatggaagtcagaactctagctacagccaatcttaaaacattccgaagaattccatagtggaccacttggaaataaaccattggacagatttcagtaatgtcttcagtggaacacaaatgaaaatgaatagcttgtttctgtcaagcatattggaaagtgattttatttttgcaaaataagtttttctttaatatgattctagtacataattgattaaaatctcttgattataaatgtttggaaaggttctaaggggacctacagacagacatacatagacatttcaaaattaatagcttttgattagtataatatttcttaatttggataataaaaattgtagctttttattaagccaggaaacatgaagcataatttgtttaaaattctctttggtcattgagggaccaaaaaaggacgtaaaatttacagtcaatctatgagggtttttttccctccataagtttaactttaaaactgtatttaaggaatcaaatcttacaaaatcctggaagattttggtaatgatgttgataatttcagggaaattaatcaagtacctatattgatttaaaagtgtattttattcagtagtttgaggatcttgccatggaagatactagcccagcctagcagaaaagtgcaatatgtatagcatactttgacattttaaacatgatagtccataaccattttgaaatgctgggcaaactacatgaagttatttataattaattcacagctaatcaggcattttgaaagcttaattggattcaaaaaccataatgttggaatttggtaaaattttaatgttgatttttactgtgaaaaggtttttataagatatacacaccctagtttaatgttgtgtcttggtgtggatttacagatttactacaggtattctgaaccaggaacacaatcaggtttcaggccagtttgatactggctgtccttaattctaatatgagagtaggacatcatactaaatgttatgtcagtgggactgtactgtctgtggaacttagcaaattaatcattttcttcagacttgaaggagagtgataaataaaatttggagtcataggatattgatgcacaatttaaggattaaacatttttaatcaattgtggatgatggcttattaaatgttgacttcctagtataaaactgcaagaataaaagtaacttctccagctgta

SEQ ID NO: 458880 - DNA, 2734 bp, Homo sapiens
tttttccctgagaacaaagtcatcttcatttatttctctttccaatcacaggaaaaataagtcacaaaaccttgtactttattacaatgccacattgttctgtttttgaagtcctggaagaggtaataacagaaccccgtatctgagccacttcgcctaggttagacccactcagcaactcccgtgctgaagacaggagaccgagcggcttgggcccccggccagaattctcaagacgctctcgcgagagccttccaaccgccgcgagctctcgtgaacactagttctcttcaatctcagcacctccaagggtcagcacctcccctccggctccctccgctaccgcgggccggaacttttgtcgataggaacgggtttgcacagttgagtgttgtcggccggcgtgaaggagactagggggccatcctcttcctttcgccgtcgccgccgcggagcggagtcgagccgagctgatttgatcgaggagcgcggttaccggacgggctgggtctatggtcgctccgcgggccgctccgccggctggtgcttttttatcagggcaagctgtgttccatggcagggaacttttggcagagctcccactatcctaaaagaagggaccactttgccttgctcaaatcccttgagcagtcatggagtttcttatctggaaaaggtaacgagtgtggaagacaagacaattctggaaaaacaaacgaaaagattatgaaaggccattgtcttagtttgcaatggattttggataaacaagatctgttgaaggagcgccaaaaggatttaaagtttctctcagaggaagaatattggaagttacaaatattttttacaaatgttatccaagcattaggtgaacatcttaaattaagacaacaagttattgccactgctacggtatatttcaagagattctatgccaggtattctctgaaaagtatagatcctgtattaatggctcctacatgtgtgtttttggcatccaaagtagaggaatttggagtagtttcaaatacaagattgattgctgctgctacttctgtattaaaaactagattttcatatgcctttccaaaggaatttccttataggatgaatcatatattagaatgtgaattctatctgttagaactaatggattgttgcttgatagtgtatcatccttatagacctttgctccagtatgtgcaggacatgggccaagaagacatgttgcttccccttgcatggaggatagtgaatgatacctacagaacggatctttgcctactgtatcctcctttcatgatagctttagcttgcctacatgtagcctgtgttgtacagcagaaagatgccaggcaatggtttgctgagctttctgtggatatggaaaagattttggaaataatcagggttattttaaaactatatgagcagtggaagaatttcgatgagagaaaagagatggcaaccattcttagtaagatgccaaaaccaaaaccacctccaaacagtgaaggagagcagggtccaaatggaagtcagaactctagctacagccaatcttaaaacattccgaagaattccatagtggaccacttggaaataaaccattggacagatttcagtaatgtcttcagtggaacacaaatgaaaatgaatagcttgtttctgtcaagcatattggaaagtgattttatttttgcaaaataagtttttctttaatatgattctagtacataattgattaaaatctcttgattataaatgtttggaaaggttctaaggggacctacagacagacatacatagacatttcaaaattaatagcttttgattagtataatatttcttaatttggataataaaaattgtagctttttattaagccaggaaacatgaagcataatttgtttaaaattctctttggtcattgagggaccaaaaaaggacgtaaaatttacagtcaatctatgagggtttttttccctccataagtttaactttaaaactgtatttaaggaatcaaatcttacaaaatcctggaagattttggtaatgatgttgataatttcagggaaattaatcaagtacctatattgatttaaaagtgtattttattcagtagtttgaggatcttgccatggaagatactagcccagcctagcagaaaagtgcaatatgtatagcatactttgacattttaaacatgatagtccataaccattttgaaatgctgggcaaactacatgaagttatttataattaattcacagctaatcaggcattttgaaagcttaattggattcaaaaaccataatgttggaatttggtaaaattttaatgttgatttttactgtgaaaaggtttttataagatatacacaccctagtttaatgttgtgtcttggtgtggatttacagatttactacaggtattctgaaccaggaacacaatcaggtttcaggccagtttgatactggctgtccttaattctaatatgagagtaggacatcatactaaatgttatgtcagtgggactgtactgtctgtggaacttagcaaattaatcattttcttcagacttgaaggagagtgataaataaaatttggagtcataggatattgatgcacaatttaaggattaaacatttttaatcaattgtggatgatggcttattaaatgttgacttcctagtataaaactgcaagaataaaagtaacttctccagctgta

SEQ ID NO: 458881 - DNA, 2040 bp, Homo sapiens
ttcggattcttggtttagctaggccgcggggggtcggatagagtgggcacagtttgcaatggattttggataaacaagatctgttgaaggagcgccaaaaggatttaaagtttctctcagaggaagaatattggaagttacaaatattttttacaaatgttatccaagcattaggtgaacatcttaaattaagacaacaagttattgccactgctacggtatatttcaagagattctatgccaggtattctctgaaaagtatagatcctgtattaatggctcctacatgtgtgtttttggcatccaaagtagaggaatttggagtagtttcaaatacaagattgattgctgctgctacttctgtattaaaaactagattttcatatgcctttccaaaggaatttccttataggatgaatcatatattagaatgtgaattctatctgttagaactaatggattgttgcttgatagtgtatcatccttatagacctttgctccagtatgtgcaggacatgggccaagaagacatgttgcttccccttgcatggaggatagtgaatgatacctacagaacggatctttgcctactgtatcctcctttcatgatagctttagcttgcctacatgtagcctgtgttgtacagcagaaagatgccaggcaatggtttgctgagctttctgtggatatggaaaagattttggaaataatcagggttattttaaaactatatgagcagtggaagaatttcgatgagagaaaagagatggcaaccattcttagtaagatgccaaaaccaaaaccacctccaaacagtgaaggagagcagggtccaaatggaagtcagaactctagctacagccaatcttaaaacattccgaagaattccatagtggaccacttggaaataaaccattggacagatttcagtaatgtcttcagtggaacacaaatgaaaatgaatagcttgtttctgtcaagcatattggaaagtgattttatttttgcaaaataagtttttctttaatatgattctagtacataattgattaaaatctcttgattataaatgtttggaaaggttctaaggggacctacagacagacatacatagacatttcaaaattaatagcttttgattagtataatatttcttaatttggataataaaaattgtagctttttattaagccaggaaacatgaagcataatttgtttaaaattctctttggtcattgagggaccaaaaaaggacgtaaaatttacagtcaatctatgagggtttttttccctccataagtttaactttaaaactgtatttaaggaatcaaatcttacaaaatcctggaagattttggtaatgatgttgataatttcagggaaattaatcaagtacctatattgatttaaaagtgtattttattcagtagtttgaggatcttgccatggaagatactagcccagcctagcagaaaagtgcaatatgtatagcatactttgacattttaaacatgatagtccataaccattttgaaatgctgggcaaactacatgaagttatttataattaattcacagctaatcaggcattttgaaagcttaattggattcaaaaaccataatgttggaatttggtaaaattttaatgttgatttttactgtgaaaaggtttttataagatatacacaccctagtttaatgttgtgtcttggtgtggatttacagatttactacaggtattctgaaccaggaacacaatcaggtttcaggccagtttgatactggctgtccttaattctaatatgagagtaggacatcatactaaatgttatgtcagtgggactgtactgtctgtggaacttagcaaattaatcattttcttcagacttgaaggagagtgataaataaaatttggagtcataggatattgatgcacaatttaaggattaaacatttttaatcaattgtggatgatggcttattaaatgttgacttcctagtataaaactgcaagaataaaagtaacttctccagctgta

SEQ ID NO: 458882 - DNA, 1865 bp, Homo sapiens
tttttccctgagaacaaagtcatcttcatttatttctctttccaatcacaggaaaaataagtcacaaaaccttgtactttattacaatgccacattgttctgtttttgaagtcctggaagaggtaataacagaaccccgtatctgagccacttcgcctaggttagacccactcagcaactcccgtgctgaagacaggagaccgagcggcttgggcccccggccagaattctcaagacgctctcgcgagagccttccaaccgccgcgagctctcgtgaacactagttctcttcaatctcagcacctccaagggtcagcacctcccctccggctccctccgctaccgcgggccggaacttttgtcgataggaacgggtttgcacagttgagtgttgtcggccggcgtgaaggagactagggggccatcctcttcctttcgccgtcgccgccgcggagcggagtcgagccgagctgatttgatcgaggagcgcggttaccggacgggctgggtctatggtcgctccgcgggccgctccgccggctggtgcttttttatcagggcaagctgtgttccatggcagggaacttttggcagagctcccactatttgcaatggattttggataaacaagatctgttgaaggagcgccaaaaggatttaaagtttctctcagaggaagaatattggaagttacaaatattttttacaaatgttatccaagcattaggtgaacatcttaaattaagacaacaagttattgccactgctacggtatatttcaagagattctatgccaggtattctctgaaaagtatagatcctgtattaatggctcctacatgtgtgtttttggcatccaaagtagaggaatttggagtagtttcaaatacaagattgattgctgctgctacttctgtattaaaaactagattttcatatgcctttccaaaggaatttccttataggatgaatcatatattagaatgtgaattctatctgttagaactaatggattgttgcttgatagtgtatcatccttatagacctttgctccagtatgtgcaggacatgggccaagaagacatgttgcttccccttgcatggaggatagtgaatgatacctacagaacggatctttgcctactgtatcctcctttcatgatagctttagcttgcctacatgtagcctgtgttgtacagcagaaagatgccaggcaatggtttgctgagctttctgtggatatggaaaagattttggaaataatcagggttattttaaaactatatgagcagtggaagaatttcgatgagagaaaagagatggcaaccattcttagtaagatgccaaaaccaaaaccacctccaaacagaaattccctgagtgattctccactagtggcagggcctgaagctgcaagatgatggtggacaagataaggcaataatcctattgccaaagttactggtattttcagttttagttatttttaagtattcagcatttttattttaagtattcagcattttccaggaaattaccatatttcttgctgacttataaaggtttgctgtatttatatatgattttattatgcctttggacaacagttttggtttttttttttttgaagaacacttcttgtttttcataaatagtaggaataggattttatatgtaagatttaattttataggaaatttgtttagaagaagctgtaatctctatgttgagtgatacctgtaataacaatgaaatcccataccctaatttaaagtttttgagtatatatggacactaacttccagaatgcttgttatatgtgagggcacaaagttatataagaataaaaacataaaaccaatgt

SEQ ID NO: 458883 - DNA, 1433 bp, Homo sapiens
tttttccctgagaacaaagtcatcttcatttatttctctttccaatcacaggaaaaataagtcacaaaaccttgtactttattacaatgccacattgttctgtttttgaagtcctggaagaggtaataacagaaccccgtatctgagccacttcgcctaggttagacccactcagcaactcccgtgctgaagacaggagaccgagcggcttgggcccccggccagaattctcaagacgctctcgcgagagccttccaaccgccgcgagctctcgtgaacactagttctcttcaatctcagcacctccaagggtcagcacctcccctccggctccctccgctaccgcgggccggaacttttgtcgataggaacgggtttgcacagttgagtgttgtcggccggcgtgaaggagactagggggccatcctcttcctttcgccgtcgccgccgcggagcggagtcgagccgagctgatttgatcgaggagcgcggttaccggacgggctgggtctatggtcgctccgcgggccgctccgccggctggtgcttttttatcagggcaagctgtgttccatggcagggaacttttggcagagctcccactatttgcaatggattttggataaacaagatctgttgaaggagcgccaaaaggatttaaagtttctctcagaggaagaatattggaagttacaaatattttttacaaatgttatccaagcattaggtgaacatcttaaattaagacaacaagttattgccactgctacggtatatttcaagagattctatgccaggtattctctgaaaagtatagatcctgtattaatggctcctacatgtgtgtttttggcatccaaagtagaggaatttggagtagtttcaaatacaagattgattgctgctgctacttctgtattaaaaactagattttcatatgcctttccaaaggaatttccttataggatgaatcatatattagaatgtgaattctatctgttagaactaatggtaagtaaatcttctgtgattaatagattaaaacatttttaaattaaatgaagttggaaattatttaaagaaatgattttagagaggtacattttaaaaccatccacctaatatgtgatggtgaaatcatggtagcctatttatattagcacctagagtctctctgaagcctgtaaaataatttgtatatcctacttaggatgggaaaatttttctgttctatagtaagtaactataatgaaaggattacaaacagacaagtcaggacattaaaccaccataaattatgtgcacaatttgtgtgtgcgtgcagtgttatttaaagatagattatgtctttggcagaattctgctcctccagttgggaattatgaatttataggctaataagaggtttcagtgtgttgcagatgtgacacttt

SEQ ID NO: 458884 - DNA, 839 bp, Homo sapiens
tttttccctgagaacaaagtcatcttcatttatttctctttccaatcacaggaaaaataagtcacaaaaccttgtactttattacaatgccacattgttctgtttttgaagtcctggaagaggtaataacagaaccccgtatctgagccacttcgcctaggttagacccactcagcaactcccgtgctgaagacaggagaccgagcggcttgggcccccggccagaattctcaagacgctctcgcgagagccttccaaccgccgcgagctctcgtgaacactagttctcttcaatctcagcacctccaagggtcagcacctcccctccggctccctccgctaccgcgggccggaacttttgtcgataggaacgggtttgcacagttgagtgttgtcggccggcgtgaaggagactagggggccatcctcttcctttcgccgtcgccgccgcggagcggagtcgagccgagctgatttgatcgaggagcgcggttaccggacgggctgggtctatggtcgctccgcgggccgctccgccggctggtgcttttttatcagggcaagctgtgttccatggcagggaacttttggcagagctcccactatttgcaatggattttggataaacaagatctgttgaaggagcgccaaaaggatttaaagtttctctcagaggaagaatattggaagttacaaatattttttacaaatgttatccaagcattaggtgaacatctcaaaaatgacaacaagaacaacaaaagttaatgataatatagaagcataaatttcctgtgaatgttcaattacacataataaacattattgaattgtcccca

SEQ ID NO: 458885 - DNA, 1113 bp, Homo sapiens
tttgagacaaggtctggctctgttgcccagactggagtacagtggtacaatcttgtctcactgcaatctctgcctcccaggctcaagccatcctcccacctcagccttcctagtagttgggactacaggcgcacaccaccatgcctaggtaatttttgtattttttttttgagagatggggtgttgctatgttgcccaggatggtctcgaactcctgagctcaagcaatcctcctgcctcagcctcccaaagttctgggattacaggcaggagccaccaccgtggcaatgatgattttataaatgagctcttgctctctttttggagaaaaagccgagaaattcctctgcctttctttgccccatcagtttatctttgccgtgtcagggctctgaaagccacaaaaccatcacccctcctcctgctggctttgtctccagcccgctctccaggtggaggctctgactgttagggaattctggctccgtctcttacacactgagaactccatgagctggtaccttagccactttttctagtgcctcatagctaatcattgggaagttcttggtcattttttggttggaaaattaaaaggaaaagatgtgagttgatgaaagataaaattttactataaaattcaagccatcttcttaagattcccctgcatgtggctgcctcgtacccaccgctgtccctggtgtgcatggcgagtgcagcaagtcacacctgtgtcagcagcatcgtcctctgccttgtacagcacagcttggcctggggcctgctggggcgctcagaaaacagcaagctgtgtgtgctgtgtttgttaacatagagtgtgatgactgatcattgtctatgccagtagcagcttttagtgaaaatacaggtccccaggcaaggcctgaagccccagtttttactttattttgattacaggatcataacaataaagtaattctggatctccatttccttggtaatcactgtgctgtgatagtgtgtgcaccagcgaaacatggcattcctacagtgagattatatcaagaaagcacttattaaacatcatgttttattttgttttttttagacagagtctcaccctgtcaccca

SEQ ID NO: 458886 - DNA, 2474 bp, Homo sapiens
cggctcccgggccccctcgctcctcccctctggcccctccgagcgctgggggtgcttccctccccgcctcctcgcactcccacctcgcgggcacgccggtgggctgtgccgccatgccccagccacaggctgctcacgggcctaggcgcggcggcccgagataggggcccctgagcctcccgggggaggagagaggcagcgagccgcgcgctccgccccctccccccgggccgccgccgccgccgcctcgccgccccagcctggcgggagaaggaggaggagcagcaggcctccgggcccggcgccgccgcccgcaggacatttctgatttatttgcatccttgaagagcatctgtagaagaggaagtaaaagatgggtgtgaaaacatttactcatagctcctcttcccacagccaggaaatgcttggaaagctaaatatgctgcgaaatgatggacatttttgtgatatcactattcgtgtccaggacaaaatcttccgggcacataaggtggtactagcagcttgcagtgatttctttcgcaccaaacttgtaggccaagccgaggatgagaacaagaatgtgttggatctgcatcatgttacagtgactggctttatacctcttttagaatatgcttacacagccactctatcaattaacacagaaaatattattgatgttctagcagcagccagctatatgcaaatgttcagtgttgccagcacctgctcagagttcatgaaatcaagcattttatggaatacacccaacagccaacctgaaaagggtctagatgctggacaagaaaataattctaactgcaattttacttctcgagatgggagcatttctcccgtgtcctcagagtgcagtgtggtagaaagaaccattcctgtctgccgagaatcccggagaaagcgcaaaagctacattgttatgtctcctgaaagtcctgtaaagtgtggcacacaaacaagctcaccccaggtattgaattcttcagcttcctactcagaaaatagaaaccaaccagttgactcttccttagcttttccttggacttttccttttggaattgatcgaaggattcagcctgagaaagttaagcaagcagaaaatacccggactttagaattacctggcccatctgagaccggtagaagaatggctgattatgtgacttgtgagagcacaaaaactaccttgcctttaggtaccgaagaagatgtccgggtcaaagtagaaagattaagtgatgaggaggtccatgaggaagtgtcccagcctgtcagtgcatctcagagttcgctgagtgatcagcagacagttccaggaagtgaacaagtccaagaggaccttctgattagtccacagtcttcctctataggctcagtagatgaaggcgtttctgagggcttgcctacacttcaaagcacgtctagcactaatgctcctccggatgatgatgatcgggtcagtactaacatagcatttcgttacctcttaagggttgagtttacaactccaaattcaagcatttcatctcaagagttgtagaagtttattaccacctcacttcagtatacttttcaaagtaatgaagtagcatcatcacattataaattagagtacctatacaaggctttttttttttccccagcatttccaaaactacctagtcccattgctttaaatcgtatctgtaccaagtgttggcaaactatgaaccacaggccaattccagcctaccacctttatttgtaaatcaagtattactggaacacaaccaggctcatttgctgacatattgtttgtggatggcagagttgagtggttgaaacagactgtatggtgtgcaaagtcagaatgtgtgctgtacggactgctgtgaaaaacatctgccaaagtctgatctgtatacccataactccctcctgcttgatatttcccataaatgtataaagggcatttcacatttaacaaggccaagacagaactcttgatttctaactccttgtctgaatcctgcttctccagcctttctcccatttcagtaagcatcatcattatcccctaatttctcaagcaaaatctctgaggattgttcttaatcttttttccttaccactcttcatctccctcgtagttaatccttaagtcctgtcaactctgcctataaaatatatccctgtctacttttctaatctgtactgtagccaccctactctaagtcaccaccatcttttgccttgactactgcaataaccttcaaagtagcctctgattgcattcttcccctaatccattttccatgtagcagccaaaatcatcttttcttttttaattaagtcagattatgtcactgttttaagctatagattcttaacattctttattcatacctaaaatctataggccttgctatgccttctaaagccctacacgatatgacttctgcctaatccgtcac

SEQ ID NO: 458887 - DNA, 6097 bp, Homo sapiens
  misc_feature (3817)..(3817): n is a, c, g, or t
cggctcccgggccccctcgctcctcccctctggcccctccgagcgctgggggtgcttccctccccgcctcctcgcactcccacctcgcgggcacgccggtgggctgtgccgccatgccccagccacaggctgctcacgggcctaggcgcggcggcccgagataggggcccctgagcctcccgggggaggagagaggcagcgagccgcgcgctccgccccctccccccgggccgccgccgccgccgcctcgccgccccagcctggcgggagaaggaggaggagcagcaggcctccgggcccggcgccgccgcccgcaggacatttctgatttatttgcatccttgaagagcatctgtagaagaggaagtaaaagatgggtgtgaaaacatttactcatagctcctcttcccacagccaggaaatgcttggaaagctaaatatgctgcgaaatgatggacatttttgtgatatcactattcgtgtccaggacaaaatcttccgggcacataaggtggtactagcagcttgcagtgatttctttcgcaccaaacttgtaggccaagccgaggatgagaacaagaatgtgttggatctgcatcatgttacagtgactggctttatacctcttttagaatatgcttacacagccactctatcaattaacacagaaaatattattgatgttctagcagcagccagctatatgcaaatgttcagtgttgccagcacctgctcagagttcatgaaatcaagcattttatggaatacacccaacagccaacctgaaaagggtctagatgctggacaagaaaataattctaactgcaattttacttctcgagatgggagcatttctcccgtgtcctcagagtgcagtgtggtagaaagaaccattcctgtctgccgagaatcccggagaaagcgcaaaagctacattgttatgtctcctgaaagtcctgtaaagtgtggcacacaaacaagctcaccccaggtattgaattcttcagcttcctactcagaaaatagaaaccaaccagttgactcttccttagcttttccttggacttttccttttggaattgatcgaaggattcagcctgagaaagttaagcaagcagaaaatacccggactttagaattacctggcccatctgagaccggtagaagaatggctgattatgtgacttgtgagagcacaaaaactaccttgcctttaggtaccgaagaagatgtccgggtcaaagtagaaagattaagtgatgaggaggtccatgaggaagtgtcccagcctgtcagtgcatctcagagttcgctgagtgatcagcagacagttccaggaagtgaacaagtccaagaggaccttctgattagtccacagtcttcctctataggctcagtagatgaaggcgtttctgagggcttgcctacacttcaaagcacgtctagcactaatgctcctccggatgatgatgatcgattggaaaatgttcagtatccctaccaactctacattgctccttccaccagcagtacagagcgaccaagtccaaatggtcccgacagaccttttcagtgtccaacctgcggggtgcgattcacccgtattcagaacctaaagcagcacatgctcatccactcaggaattaaaccatttcagtgtgaccgctgtgggaaaaagttcaccagggcttactcgctaaagatgcatcgcctaaagcatgaagtgatttcctagtaccggactacttaaaccaggaacaagaagagacccttgttcaatatgatcttggagaacacggttttgaaagcaactcctctgttcaaatgcctgtcatttcacaggtctcctcaacccagaattgtgaaagcacttttcccttggggtctcttggtgggctggcagaaaaagaggaagaagtgccagagcagccaaagagcagtgcttgtgctgaggcaaccagagatgaccccccaaaatcagagctgtcttctataactattgagtagttttgtgatttggcttcagttttgttttttggaaagtgcctgtgcttggtcttgtacatttaaatttaatttaattttttaaacaaaaaagccgggtgggagggagggggagattgggaaagaatttccctttttactttctgagccctgaaactgattttatttttcctaactgagagattgcttctgtaagtacacaataacatgatgttgaaacagaaactatgagacttaaggagaactggttgacttaaaacatataccagttccttcttccattgttaaaagtaggctaacaacagatcattagctagagaggaaatcagatgattattgaccttcttgagacaagagggtacatgagaaactaattactaaacagcttgacaaatggcctgagtagatacttactgctgtacacaggatgttgtataatattttgtaaagcctgttgtttttggaagtatttatggtaagctttcttaaaaattattatggtaaatacttctgaaatccggcgtacttttctttaagctttgtcatttctgttatgatttttcatggtgaaattttggtactgagatgggcattctctgtacctttatagtaccactccaaaggcaaggaaccatgattgacaacagtcaagctgtggatgaaatgaccaggaacggagaatgaagtatgtaaatcccagcttcataggaactcttctcatactgcttttcagattaaaattgctgtttacctggtctccgaatgtaatgcctgactgtgtcattgcccggatcagttttccccctgccccatcaatatgttctcttgcatatattggcgtgctgccatataaagtaaaaatactggagatattctatattttatatataggtttatgtgttgttggggatgttttcattgtgctcttttggacataataaataattctctattgaggctacattctttttttttttctttttttttaaaagaatggcatctcactctgttgcccaggctggagtatagtggctaagtcatagctcactgcagcttcgaactcctgggctcaggccattctcctgcctcagcctcttgagtatctaggattataggcatgctccaccacacctggttaacttcatttttattttttgtagagatgaggtctcactatggtgcccaggctggtcttgaactcctagaccaagtgatcctcctcctttggcctcccagactgctgggatcactgcaccggccaaggctgcattcttaacccaactagattgtttactgaatcccatatgacagcgatacattgtccttacatatttatttttagacattgcaaagttattaaaaacagttaactatagtttttacacaacgtaggcaacaatgaagagtatagactgtaagattttcatctatgactcataaatctgggagaaaaaaattattaagactaatgagaaactgaaaaccttaaactaatgaatattatttctgctgctaaaaatatgaaactttctggtctgtagttgaaatttgtatgatcctctagacttgggtatacttttcatctggtgccattaaagcatctctaatattgatcctaaatatttgtaagtccatgagcagtgaactttggaataagtttctgtgtagatacccaaagtttaataattatgagagcacctgatttgatagacagaaaatacagttctttagtcaaaacacaagatctgaattttgttcaggtgctagaccatactaaatgtatatatttttaattatagtgatttgtttcatntttttagattggctaattctgtaattttttccccaaaaacatgtgaagaaaggaaaagtaaattaaattccttagaactgttttaggttaagattctctgtgtctgcccatattctgcagtccttaacttgttttcaactctttacctcactcatgaacttgtttttacccatttgctgccaaacataggtgtgttcccttcaggagaatcagcatatacaggttatgataggctcccaccatttatgcttcttcactgatagggttgcattactttctgcagcagactataatacttcatatagtactgctgtgtctcaactggaaaggtcaggaattttaatgttacgttgtggtctttgaaaactgttaggcctagcaatagataaatctcaaaattaattttaaaatctgtattgacaagaataggtaaaattatgaccaggaatcattgttacccttagttccaagaggtggtttttgaaagagcaagaggaaagaaaaaagaaaagaaggaaagaagaataaagaagagaaacgtgtaagaatggtttgcagattgattggttaaaagtgtttttagcacatccccaaccctgaaaacttcgcattaagagccaagcacaatgttggtagctccaagatattctgactgtgttctcagaatgagggattacccatcactgggtattccttcccaagtagaaactttagattttcactggtaatacacattgccaagttttatgggaaatctgaatatactgtgaaaatgcatatctggttagttgtctgctgcccagatcttatcaataccagtaactaaccagtatttaacataaaatgatacaaataaaggcctttttctatttcagtgagggtacatttttcttgatatatatgtactttaaggatattggatctgtttatggatctgttttaggaaacagatttgcaagggataattgtatatatagtagtatttaggtttatttcaaattcatcttagggatgcctagatgcataatttttaccaggacatattgaaaatattgcaaagagatagccagttatattatcccattcattagaaattaccagtgtaactaaacataaatattccagtttagagtgcttaaacgtagctatctttcttaaggccaggagggtaactttgtggtatctaaagggcttaaatttcagaatgcagaataaattgcctttttaaaaccaagcattttgtacaagcttttattttcagttttttaactaccaaataggtgtgatgtactttagaagtaaacaaagatgttcacccatgataatggatgttaaagctcctgcagttgttcttttcgtgtttaaagggtatattctaatagtggaagcatcaaacatgtcagtgatttcatctcattcagaaataaagagattaatattggtctttattttttggcattttaagttttatataaatggatgcagatggagattatcacccacaaatatatttaaatggatttttcttaatttgaatttcaagtaatctttttatttcaagtaattagttacgcatttagttacattgccagttttttttttttatcaatttcagtaagacaaaatatactaaaatgtttaaatagcctcattcaatcttacattttgacatttcagcaatcattctggcttacagtaattagatcccctgttacgacacatgccctttgttcttaataactagcaaaaaaaaaaaaaaaaaaaaactttcatcttgttaaaatactttgccaaatgaaatagactagtcaatacatctgatgtccataattattggtaactcagttaccttctaactaataggctggttcaggagactctcccagtttataaatggttctcttgggagcctttggaagctgtattaaatctttcagtcttttatttctaattttttctcttaatctaaatagaggccagttatctattttatcagcttttattcttgaagattctcagattatgttttagtcccttttagctttaatagtccttgaaaaatacattactgtataatgtggcaattctgtaacagagacttattacttgaatgaataatcctaaaattttaatattttagctgaagtttgagatttgtggaatgaacaaaagaattagaaactttcatatgttactttgtttcagtcatctgcaaagtatgaagctgtaattctgaaatacacatccaagtgaatgagaattaaaaattttctaaatatt

SEQ ID NO: 458888 - DNA, 6314 bp, Homo sapiens
  misc_feature (4034)..(4034): n is a, c, g, or t
cggctcccgggccccctcgctcctcccctctggcccctccgagcgctgggggtgcttccctccccgcctcctcgcactcccacctcgcgggcacgccggtgggctgtgccgccatgccccagccacaggctgctcacgggcctaggcgcggcggcccgagataggggcccctgagcctcccgggggaggagagaggcagcgagccgcgcgctccgccccctccccccgggccgccgccgccgccgcctcgccgccccagcctggcgggagaaggaggaggagcagcaggcctccgggcccggcgccgccgcccgcaggacatttctgatttatttgcatccttgaagagcatctgtagaagaggaagtaaaagatgggtgtgaaaacatttactcatagctcctcttcccacagccaggaaatgcttggaaagctaaatatgctgcgaaatgatggacatttttgtgatatcactattcgtgtccaggacaaaatcttccgggcacataaggtggtactagcagcttgcagtgatttctttcgcaccaaacttgtaggccaagccgaggatgagaacaagaatgtgttggatctgcatcatgttacagtgactggctttatacctcttttagaatatgcttacacagccactctatcaattaacacagaaaatattattgatgttctagcagcagccagctatatgcaaatgttcagtgttgccagcacctgctcagagttcatgaaatcaagcattttatggaatacacccaacagccaacctgaaaagggtctagatgctggacaagaaaataattctaactgcaattttacttctcgagatgggagcatttctcccgtgtcctcagagtgcagtgtggtagaaagaaccattcctgtctgccgagaatcccggagaaagcgcaaaagctacattgttatgtctcctgaaagtcctgtaaagtgtggcacacaaacaagctcaccccaggtattgaattcttcagcttcctactcagaaaatagaaaccaaccagttgactcttccttagcttttccttggacttttccttttggaattgatcgaaggattcagcctgagaaagttaagcaagcagaaaatacccggactttagaattacctggcccatctgagaccggtagaagaatggctgattatgtgacttgtgagagcacaaaaactaccttgcctttaggtaccgaagaagatgtccgggtcaaagtagaaagattaagtgatgaggaggtccatgaggaagtgtcccagcctgtcagtgcatctcagagttcgctgagtgatcagcagacagttccaggaagtgaacaagtccaagaggaccttctgattagtccacagtcttcctctataggctcagtagatgaaggcgtttctgagggcttgcctacacttcaaagcacgtctagcactaatgctcctccggatgatgatgatcgattggaaaatgttcagtatccctaccaactctacattgctccttccaccagcagtacagagcgaccaagtccaaatggtcccgacagaccttttcagtgtccaacctgcggggtgcgattcacccgtattcagaacctaaagcagcacatgctcatccactcaggaattaaaccatttcagtgtgaccgctgtgggaaaaagttcaccagggcttactcgctaaagatgcatcgcctaaagcatgaaggtaaacgctgtttccggtgccagatatgtagtgccactttcacttccttcggggaatataaacaccacatgagggtttcccggcacattatccgcaagcctcggatttacgagtgcaaaacatgtggcgccatgttcaccaactctggaaatttaatcgtgcacctgaggagtctgaaccatgaagcatcagagctagcaaactacttccagagcagtgatttcctagtaccggactacttaaaccaggaacaagaagagacccttgttcaatatgatcttggagaacacggttttgaaagcaactcctctgttcaaatgcctgtcatttcacaggtctcctcaacccagaattgtgaaagcacttttcccttggggtctcttggtgggctggcagaaaaagaggaagaagtgccagagcagccaaagagcagtgcttgtgctgaggcaaccagagatgaccccccaaaatcagagctgtcttctataactattgagtagttttgtgatttggcttcagttttgttttttggaaagtgcctgtgcttggtcttgtacatttaaatttaatttaattttttaaacaaaaaagccgggtgggagggagggggagattgggaaagaatttccctttttactttctgagccctgaaactgattttatttttcctaactgagagattgcttctgtaagtacacaataacatgatgttgaaacagaaactatgagacttaaggagaactggttgacttaaaacatataccagttccttcttccattgttaaaagtaggctaacaacagatcattagctagagaggaaatcagatgattattgaccttcttgagacaagagggtacatgagaaactaattactaaacagcttgacaaatggcctgagtagatacttactgctgtacacaggatgttgtataatattttgtaaagcctgttgtttttggaagtatttatggtaagctttcttaaaaattattatggtaaatacttctgaaatccggcgtacttttctttaagctttgtcatttctgttatgatttttcatggtgaaattttggtactgagatgggcattctctgtacctttatagtaccactccaaaggcaaggaaccatgattgacaacagtcaagctgtggatgaaatgaccaggaacggagaatgaagtatgtaaatcccagcttcataggaactcttctcatactgcttttcagattaaaattgctgtttacctggtctccgaatgtaatgcctgactgtgtcattgcccggatcagttttccccctgccccatcaatatgttctcttgcatatattggcgtgctgccatataaagtaaaaatactggagatattctatattttatatataggtttatgtgttgttggggatgttttcattgtgctcttttggacataataaataattctctattgaggctacattctttttttttttctttttttttaaaagaatggcatctcactctgttgcccaggctggagtatagtggctaagtcatagctcactgcagcttcgaactcctgggctcaggccattctcctgcctcagcctcttgagtatctaggattataggcatgctccaccacacctggttaacttcatttttattttttgtagagatgaggtctcactatggtgcccaggctggtcttgaactcctagaccaagtgatcctcctcctttggcctcccagactgctgggatcactgcaccggccaaggctgcattcttaacccaactagattgtttactgaatcccatatgacagcgatacattgtccttacatatttatttttagacattgcaaagttattaaaaacagttaactatagtttttacacaacgtaggcaacaatgaagagtatagactgtaagattttcatctatgactcataaatctgggagaaaaaaattattaagactaatgagaaactgaaaaccttaaactaatgaatattatttctgctgctaaaaatatgaaactttctggtctgtagttgaaatttgtatgatcctctagacttgggtatacttttcatctggtgccattaaagcatctctaatattgatcctaaatatttgtaagtccatgagcagtgaactttggaataagtttctgtgtagatacccaaagtttaataattatgagagcacctgatttgatagacagaaaatacagttctttagtcaaaacacaagatctgaattttgttcaggtgctagaccatactaaatgtatatatttttaattatagtgatttgtttcatntttttagattggctaattctgtaattttttccccaaaaacatgtgaagaaaggaaaagtaaattaaattccttagaactgttttaggttaagattctctgtgtctgcccatattctgcagtccttaacttgttttcaactctttacctcactcatgaacttgtttttacccatttgctgccaaacataggtgtgttcccttcaggagaatcagcatatacaggttatgataggctcccaccatttatgcttcttcactgatagggttgcattactttctgcagcagactataatacttcatatagtactgctgtgtctcaactggaaaggtcaggaattttaatgttacgttgtggtctttgaaaactgttaggcctagcaatagataaatctcaaaattaattttaaaatctgtattgacaagaataggtaaaattatgaccaggaatcattgttacccttagttccaagaggtggtttttgaaagagcaagaggaaagaaaaaagaaaagaaggaaagaagaataaagaagagaaacgtgtaagaatggtttgcagattgattggttaaaagtgtttttagcacatccccaaccctgaaaacttcgcattaagagccaagcacaatgttggtagctccaagatattctgactgtgttctcagaatgagggattacccatcactgggtattccttcccaagtagaaactttagattttcactggtaatacacattgccaagttttatgggaaatctgaatatactgtgaaaatgcatatctggttagttgtctgctgcccagatcttatcaataccagtaactaaccagtatttaacataaaatgatacaaataaaggcctttttctatttcagtgagggtacatttttcttgatatatatgtactttaaggatattggatctgtttatggatctgttttaggaaacagatttgcaagggataattgtatatatagtagtatttaggtttatttcaaattcatcttagggatgcctagatgcataatttttaccaggacatattgaaaatattgcaaagagatagccagttatattatcccattcattagaaattaccagtgtaactaaacataaatattccagtttagagtgcttaaacgtagctatctttcttaaggccaggagggtaactttgtggtatctaaagggcttaaatttcagaatgcagaataaattgcctttttaaaaccaagcattttgtacaagcttttattttcagttttttaactaccaaataggtgtgatgtactttagaagtaaacaaagatgttcacccatgataatggatgttaaagctcctgcagttgttcttttcgtgtttaaagggtatattctaatagtggaagcatcaaacatgtcagtgatttcatctcattcagaaataaagagattaatattggtctttattttttggcattttaagttttatataaatggatgcagatggagattatcacccacaaatatatttaaatggatttttcttaatttgaatttcaagtaatctttttatttcaagtaattagttacgcatttagttacattgccagttttttttttttatcaatttcagtaagacaaaatatactaaaatgtttaaatagcctcattcaatcttacattttgacatttcagcaatcattctggcttacagtaattagatcccctgttacgacacatgccctttgttcttaataactagcaaaaaaaaaaaaaaaaaaaaactttcatcttgttaaaatactttgccaaatgaaatagactagtcaatacatctgatgtccataattattggtaactcagttaccttctaactaataggctggttcaggagactctcccagtttataaatggttctcttgggagcctttggaagctgtattaaatctttcagtcttttatttctaattttttctcttaatctaaatagaggccagttatctattttatcagcttttattcttgaagattctcagattatgttttagtcccttttagctttaatagtccttgaaaaatacattactgtataatgtggcaattctgtaacagagacttattacttgaatgaataatcctaaaattttaatattttagctgaagtttgagatttgtggaatgaacaaaagaattagaaactttcatatgttactttgtttcagtcatctgcaaagtatgaagctgtaattctgaaatacacatccaagtgaatgagaattaaaaattttctaaatatt

SEQ ID NO: 458889 - DNA, 5325 bp, Homo sapiens
  misc_feature (3045)..(3045): n is a, c, g, or t
cggctcccgggccccctcgctcctcccctctggcccctccgagcgctgggggtgcttccctccccgcctcctcgcactcccacctcgcgggcacgccggtgggctgtgccgccatgccccagccacaggctgctcacgggcctaggcgcggcggcccgagataggggcccctgagcctcccgggggaggagagaggcagcgagccgcgcgctccgccccctccccccgggccgccgccgccgccgcctcgccgccccagcctggcgggagaaggaggaggagcagcaggcctccgggcccggcgccgccgcccgcaggacatttctgatttatttgcatccttgaagagcatctgtagaagaggaagtaaaagatgggtgtgaaaacatttactcatagctcctcttcccacagccaggaaatgcttggaaagctaaatatgctgcgaaatgatggacatttttgtgatatcactattcgtgtccaggacaaaatcttccgggcacataaggtggtactagcagcttgcagtgatttctttcgcaccaaacttgtaggccaagccgaggatgagaacaagaatgtgttggatctgcatcatgttacagtgactggctttatacctcttttagaatatgcttacacagccactctatcaattaacacagaaaatattattgatgttctagcagcagccagctatatgcaaatgttcagtgttgccagcacctgctcagagttcatgaaatcaagcattttatggaatacacccaacagccaacctgaaaagggtctagatgctggacaagaaaataattctaactgcaattttacttctcgagatgggagcatttctcccgtgtcctcagagtgcagtgtggtagaaagaaccattcctgtctgccgagaatcccggagaaagcgcaaaagctacattgttatgtctcctgaaagtcctgtaaagtgtggcacacaaacaagctcaccccaggtattgaattcttcagcttcctactcagaaaatagaaaccaaccagttgactcttccttagcttttccttggacttttccttttggaattgatcgaaggattcagcctgagaaagttaagcaagcagaaaatacccggactttagaattacctggcccatctgagaccggtagaagaatggctgattatgtgacttgtgagagcacaaaaactaccttgcctttaggtaccgaagaagatgtccgggtcaaagtagaaagattaagtgatgaggaggtccatgaggaagtgtcccagcctgtcagtgcatctcagagttcgctgagtgatcagcagacagttccaggaagtgaacaagtccaagaggaccttctgattagtccacagtcttcctctataggctcagtagatgaaggcgtttctgagggcttgcctacacttcaaagcacgtctagcactaatgctcctccggatgatgatgatcgattggaaaatgttcagtatccctaccaactctacattgctccttccaccagcagtacagagcgaccaagtccaaatggtcccgacagaccttttcagtgtccaacctgcggggtgcgattcacccgtattcagaacctaaagcagcacatgctcatccactcaggaattaaaccatttcagtgtgaccgctgtgggaaaaagttcaccagggcttactcgctaaagatgcatcgcctaaagcatgaagtgatttcctagtaccggactacttaaaccaggaacaagaagagacccttgttcaatatgatcttggagaacacggttttgaaagcaactcctctgttcaaatgcctgtcatttcacagtaccactccaaaggcaaggaaccatgattgacaacagtcaagctgtggatgaaatgaccaggaacggagaatgaagtatgtaaatcccagcttcataggaactcttctcatactgcttttcagattaaaattgctgtttacctggtctccgaatgtaatgcctgactgtgtcattgcccggatcagttttccccctgccccatcaatatgttctcttgcatatattggcgtgctgccatataaagtaaaaatactggagatattctatattttatatataggtttatgtgttgttggggatgttttcattgtgctcttttggacataataaataattctctattgaggctacattctttttttttttctttttttttaaaagaatggcatctcactctgttgcccaggctggagtatagtggctaagtcatagctcactgcagcttcgaactcctgggctcaggccattctcctgcctcagcctcttgagtatctaggattataggcatgctccaccacacctggttaacttcatttttattttttgtagagatgaggtctcactatggtgcccaggctggtcttgaactcctagaccaagtgatcctcctcctttggcctcccagactgctgggatcactgcaccggccaaggctgcattcttaacccaactagattgtttactgaatcccatatgacagcgatacattgtccttacatatttatttttagacattgcaaagttattaaaaacagttaactatagtttttacacaacgtaggcaacaatgaagagtatagactgtaagattttcatctatgactcataaatctgggagaaaaaaattattaagactaatgagaaactgaaaaccttaaactaatgaatattatttctgctgctaaaaatatgaaactttctggtctgtagttgaaatttgtatgatcctctagacttgggtatacttttcatctggtgccattaaagcatctctaatattgatcctaaatatttgtaagtccatgagcagtgaactttggaataagtttctgtgtagatacccaaagtttaataattatgagagcacctgatttgatagacagaaaatacagttctttagtcaaaacacaagatctgaattttgttcaggtgctagaccatactaaatgtatatatttttaattatagtgatttgtttcatntttttagattggctaattctgtaattttttccccaaaaacatgtgaagaaaggaaaagtaaattaaattccttagaactgttttaggttaagattctctgtgtctgcccatattctgcagtccttaacttgttttcaactctttacctcactcatgaacttgtttttacccatttgctgccaaacataggtgtgttcccttcaggagaatcagcatatacaggttatgataggctcccaccatttatgcttcttcactgatagggttgcattactttctgcagcagactataatacttcatatagtactgctgtgtctcaactggaaaggtcaggaattttaatgttacgttgtggtctttgaaaactgttaggcctagcaatagataaatctcaaaattaattttaaaatctgtattgacaagaataggtaaaattatgaccaggaatcattgttacccttagttccaagaggtggtttttgaaagagcaagaggaaagaaaaaagaaaagaaggaaagaagaataaagaagagaaacgtgtaagaatggtttgcagattgattggttaaaagtgtttttagcacatccccaaccctgaaaacttcgcattaagagccaagcacaatgttggtagctccaagatattctgactgtgttctcagaatgagggattacccatcactgggtattccttcccaagtagaaactttagattttcactggtaatacacattgccaagttttatgggaaatctgaatatactgtgaaaatgcatatctggttagttgtctgctgcccagatcttatcaataccagtaactaaccagtatttaacataaaatgatacaaataaaggcctttttctatttcagtgagggtacatttttcttgatatatatgtactttaaggatattggatctgtttatggatctgttttaggaaacagatttgcaagggataattgtatatatagtagtatttaggtttatttcaaattcatcttagggatgcctagatgcataatttttaccaggacatattgaaaatattgcaaagagatagccagttatattatcccattcattagaaattaccagtgtaactaaacataaatattccagtttagagtgcttaaacgtagctatctttcttaaggccaggagggtaactttgtggtatctaaagggcttaaatttcagaatgcagaataaattgcctttttaaaaccaagcattttgtacaagcttttattttcagttttttaactaccaaataggtgtgatgtactttagaagtaaacaaagatgttcacccatgataatggatgttaaagctcctgcagttgttcttttcgtgtttaaagggtatattctaatagtggaagcatcaaacatgtcagtgatttcatctcattcagaaataaagagattaatattggtctttattttttggcattttaagttttatataaatggatgcagatggagattatcacccacaaatatatttaaatggatttttcttaatttgaatttcaagtaatctttttatttcaagtaattagttacgcatttagttacattgccagttttttttttttatcaatttcagtaagacaaaatatactaaaatgtttaaatagcctcattcaatcttacattttgacatttcagcaatcattctggcttacagtaattagatcccctgttacgacacatgccctttgttcttaataactagcaaaaaaaaaaaaaaaaaaaaactttcatcttgttaaaatactttgccaaatgaaatagactagtcaatacatctgatgtccataattattggtaactcagttaccttctaactaataggctggttcaggagactctcccagtttataaatggttctcttgggagcctttggaagctgtattaaatctttcagtcttttatttctaattttttctcttaatctaaatagaggccagttatctattttatcagcttttattcttgaagattctcagattatgttttagtcccttttagctttaatagtccttgaaaaatacattactgtataatgtggcaattctgtaacagagacttattacttgaatgaataatcctaaaattttaatattttagctgaagtttgagatttgtggaatgaacaaaagaattagaaactttcatatgttactttgtttcagtcatctgcaaagtatgaagctgtaattctgaaatacacatccaagtgaatgagaattaaaaattttctaaatatt

SEQ ID NO: 458890 - DNA, 5208 bp, Homo sapiens
  misc_feature (2927)..(2927): n is a, c, g, or t
cggctcccgggccccctcgctcctcccctctggcccctccgagcgctgggggtgcttccctccccgcctcctcgcactcccacctcgcgggcacgccggtgggctgtgccgccatgccccagccacaggctgctcacgggcctaggcgcggcggcccgagataggggcccctgagcctcccgggggaggagagaggcagcgagccgcgcgctccgccccctccccccgggccgccgccgccgccgcctcgccgccccagcctggcgggagaaggaggaggagcagcaggcctccgggcccggcgccgccgcccgcaggacatttctgatttatttgcatccttgaagagcatctgtagaagaggaagtaaaagatgggtgtgaaaacatttactcatagctcctcttcccacagccaggaaatgcttggaaagctaaatatgctgcgaaatgatggacatttttgtgatatcactattcgtgtccaggacaaaatcttccgggcacataaggtggtactagcagcttgcagtgatttctttcgcaccaaacttgtaggccaagccgaggatgagaacaagaatgtgttggatctgcatcatgttacagtgactggctttatacctcttttagaatatgcttacacagccactctatcaattaacacagaaaatattattgatgttctagcagcagccagctatatgcaaatgttcagtgttgccagcacctgctcagagttcatgaaatcaagcattttatggaatacacccaacagccaacctgaaaagggtctagatgctggacaagaaaataattctaactgcaattttacttctcgagatgggagcatttctcccgtgtcctcagagtgcagtgtggtagaaagaaccattcctgtctgccgagaatcccggagaaagcgcaaaagctacattgttatgtctcctgaaagtcctgtaaagtgtggcacacaaacaagctcaccccaggtattgaattcttcagcttcctactcagaaaatagaaaccaaccagttgactcttccttagcttttccttggacttttccttttggaattgatcgaaggattcagcctgagaaagttaagcaagcagaaaatacccggactttagaattacctggcccatctgagaccggtagaagaatggctgattatgtgacttgtgagagcacaaaaactaccttgcctttaggtaccgaagaagatgtccgggtcaaagtagaaagattaagtgatgaggaggtccatgaggaagtgtcccagcctgtcagtgcatctcagagttcgctgagtgatcagcagacagttccaggaagtgaacaagtccaagaggaccttctgattagtccacagtcttcctctataggctcagtagatgaaggcgtttctgagggcttgcctacacttcaaagcacgtctagcactaatgctcctccggatgatgatgatcgattggaaaatgttcagtatccctaccaactctacattgctccttccaccagcagtacagagcgaccaagtccaaatggtcccgacagaccttttcagtgtccaacctgcggggtgcgattcacccgtattcagaacctaaagcagcacatgctcatccactcaggaattaaaccatttcagtgtgaccgctgtgggaaaaagttcaccagggcttactcgctaaagatgcatcgcctaaagcatgaagtaccactccaaaggcaaggaaccatgattgacaacagtcaagctgtggatgaaatgaccaggaacggagaatgaagtatgtaaatcccagcttcataggaactcttctcatactgcttttcagattaaaattgctgtttacctggtctccgaatgtaatgcctgactgtgtcattgcccggatcagttttccccctgccccatcaatatgttctcttgcatatattggcgtgctgccatataaagtaaaaatactggagatattctatattttatatataggtttatgtgttgttggggatgttttcattgtgctcttttggacataataaataattctctattgaggctacattctttttttttttctttttttttaaaagaatggcatctcactctgttgcccaggctggagtatagtggctaagtcatagctcactgcagcttcgaactcctgggctcaggccattctcctgcctcagcctcttgagtatctaggattataggcatgctccaccacacctggttaacttcatttttattttttgtagagatgaggtctcactatggtgcccaggctggtcttgaactcctagaccaagtgatcctcctcctttggcctcccagactgctgggatcactgcaccggccaaggctgcattcttaacccaactagattgtttactgaatcccatatgacagcgatacattgtccttacatatttatttttagacattgcaaagttattaaaaacagttaactatagtttttacacaacgtaggcaacaatgaagagtatagactgtaagattttcatctatgactcataaatctgggagaaaaaaattattaagactaatgagaaactgaaaaccttaaactaatgaatattatttctgctgctaaaaatatgaaactttctggtctgtagttgaaatttgtatgatcctctagacttgggtatacttttcatctggtgccattaaagcatctctaatattgatcctaaatatttgtaagtccatgagcagtgaactttggaataagtttctgtgtagatacccaaagtttaataattatgagagcacctgatttgatagacagaaaatacagttctttagtcaaaacacaagatctgaattttgttcaggtgctagaccatactaaatgtatatatttttaattatagtgatttgtttcatntttttagattggctaattctgtaattttttccccaaaaacatgtgaagaaaggaaaagtaaattaaattccttagaactgttttaggttaagattctctgtgtctgcccatattctgcagtccttaacttgttttcaactctttacctcactcatgaacttgtttttacccatttgctgccaaacataggtgtgttcccttcaggagaatcagcatatacaggttatgataggctcccaccatttatgcttcttcactgatagggttgcattactttctgcagcagactataatacttcatatagtactgctgtgtctcaactggaaaggtcaggaattttaatgttacgttgtggtctttgaaaactgttaggcctagcaatagataaatctcaaaattaattttaaaatctgtattgacaagaataggtaaaattatgaccaggaatcattgttacccttagttccaagaggtggtttttgaaagagcaagaggaaagaaaaaagaaaagaaggaaagaagaataaagaagagaaacgtgtaagaatggtttgcagattgattggttaaaagtgtttttagcacatccccaaccctgaaaacttcgcattaagagccaagcacaatgttggtagctccaagatattctgactgtgttctcagaatgagggattacccatcactgggtattccttcccaagtagaaactttagattttcactggtaatacacattgccaagttttatgggaaatctgaatatactgtgaaaatgcatatctggttagttgtctgctgcccagatcttatcaataccagtaactaaccagtatttaacataaaatgatacaaataaaggcctttttctatttcagtgagggtacatccccccccccccccctccccccccccccatctcgccccctgttatggatctgttttaggaaacagatttgcaagggataattgtatatatagtagtatttaggtttatttcaaattcatcttagggatgcctagatgcataatttttaccaggacatattgaaaatattgcaaagagatagccagttatattatcccattcattagaaattaccagtgtaactaaacataaatattccagtttagagtgcttaaacgtagctatctttcttaaggccaggagggtaactttgtggtatctaaagggcttaaatttcagaatgcagaataaattgcctttttaaaaccaagcattttgtacaagcttttattttcagttttttaactaccaaataggtgtgatgtactttagaagtaaacaaagatgttcacccatgataatggatgttaaagctcctgcagttgttcttttcgtgtttaaagggtatattctaatagtggaagcatcaaacatgtcagtgatttcatctcattcagaaataaagagattaatattggtctttattttttggcattttaagttttatataaatggatgcagatggagattatcacccacaaatatatttaaatggatttttcttaatttgaatttcaagtaatctttttatttcaagtaattagttacgcatttagttacattgccagttttttttttttatcaatttcagtaagacaaaatatactaaaatgtttaaatagcctcattcaatcttacattttgacatttcagcaatcattctggcttacagtaattagatcccctgttacgacacatgccctttgttcttaataactagcaaaaaaaaaaaaaaaaaaaaactttcatcttgttaaaatactttgccaaatgaaatagactagtcaatacatctgatgtccataattattggtaactcagttaccttctaactaataggctggttcaggagactctcccagtttataaatggttctcttgggagcctttggaagctgtattaaatctttcagtcttttatttctaattttttctcttaatctaaatagaggccagttatctattttatcagcttttattcttgaagattctcagattatgttttagtcccttttagctttaatagtccttgaaaaatacattactgtataatgtggcaattctgtaacagagacttattacttgaatgaataatcctaaaattttaatattttagctgaagtttgagatttgtggaatgaacaaaagaattagaaactttcatatgttactttgtttcagtcatctgcaaagtatgaagctgtaattctgaaatacacatccaagtgaatgagaattaaaaattttctaaatatt

SEQ ID NO: 458891 - DNA, 1563 bp, Homo sapiens
cggctcccgggccccctcgctcctcccctctggcccctccgagcgctgggggtgcttccctccccgcctcctcgcactcccacctcgcgggcacgccggtgggctgtgccgccatgccccagccacaggctgctcacgggcctaggcgcggcggcccgagataggggcccctgagcctcccgggggaggagagaggcagcgagccgcgcgctccgccccctccccccgggccgccgccgccgccgcctcgccgccccagcctggcgggagaaggaggaggagcagcaggcctccgggcccggcgccgccgcccgcaggacatttctgatttatttgcatccttgaagagcatctgtagaagaggaagtaaaagatgggtgtgaaaacatttactcatagctcctcttcccacagccaggaaatgcttggaaagctaaatatgctgcgaaatgatggacatttttgtgatatcactattcgtgtccaggacaaaatcttccgggcacataaggtggtactagcagcttgcagtgatttctttcgcaccaaacttgtaggccaagccgaggatgagaacaagaatgtgttggatctgcatcatgttacagtgactggctttatacctcttttagaatatgcttacacagccactctatcaattaacacagaaaatattattgatgttctagcagcagccagctatatgcaaatgttcagtgttgccagcacctgctcagagttcatgaaatcaagcattttatggaatacacccaacagccaacctgaaaagggtctagatgctggacaagaaaataattctaactgcaattttacttctcgagatgggagcatttctcccgtgtcctcagagtgcagtgtggtagaaagaaccattcctgtctgccgagaatcccggagaaagcgcaaaagctacattgttatgtctcctgaaagtcctgtaaagtgtggcacacaaacaagctcaccccaggtattgaattcttcagcttcctactcagaaaatagaaaccaaccagttgactcttccttagcttttccttggacttttccttttggaattgatcgaaggattcagcctgagaaagttaagcaagcagaaaatacccggactttagaattacctggcccatctgagaccggtagaagaatggctgattatgtgacttgtgagagcacaaaaactaccttgcctttaggtaccgaagaagatgtccgggtcaaagtagaaagattaagtgatgaggaggtccatgaggaagtgtcccagcctgtcagtgcatctcagagttcgctgagtgatcagcagacagttccaggaagtgaacaagtccaagaggaccttctgattagtccacagtcttcctctataggctcagtagatgaaggcgtttctgagggcttgcctacacttcaaagcacgtctagcactaatgctcctccggatgatgatgatcgattggaaaatgttcagtacccccaagaacgtctgagccttcaatgttgaattttttctttattaaaattacttttatcttataaaat

SEQ ID NO: 458892 - DNA, 489 bp, Homo sapiens
gctaaagatgcatcgcctaaagcatgaaggtaaacgctgtttccggtgccagatatgtagtgccactttcacttccttcggggaatataaacaccacatgagggtttcccggcacattatccgcaagcctcggatttacgagtgcaaaacatgtggcgccatgttcaccaactctggaaatttaatcgtgcacctgaggagtctgaaccatgaagcatcagagctagcaaactacttccagagcaggtgaggtgcacaacgaaaacccaaccaggaaaactgctttctaaactctcttttcctgcttttagggcagccttctgtgtttttacatcaggttgccagctagtcagtcacatttgttacggattcccactgttcatactctaatctcctgatctgataaaattttgctgagtcttctacgtatataaaattataaacattttatagttggtattaaaaatattttcctgcagaagtagacta

SEQ ID NO: 458893 - DNA, 5207 bp, Homo sapiens
  misc_feature (2927)..(2927): n is a, c, g, or t
cggctcccgggccccctcgctcctcccctctggcccctccgagcgctgggggtgcttccctccccgcctcctcgcactcccacctcgcgggcacgccggtgggctgtgccgccatgccccagccacaggctgctcacgggcctaggcgcggcggcccgagataggggcccctgagcctcccgggggaggagagaggcagcgagccgcgcgctccgccccctccccccgggccgccgccgccgccgcctcgccgccccagcctggcgggagaaggaggaggagcagcaggcctccgggcccggcgccgccgcccgcaggacatttctgatttatttgcatccttgaagagcatctgtagaagaggaagtaaaagatgggtgtgaaaacatttactcatagctcctcttcccacagccaggaaatgcttggaaagctaaatatgctgcgaaatgatggacatttttgtgatatcactattcgtgtccaggacaaaatcttccgggcacataaggtggtactagcagcttgcagtgatttctttcgcaccaaacttgtaggccaagccgaggatgagaacaagaatgtgttggatctgcatcatgttacagtgactggctttatacctcttttagaatatgcttacacagccactctatcaattaacacagaaaatattattgatgttctagcagcagccagctatatgcaaatgttcagtgttgccagcacctgctcagagttcatgaaatcaagcattttatggaatacacccaacagccaacctgaaaagggtctagatgctggacaagaaaataattctaactgcaattttacttctcgagatgggagcatttctcccgtgtcctcagagtgcagtgtggtagaaagaaccattcctgtctgccgagaatcccggagaaagcgcaaaagctacattgttatgtctcctgaaagtcctgtaaagtgtggcacacaaacaagctcaccccaggtattgaattcttcagcttcctactcagaaaatagaaaccaaccagttgactcttccttagcttttccttggacttttccttttggaattgatcgaaggattcagcctgagaaagttaagcaagcagaaaatacccggactttagaattacctggcccatctgagaccggtagaagaatggctgattatgtgacttgtgagagcacaaaaactaccttgcctttaggtaccgaagaagatgtccgggtcaaagtagaaagattaagtgatgaggaggtccatgaggaagtgtcccagcctgtcagtgcatctcagagttcgctgagtgatcagcagacagttccaggaagtgaacaagtccaagaggaccttctgattagtccacagtcttcctctataggctcagtagatgaaggcgtttctgagggcttgcctacacttcaaagcacgtctagcactaatgctcctccggatgatgatgatcgattggaaaatgttcagtatccctaccaactctacattgctccttccaccagcagtacagagcgaccaagtccaaatggtcccgacagaccttttcagtgtccaacctgcggggtgcgattcacccgtattcagaacctaaagcagcacatgctcatccactcaggaattaaaccatttcagtgtgaccgctgtgggaaaaagttcaccagggcttactcgctaaagatgcatcgcctaaagcatgaagtaccactccaaaggcaaggaaccatgattgacaacagtcaagctgtggatgaaatgaccaggaacggagaatgaagtatgtaaatcccagcttcataggaactcttctcatactgcttttcagattaaaattgctgtttacctggtctccgaatgtaatgcctgactgtgtcattgcccggatcagttttccccctgccccatcaatatgttctcttgcatatattggcgtgctgccatataaagtaaaaatactggagatattctatattttatatataggtttatgtgttgttggggatgttttcattgtgctcttttggacataataaataattctctattgaggctacattctttttttttttctttttttttaaaagaatggcatctcactctgttgcccaggctggagtatagtggctaagtcatagctcactgcagcttcgaactcctgggctcaggccattctcctgcctcagcctcttgagtatctaggattataggcatgctccaccacacctggttaacttcatttttattttttgtagagatgaggtctcactatggtgcccaggctggtcttgaactcctagaccaagtgatcctcctcctttggcctcccagactgctgggatcactgcaccggccaaggctgcattcttaacccaactagattgtttactgaatcccatatgacagcgatacattgtccttacatatttatttttagacattgcaaagttattaaaaacagttaactatagtttttacacaacgtaggcaacaatgaagagtatagactgtaagattttcatctatgactcataaatctgggagaaaaaaattattaagactaatgagaaactgaaaaccttaaactaatgaatattatttctgctgctaaaaatatgaaactttctggtctgtagttgaaatttgtatgatcctctagacttgggtatacttttcatctggtgccattaaagcatctctaatattgatcctaaatatttgtaagtccatgagcagtgaactttggaataagtttctgtgtagatacccaaagtttaataattatgagagcacctgatttgatagacagaaaatacagttctttagtcaaaacacaagatctgaattttgttcaggtgctagaccatactaaatgtatatatttttaattatagtgatttgtttcatntttttagattggctaattctgtaattttttccccaaaaacatgtgaagaaaggaaaagtaaattaaattccttagaactgttttaggttaagattctctgtgtctgcccatattctgcagtccttaacttgttttcaactctttacctcactcatgaacttgtttttacccatttgctgccaaacataggtgtgttcccttcaggagaatcagcatatacaggttatgataggctcccaccatttatgcttcttcactgatagggttgcattactttctgcagcagactataatacttcatatagtactgctgtgtctcaactggaaaggtcaggaattttaatgttacgttgtggtctttgaaaactgttaggcctagcaatagataaatctcaaaattaattttaaaatctgtattgacaagaataggtaaaattatgaccaggaatcattgttacccttagttccaagaggtggtttttgaaagagcaagaggaaagaaaaaagaaaagaaggaaagaagaataaagaagagaaacgtgtaagaatggtttgcagattgattggttaaaagtgtttttagcacatccccaaccctgaaaacttcgcattaagagccaagcacaatgttggtagctccaagatattctgactgtgttctcagaatgagggattacccatcactgggtattccttcccaagtagaaactttagattttcactggtaatacacattgccaagttttatgggaaatctgaatatactgtgaaaatgcatatctggttagttgtctgctgcccagatcttatcaataccagtaactaaccagtatttaacataaaatgatacaaataaaggcctttttctatttcagtgagggtacatttttcttgatatatatgtactttaaggatattggatctgtttatggatctgttttaggaaacagatttgcaagggataattgtatatatagtagtatttaggtttatttcaaattcatcttagggatgcctagatgcataatttttaccaggacatattgaaaatattgcaaagagatagccagttatattatcccattcattagaaattaccagtgtaactaaacataaatattccagtttagagtgcttaaacgtagctatctttcttaaggccaggagggtaactttgtggtatctaaagggcttaaatttcagaatgcagaataaattgcctttttaaaaccaagcattttgtacaagcttttattttcagttttttaactaccaaataggtgtgatgtactttagaagtaaacaaagatgttcacccatgataatggatgttaaagctcctgcagttgttcttttcgtgtttaaagggtatattctaatagtggaagcatcaaacatgtcagtgatttcatctcattcagaaataaagagattaatattggtctttattttttggcattttaagttttatataaatggatgcagatggagattatcacccacaaatatatttaaatggatttttcttaatttgaatttcaagtaatctttttatttcaagtaattagttacgcatttagttacattgccagttttttttttttatcaatttcagtaagacaaaatatactaaaatgtttaaatagcctcattcaatcttacattttgacatttcagcaatcattctggcttacagtaattagatcccctgttacgacacatgccctttgttcttaataactagcaaaaaaaaaaaaaaaaaaaaactttcatcttgttaaaatactttgccaaatgaaatagactagtcaatacatctgatgtccataattattggtaactcagttaccttctaactaataggctggttcaggagactctcccagtttataaatggttctcttgggagcctttggaagctgtattaaatctttcagtcttttatttctaattttttctcttaatctaaatagaggccagttatctattttatcagcttttattcttgaagattctcagattatgttttagtcccttttagctttaatagtccttgaaaaatacattactgtataatgtggcaattctgtaacagagacttattacttgaatgaataatcctaaaattttaatattttagctgaagtttgagatttgtggaatgaacaaaagaattagaaactttcatatgttactttgtttcagtcatctgcaaagtatgaagctgtaattctgaaatacacatccaagtgaatgagaattaaaaattttctaaatatt

SEQ ID NO: 458894 - DNA, 6046 bp, Homo sapiens
  misc_feature (3766)..(3766): n is a, c, g, or t
cggctcccgggccccctcgctcctcccctctggcccctccgagcgctgggggtgcttccctccccgcctcctcgcactcccacctcgcgggcacgccggtgggctgtgccgccatgccccagccacaggctgctcacgggcctaggcgcggcggcccgagataggggcccctgagcctcccgggggaggagagaggcagcgagccgcgcgctccgccccctccccccgggccgccgccgccgccgcctcgccgccccagcctggcgggagaaggaggaggagcagcaggcctccgggcccggcgccgccgcccgcaggacatttctgatttatttgcatccttgaagagcatctgtagaagaggaagtaaaagatgggtgtgaaaacatttactcatagctcctcttcccacagccaggaaatgcttggaaagctaaatatgctgcgaaatgatggacatttttgtgatatcactattcgtgtccaggacaaaatcttccgggcacataaggtggtactagcagcttgcagtgatttctttcgcaccaaacttgtaggccaagccgaggatgagaacaagaatgtgttggatctgcatcatgttacagtgactggctttatacctcttttagaatatgcttacacagccactctatcaattaacacagaaaatattattgatgttctagcagcagccagctatatgcaaatgttcagtgttgccagcacctgctcagagttcatgaaatcaagcattttatggaatacacccaacagccaacctgaaaagggtctagatgctggacaagaaaataattctaactgcaattttacttctcgagatgggagcatttctcccgtgtcctcagagtgcagtgtggtagaaagaaccattcctgtctgccgagaatcccggagaaagcgcaaaagctacattgttatgtctcctgaaagtcctgtaaagtgtggcacacaaacaagctcaccccaggtattgaattcttcagcttcctactcagaaaatagaaaccaaccagttgactcttccttagcttttccttggacttttccttttggaattgatcgaaggattcagcctgagaaagttaagcaagcagaaaatacccggactttagaattacctggcccatctgagaccggtagaagaatggctgattatgtgacttgtgagagcacaaaaactaccttgcctttaggtaccgaagaagatgtccgggtcaaagtagaaagattaagtgatgaggaggtccatgaggaagtgtcccagcctgtcagtgcatctcagagttcgctgagtgatcagcagacagttccaggaagtgaacaagtccaagaggaccttctgattagtccacagtcttcctctataggctcagtagatgaaggcgtttctgagggcttgcctacacttcaaagcacgtctagcactaatgctcctccggatgatgatgatcgcagtacagagcgaccaagtccaaatggtcccgacagaccttttcagtgtccaacctgcggggtgcgattcacccgtattcagaacctaaagcagcacatgctcatccactcaggaattaaaccatttcagtgtgaccgctgtgggaaaaagttcaccagggcttactcgctaaagatgcatcgcctaaagcatgaagtgatttcctagtaccggactacttaaaccaggaacaagaagagacccttgttcaatatgatcttggagaacacggttttgaaagcaactcctctgttcaaatgcctgtcatttcacaggtctcctcaacccagaattgtgaaagcacttttcccttggggtctcttggtgggctggcagaaaaagaggaagaagtgccagagcagccaaagagcagtgcttgtgctgaggcaaccagagatgaccccccaaaatcagagctgtcttctataactattgagtagttttgtgatttggcttcagttttgttttttggaaagtgcctgtgcttggtcttgtacatttaaatttaatttaattttttaaacaaaaaagccgggtgggagggagggggagattgggaaagaatttccctttttactttctgagccctgaaactgattttatttttcctaactgagagattgcttctgtaagtacacaataacatgatgttgaaacagaaactatgagacttaaggagaactggttgacttaaaacatataccagttccttcttccattgttaaaagtaggctaacaacagatcattagctagagaggaaatcagatgattattgaccttcttgagacaagagggtacatgagaaactaattactaaacagcttgacaaatggcctgagtagatacttactgctgtacacaggatgttgtataatattttgtaaagcctgttgtttttggaagtatttatggtaagctttcttaaaaattattatggtaaatacttctgaaatccggcgtacttttctttaagctttgtcatttctgttatgatttttcatggtgaaattttggtactgagatgggcattctctgtacctttatagtaccactccaaaggcaaggaaccatgattgacaacagtcaagctgtggatgaaatgaccaggaacggagaatgaagtatgtaaatcccagcttcataggaactcttctcatactgcttttcagattaaaattgctgtttacctggtctccgaatgtaatgcctgactgtgtcattgcccggatcagttttccccctgccccatcaatatgttctcttgcatatattggcgtgctgccatataaagtaaaaatactggagatattctatattttatatataggtttatgtgttgttggggatgttttcattgtgctcttttggacataataaataattctctattgaggctacattctttttttttttctttttttttaaaagaatggcatctcactctgttgcccaggctggagtatagtggctaagtcatagctcactgcagcttcgaactcctgggctcaggccattctcctgcctcagcctcttgagtatctaggattataggcatgctccaccacacctggttaacttcatttttattttttgtagagatgaggtctcactatggtgcccaggctggtcttgaactcctagaccaagtgatcctcctcctttggcctcccagactgctgggatcactgcaccggccaaggctgcattcttaacccaactagattgtttactgaatcccatatgacagcgatacattgtccttacatatttatttttagacattgcaaagttattaaaaacagttaactatagtttttacacaacgtaggcaacaatgaagagtatagactgtaagattttcatctatgactcataaatctgggagaaaaaaattattaagactaatgagaaactgaaaaccttaaactaatgaatattatttctgctgctaaaaatatgaaactttctggtctgtagttgaaatttgtatgatcctctagacttgggtatacttttcatctggtgccattaaagcatctctaatattgatcctaaatatttgtaagtccatgagcagtgaactttggaataagtttctgtgtagatacccaaagtttaataattatgagagcacctgatttgatagacagaaaatacagttctttagtcaaaacacaagatctgaattttgttcaggtgctagaccatactaaatgtatatatttttaattatagtgatttgtttcatntttttagattggctaattctgtaattttttccccaaaaacatgtgaagaaaggaaaagtaaattaaattccttagaactgttttaggttaagattctctgtgtctgcccatattctgcagtccttaacttgttttcaactctttacctcactcatgaacttgtttttacccatttgctgccaaacataggtgtgttcccttcaggagaatcagcatatacaggttatgataggctcccaccatttatgcttcttcactgatagggttgcattactttctgcagcagactataatacttcatatagtactgctgtgtctcaactggaaaggtcaggaattttaatgttacgttgtggtctttgaaaactgttaggcctagcaatagataaatctcaaaattaattttaaaatctgtattgacaagaataggtaaaattatgaccaggaatcattgttacccttagttccaagaggtggtttttgaaagagcaagaggaaagaaaaaagaaaagaaggaaagaagaataaagaagagaaacgtgtaagaatggtttgcagattgattggttaaaagtgtttttagcacatccccaaccctgaaaacttcgcattaagagccaagcacaatgttggtagctccaagatattctgactgtgttctcagaatgagggattacccatcactgggtattccttcccaagtagaaactttagattttcactggtaatacacattgccaagttttatgggaaatctgaatatactgtgaaaatgcatatctggttagttgtctgctgcccagatcttatcaataccagtaactaaccagtatttaacataaaatgatacaaataaaggcctttttctatttcagtgagggtacatttttcttgatatatatgtactttaaggatattggatctgtttatggatctgttttaggaaacagatttgcaagggataattgtatatatagtagtatttaggtttatttcaaattcatcttagggatgcctagatgcataatttttaccaggacatattgaaaatattgcaaagagatagccagttatattatcccattcattagaaattaccagtgtaactaaacataaatattccagtttagagtgcttaaacgtagctatctttcttaaggccaggagggtaactttgtggtatctaaagggcttaaatttcagaatgcagaataaattgcctttttaaaaccaagcattttgtacaagcttttattttcagttttttaactaccaaataggtgtgatgtactttagaagtaaacaaagatgttcacccatgataatggatgttaaagctcctgcagttgttcttttcgtgtttaaagggtatattctaatagtggaagcatcaaacatgtcagtgatttcatctcattcagaaataaagagattaatattggtctttattttttggcattttaagttttatataaatggatgcagatggagattatcacccacaaatatatttaaatggatttttcttaatttgaatttcaagtaatctttttatttcaagtaattagttacgcatttagttacattgccagttttttttttttatcaatttcagtaagacaaaatatactaaaatgtttaaatagcctcattcaatcttacattttgacatttcagcaatcattctggcttacagtaattagatcccctgttacgacacatgccctttgttcttaataactagcaaaaaaaaaaaaaaaaaaaaactttcatcttgttaaaatactttgccaaatgaaatagactagtcaatacatctgatgtccataattattggtaactcagttaccttctaactaataggctggttcaggagactctcccagtttataaatggttctcttgggagcctttggaagctgtattaaatctttcagtcttttatttctaattttttctcttaatctaaatagaggccagttatctattttatcagcttttattcttgaagattctcagattatgttttagtcccttttagctttaatagtccttgaaaaatacattactgtataatgtggcaattctgtaacagagacttattacttgaatgaataatcctaaaattttaatattttagctgaagtttgagatttgtggaatgaacaaaagaattagaaactttcatatgttactttgtttcagtcatctgcaaagtatgaagctgtaattctgaaatacacatccaagtgaatgagaattaaaaattttctaaatatt

SEQ ID NO: 458895 - DNA, 5432 bp, Homo sapiens
  misc_feature (3152)..(3152): n is a, c, g, or t
cggctcccgggccccctcgctcctcccctctggcccctccgagcgctgggggtgcttccctccccgcctcctcgcactcccacctcgcgggcacgccggtgggctgtgccgccatgccccagccacaggctgctcacgggcctaggcgcggcggcccgagataggggcccctgagcctcccgggggaggagagaggcagcgagccgcgcgctccgccccctccccccgggccgccgccgccgccgcctcgccgccccagcctggcgggagaaggaggaggagcagcaggcctccgggcccggcgccgccgcccgcaggacatttctgatttatttgcatccttgaagagcatctgtagaagaggaagtaaaagatgggtgtgaaaacatttactcatagctcctcttcccacagccaggaaatgcttggaaagctaaatatgctgcgaaatgatggacatttttgtgatatcactattcgtgtccaggacaaaatcttccgggcacataaggtggtactagcagcttgcagtgatttctttcgcaccaaacttgtaggccaagccgaggatgagaacaagaatgtgttggatctgcatcatgttacagtgactggctttatacctcttttagaatatgcttacacagccactctatcaattaacacagaaaatattattgatgttctagcagcagccagctatatgcaaatgttcagtgttgccagcacctgctcagagttcatgaaatcaagcattttatggaatacacccaacagccaacctgaaaagggtctagatgctggacaagaaaataattctaactgcaattttacttctcgagatgggagcatttctcccgtgtcctcagagtgcagtgtggtagaaagaaccattcctgtctgccgagaatcccggagaaagcgcaaaagctacattgttatgtctcctgaaagtcctgtaaagtgtggcacacaaacaagctcaccccaggtattgaattcttcagcttcctactcagaaaatagaaaccaaccagttgactcttccttagcttttccttggacttttccttttggaattgatcgaaggattcagcctgagaaagttaagcaagcagaaaatacccggactttagaattacctggcccatctgagaccggtagaagaatggctgattatgtgacttgtgagagcacaaaaactaccttgcctttaggtaccgaagaagatgtccgggtcaaagtagaaagattaagtgatgaggaggtccatgaggaagtgtcccagcctgtcagtgcatctcagagttcgctgagtgatcagcagacagttccaggaagtgaacaagtccaagaggaccttctgattagtccacagtcttcctctataggctcagtagatgaaggcgtttctgagggcttgcctacacttcaaagcacgtctagcactaatgctcctccggatgatgatgatcgattggaaaatgttcagtatccctaccaactctacattgctccttccaccagcagtacagagcgaccaagtccaaatggtcccgacagaccttttcagtgtccaacctgcggggtgcgattcacccgtattcagaacctaaagcagcacatgctcatccactcaggaattaaaccatttcagtgtgaccgctgtgggaaaaagttcaccagggcttactcgctaaagatgcatcgcctaaagcatgaagggcatcccaggaaatcagcttctagatctagctctgccactaactgctgttgattaaacctgtcactttacacatgaaaaagcttgaaacttagagaaagataaaattgatttcctagtaccggactacttaaaccaggaacaagaagagacccttgttcaatatgatcttggagaacacggttttgaaagcaactcctctgttcaaatgcctgtcatttcacagtaccactccaaaggcaaggaaccatgattgacaacagtcaagctgtggatgaaatgaccaggaacggagaatgaagtatgtaaatcccagcttcataggaactcttctcatactgcttttcagattaaaattgctgtttacctggtctccgaatgtaatgcctgactgtgtcattgcccggatcagttttccccctgccccatcaatatgttctcttgcatatattggcgtgctgccatataaagtaaaaatactggagatattctatattttatatataggtttatgtgttgttggggatgttttcattgtgctcttttggacataataaataattctctattgaggctacattctttttttttttctttttttttaaaagaatggcatctcactctgttgcccaggctggagtatagtggctaagtcatagctcactgcagcttcgaactcctgggctcaggccattctcctgcctcagcctcttgagtatctaggattataggcatgctccaccacacctggttaacttcatttttattttttgtagagatgaggtctcactatggtgcccaggctggtcttgaactcctagaccaagtgatcctcctcctttggcctcccagactgctgggatcactgcaccggccaaggctgcattcttaacccaactagattgtttactgaatcccatatgacagcgatacattgtccttacatatttatttttagacattgcaaagttattaaaaacagttaactatagtttttacacaacgtaggcaacaatgaagagtatagactgtaagattttcatctatgactcataaatctgggagaaaaaaattattaagactaatgagaaactgaaaaccttaaactaatgaatattatttctgctgctaaaaatatgaaactttctggtctgtagttgaaatttgtatgatcctctagacttgggtatacttttcatctggtgccattaaagcatctctaatattgatcctaaatatttgtaagtccatgagcagtgaactttggaataagtttctgtgtagatacccaaagtttaataattatgagagcacctgatttgatagacagaaaatacagttctttagtcaaaacacaagatctgaattttgttcaggtgctagaccatactaaatgtatatatttttaattatagtgatttgtttcatntttttagattggctaattctgtaattttttccccaaaaacatgtgaagaaaggaaaagtaaattaaattccttagaactgttttaggttaagattctctgtgtctgcccatattctgcagtccttaacttgttttcaactctttacctcactcatgaacttgtttttacccatttgctgccaaacataggtgtgttcccttcaggagaatcagcatatacaggttatgataggctcccaccatttatgcttcttcactgatagggttgcattactttctgcagcagactataatacttcatatagtactgctgtgtctcaactggaaaggtcaggaattttaatgttacgttgtggtctttgaaaactgttaggcctagcaatagataaatctcaaaattaattttaaaatctgtattgacaagaataggtaaaattatgaccaggaatcattgttacccttagttccaagaggtggtttttgaaagagcaagaggaaagaaaaaagaaaagaaggaaagaagaataaagaagagaaacgtgtaagaatggtttgcagattgattggttaaaagtgtttttagcacatccccaaccctgaaaacttcgcattaagagccaagcacaatgttggtagctccaagatattctgactgtgttctcagaatgagggattacccatcactgggtattccttcccaagtagaaactttagattttcactggtaatacacattgccaagttttatgggaaatctgaatatactgtgaaaatgcatatctggttagttgtctgctgcccagatcttatcaataccagtaactaaccagtatttaacataaaatgatacaaataaaggcctttttctatttcagtgagggtacatttttcttgatatatatgtactttaaggatattggatctgtttatggatctgttttaggaaacagatttgcaagggataattgtatatatagtagtatttaggtttatttcaaattcatcttagggatgcctagatgcataatttttaccaggacatattgaaaatattgcaaagagatagccagttatattatcccattcattagaaattaccagtgtaactaaacataaatattccagtttagagtgcttaaacgtagctatctttcttaaggccaggagggtaactttgtggtatctaaagggcttaaatttcagaatgcagaataaattgcctttttaaaaccaagcattttgtacaagcttttattttcagttttttaactaccaaataggtgtgatgtactttagaagtaaacaaagatgttcacccatgataatggatgttaaagctcctgcagttgttcttttcgtgtttaaagggtatattctaatagtggaagcatcaaacatgtcagtgatttcatctcattcagaaataaagagattaatattggtctttattttttggcattttaagttttatataaatggatgcagatggagattatcacccacaaatatatttaaatggatttttcttaatttgaatttcaagtaatctttttatttcaagtaattagttacgcatttagttacattgccagttttttttttttatcaatttcagtaagacaaaatatactaaaatgtttaaatagcctcattcaatcttacattttgacatttcagcaatcattctggcttacagtaattagatcccctgttacgacacatgccctttgttcttaataactagcaaaaaaaaaaaaaaaaaaaaactttcatcttgttaaaatactttgccaaatgaaatagactagtcaatacatctgatgtccataattattggtaactcagttaccttctaactaataggctggttcaggagactctcccagtttataaatggttctcttgggagcctttggaagctgtattaaatctttcagtcttttatttctaattttttctcttaatctaaatagaggccagttatctattttatcagcttttattcttgaagattctcagattatgttttagtcccttttagctttaatagtccttgaaaaatacattactgtataatgtggcaattctgtaacagagacttattacttgaatgaataatcctaaaattttaatattttagctgaagtttgagatttgtggaatgaacaaaagaattagaaactttcatatgttactttgtttcagtcatctgcaaagtatgaagctgtaattctgaaatacacatccaagtgaatgagaattaaaaattttctaaatatt

SEQ ID NO: 458896 - DNA, 3733 bp, Homo sapiens
cggctcccgggccccctcgctcctcccctctggcccctccgagcgctgggggtgcttccctccccgcctcctcgcactcccacctcgcgggcacgccggtgggctgtgccgccatgccccagccacaggctgctcacgggcctaggcgcggcggcccgagataggggcccctgagcctcccgggggaggagagaggcagcgagccgcgcgctccgccccctccccccgggccgccgccgccgccgcctcgccgccccagcctggcgggagaaggaggaggagcagcaggcctccgggcccggcgccgccgcccgcaggacatttctgatttatttgcatccttgaagagcatctgtagaagaggaagtaaaagatgggtgtgaaaacatttactcatagctcctcttcccacagccaggaaatgcttggaaagctaaatatgctgcgaaatgatggacatttttgtgatatcactattcgtgtccaggacaaaatcttccgggcacataaggtggtactagcagcttgcagtgatttctttcgcaccaaacttgtaggccaagccgaggatgagaacaagaatgtgttggatctgcatcatgttacagtgactggctttatacctcttttagaatatgcttacacagccactctatcaattaacacagaaaatattattgatgttctagcagcagccagctatatgcaaatgttcagtgttgccagcacctgctcagagttcatgaaatcaagcattttatggaatacacccaacagccaacctgaaaagggtctagatgctggacaagaaaataattctaactgcaattttacttctcgagatgggagcatttctcccgtgtcctcagagtgcagtgtggtagaaagaaccattcctgtctgccgagaatcccggagaaagcgcaaaagctacattgttatgtctcctgaaagtcctgtaaagtgtggcacacaaacaagctcaccccaggtattgaattcttcagcttcctactcagaaaatagaaaccaaccagttgactcttccttagcttttccttggacttttccttttggaattgatcgaaggattcagcctgagaaagttaagcaagcagaaaatacccggactttagaattacctggcccatctgagaccggtagaagaatggctgattatgtgacttgtgagagcacaaaaactaccttgcctttaggtaccgaagaagatgtccgggtcaaagtagaaagattaagtgatgaggaggtccatgaggaagtgtcccagcctgtcagtgcatctcagagttcgctgagtgatcagcagacagttccaggaagtgaacaagtccaagaggaccttctgattagtccacagtcttcctctataggctcagtagatgaaggcgtttctgagggcttgcctacacttcaaagcacgtctagcactaatgctcctccggatgatgatgatcgattggaaaatgttcagtatccctaccaactctacattgctccttccaccagcagtacagagcgaccaagtccaaatggtcccgacagaccttttcagtgtccaacctgcggggtgcgattcacccgtattcagaacctaaagcagcacatgctcatccactcaggaattaaaccatttcagtgtgaccgctgtgggaaaaagttcaccagggcttactcgctaaagatgcatcgcctaaagcatgaagtgatttcctagtaccggactacttaaaccaggaacaagaagagacccttgttcaatatgatcttggagaacacggttttgaaagcaactcctctgttcaaatgcctgtcatttcacagtaccactccaaaggcaaggaaccatgattgacaacagtcaagctgtggatgaaatgaccaggaacggagaatgaattccaagaggtggtttttgaaagagcaagaggaaagaaaaaagaaaagaaggaaagaagaataaagaagagaaacgtgtaagaatggtttgcagattgattggttaaaagtgtttttagcacatccccaaccctgaaaacttcgcattaagagccaagcacaatgttggtagctccaagatattctgactgtgttctcagaatgagggattacccatcactgggtattccttcccaagtagaaactttagattttcactggtaatacacattgccaagttttatgggaaatctgaatatactgtgaaaatgcatatctggttagttgtctgctgcccagatcttatcaataccagtaactaaccagtatttaacataaaatgatacaaataaaggcctttttctatttcagtgagggtacatttttcttgatatatatgtactttaaggatattggatctgtttatggatctgttttaggaaacagatttgcaagggataattgtatatatagtagtatttaggtttatttcaaattcatcttagggatgcctagatgcataatttttaccaggacatattgaaaatattgcaaagagatagccagttatattatcccattcattagaaattaccagtgtaactaaacataaatattccagtttagagtgcttaaacgtagctatctttcttaaggccaggagggtaactttgtggtatctaaagggcttaaatttcagaatgcagaataaattgcctttttaaaaccaagcattttgtacaagcttttattttcagttttttaactaccaaataggtgtgatgtactttagaagtaaacaaagatgttcacccatgataatggatgttaaagctcctgcagttgttcttttcgtgtttaaagggtatattctaatagtggaagcatcaaacatgtcagtgatttcatctcattcagaaataaagagattaatattggtctttattttttggcattttaagttttatataaatggatgcagatggagattatcacccacaaatatatttaaatggatttttcttaatttgaatttcaagtaatctttttatttcaagtaattagttacgcatttagttacattgccagttttttttttttatcaatttcagtaagacaaaatatactaaaatgtttaaatagcctcattcaatcttacattttgacatttcagcaatcattctggcttacagtaattagatcccctgttacgacacatgccctttgttcttaataactagcaaaaaaaaaaaaaaaaaaaaactttcatcttgttaaaatactttgccaaatgaaatagactagtcaatacatctgatgtccataattattggtaactcagttaccttctaactaataggctggttcaggagactctcccagtttataaatggttctcttgggagcctttggaagctgtattaaatctttcagtcttttatttctaattttttctcttaatctaaatagaggccagttatctattttatcagcttttattcttgaagattctcagattatgttttagtcccttttagctttaatagtccttgaaaaatacattactgtataatgtggcaattctgtaacagagacttattacttgaatgaataatcctaaaattttaatattttagctgaagtttgagatttgtggaatgaacaaaagaattagaaactttcatatgttactttgtttcagtcatctgcaaagtatgaagctgtaattctgaaatacacatccaagtgaatgagaattaaaaattttctaaatatt

SEQ ID NO: 458897 - DNA, 448 bp, Homo sapiens
agatgtttcaacattaccagtttaaattcttaagaatccatataaatggtttattataattccaaaagtgagtgactttacaattttacaggggtgaacatataagggaaatggtgaagcaaatcaatgatatccgcaatcatgtaaacttctgacaccaccaggagctgactcacacctgaactgaacaccattgaaggcttaaacccatattgtaaaacaggtagaattatctaatttataaaaaggtgttttgatgacctttggtgtggttcatctttttaaatatgttgttttataataattgagtaaatgcttttatttaaaatttggaatgtgctttcacctgaactgaacaccattgaaggcttaaacccatattgtaaaacaggtagaattatctaatttatacaaaggtgttttgatgacctttggtgtggttcatctt

SEQ ID NO: 458898 - DNA, 469 bp, Homo sapiens
  misc_feature (7)..(7): n is a, c, g, or t
cggtacncagcctttccggcgggtaaggactctccctcccttgtatatcagaaaacaattgttcatttcagacaagaacctcactgcatttaacccaatatcattagcattttaatttggagacttgtctaagcatcatttcatttatgtaatgtcttccatggtagatgaagaagataaggatagtttacaggaactctctacagaacagaaatgctttgttgaacacatcctttgtacgaagccattgccctgcaggtaaggactctccctcccttgtatatcagaaaacaattgttcatttcagcagttcagatacgtttgtatccgttacactcacatccacagtattcactgctgagtcatttgaaagttgcagacgtgatacttctcccctaagagtgtcctgctcatcagaagctttctcctctccagggccactcgacatactgtttcctgactggaaggt

SEQ ID NO: 458899 - DNA, 5254 bp, Homo sapiens
gataaacccacaagacacaaaacatacctttcgagcagttgggccaagatggcggccgccgagggaccggtgggcgacggcgagctgtggcagacctggcttcctaaccacgtcgtgttcttgcggctccgggagggactgaaaaaccagagtccaaccgaagctgagaaaccagcttcttcgtcgttgccttcgtcgccgccgccgcagttgctgacgagaaacgtggtctttggcctcggcggagagcttttcctgtgggacggagaagacagctccttcttagtcgttcgccttcggggccccagcggcggcggcgaagagcccgccctgtcccagtaccagagattgctttgcataaatccacccctgtttgaaatctatcaagtcttgttaagcccaacacaacatcatgtagcacttataggaataaaaggacttatggtattagaattacctaaaagatgggggaagaattctgaatttgaaggtggaaaatcaacagtgaattgtagtaccactccagttgcggagagatttttcaccagttccacctctctgactctaaagcatgctgcatggtatccaagtgaaatcctggatccccacgtagtgctgttaacatcagacaacgtaatcagaatttactcactacgtgagccgcagacacccactaacgtgataatactttcagaagccgaagaggaaagtctagtactcaataaaggaagggcgtataccgcatctctaggagagacagcagttgcatttgactttgggccattggcagcagtcccaaagactctatttggacaaaacggcaaagatgaagtagtggcatacccactgtacatcttatatgaaaatggagagactttcctgacatacatcagtctgttacacagccctggaaatattggaaagctgttgggtccattgcccatgcatcctgcggctgaagataactatggttatgatgcgtgtgctgtactctgcttaccctgtgtccccaatatcttagtgatcgctactgaatcaggaatgctgtatcactgtgtcgtgctagaaggggaagaagaagatgaccacacgtcagaaaagtcctgggattccaggattgacctcattccttctctgtatgtgtttgaatgtgttgagttggagcttgctttgaaactggcatctggagaggatgacccttttgattctgacttttcttgtccagtcaaacttcatagagatcccaagtgtccttcaagatatcactgtactcatgaagctggtgtacatagtgttgggctaacttggattcataaacttcacaaatttcttggatcaggcagccagctccaattcgaggattttggattgtacctgacattctgggacccacgatgatctgcatcaccagtacctatgaatgcctcatatggccgttattaagtacagtccatccagcgtctcctcccctgctttgtactcgagaagatgttgaagtggcagagtctcccctccgtgttctggctgaaaccccagattcctttgaaaagcatattagaagcattttgcaacgtagtgttgccaatccagcatttttgaaagcttctgaaaaggacatagcccctcctcctgaagaatgccttcagctcctcagcagagccacccaggtgttcagagagcagtacattctcaaacaggacttggcaaaggaggagattcagcggagggtcaaattattatgtgaccaaaaaaagaaacaactagaagatctcagttattgtcgagaagagaggaaaagtctgcgggaaatggctgagcgtttagctgacaaatatgaggaagctaaagaaaaacaagaggatatcatgaacaggatgaaaaaactacttcacagttttcactctgagctcccagttctctctgatagtgagcgagacatgaagaaagaattacagctgatacctgatcaacttcgacatttgggcaatgccatcaaacaggttactatgaaaaaggattatcaacagcaaaagatggagaaggtgttgagtcttccaaaacccaccattattctcagtgcctaccagcgaaagtgcattcagtccatcctgaaagaggagggtgaacatataagggaaatggtgaagcaaatcaatgatatccgcaatcatgtaaacttctgacaccaccaggagctgactcacacctgaactgaacaccattgaaggcttaaacccatattgtaaaacaggtagaattatctaatttataaaaaggtgttttgatgacctttggtgtggttcatctttttaaatatgttgttttataataattgagtaaatgcttttatttaaaatttggaatgtgctttataactcaagcctacagttgtgttcagcaaggactcaggattatttcacactgcacactgccagaacctccctgaaccctattgagttttctccatatttgagcaagttagttattcttgtgagctgtgttttaaagtagcagcaccagaaacatgactctgaagagggatagaaccctaggattcaaaggagaagaccacacagtgtacttggcagcagcttttttaatttgaacactttcttcttgaggacacaccttcagtacagttaacaaatggttacacctgaaatctgctgagagcagagcttaagatccacaattgcaaaggccactgctggctcacttcctcacaggctgtattacctttcagagctgagtgaggctgtgctctacgtcccaatacttgttactgagtggacatgaggtgcaagtttagcaccttaaagggagaaaaaaataggttagtatgcagaatgtgattttgtcctcacttcaccttaagtcatctttttacacttgccaatgtgagttctgaaaggtagtactatatctgcttagaaatggctgagtgactgccaattaaaagccacatgataaggtaggttacaggtaagaggtaaatcaggttagacatgcatgagaacatgtaggcacagactgaatataagcacaggaacactcgtgaaacccaactgagcttttcttttgcctagaagggctaaatcctgccttctacatcagttcccatttatgctgaaaacccagttgaaagaattgtttcctacctggacagtgacacagtagtttgtttcataccagaaacacattgctaaacaaaacttaagagtctcagtttgggtttttctacaataaagtgaattccaacagttggcatttgccacagtagagaccactaaccattccctaattgtgatgattttattacccagcaccatcttctggagaaaaatatctgtaaggtgctcagtctcagcagaacacttcactgcaagctctagttcagtcagttcagaaaggctgtgaattgcccaccctgatttacagcactaattttaataatctgaagacaaattcgcttggggcttatccaagggactagtcttaaacctacgtaatttaaattgattgcattttataattaataaaatcccctgtaactcaatagttatatgtttcctttatctaaaccatgtagcactctttataaagggactttaaaccaattaaaataatgtttcatgtgcggcaagcctttagtactatttccataattggtatttatttttaaattcataatcatgaatgcaagactacaataataacccaagagatgaggtatgtagtacttatcatttgtcctatggaagacagaagtacagaagatctttagggtaagtccatagtgacctcatttataacaaagacaattcactttaagttgatggtggcgttatgtgaacaaaacaatctacctagttcactaactcccagaaggctctttcaggtaccctgctgttatgcaaccagtctcaaaaatgatttgaaaaccatcttacttttgaacctcctggatgatgaatccatccactggatattcctgggacagtactctcagcaggtattgatgaacatgaatcaattctttgtgctttctgtagcacttcataaagttatggcaaagacctgtttcactgaggctttcttcacacaggaaaggaatctaatgcttgtaaaatgacaagacagatttccaattctaactaactggctttccataagcattgtcacttacttacattccaggtctgaattcaaaagaaaaatacaaagtatctgtcaacctagttaccatttttgtatttgacacatttgaaacaagtagtacgtaagcctaatgatccaagttgaaaaattagcctatttaaaaacgtatactaatgtttttcactgatccaataactagactaaaacacttcaaaagagtagatggtaccagttcggctttatcctggtaccctgtgggcccatgaagatcatctaagtatgcagaaaaagtgcttccaaagtttcttgtgcttttcctttaaccttcaacttccagtatatatagccccagccaagttttcagatcctcatcattaattcacttcatgaattggttttgtttgccacagtcctatggttctcaggtaagtttcagtagcatttaaggtcctccaaagcaagataagataaaatggtaaaaggaaaacaaaatacagtcagtagccaatggcctgctctcaaaccttcatattttaatataaaatattcatacagcatactacacttctgtctgctaactgaatactgttactgatgagctctagacaacagataaagcaaattctctcttccaatatctatgaacagaaaattccaaacactactgggatgtcgctttagggtagggaaatgtgttccgaaaatctgtcttggagaaagcaggcaaggaaacagcgctttttccatcaccaaatctgatcccacgcctgttggaatcaagcctggagtttatagtgttcgcatttgaaggtctctgggctgcagatcaccccactgtttgctgtttcctgtgccgcacagtcttctccctctagaagtaagcatttctccagtcttccttttgttgtgacttctctttcttcagttaagagttaaataataattactgttgctctaaagatgagttaaaaacccaaagtgcaggctagaatcctgccatgagggtgtcatgtctcaggaagctggttaatgtctgtcagtttagtatcattcagaattgcccggattctctccaaggagtcagcttgccggatcc

SEQ ID NO: 458900 - DNA, 5302 bp, Homo sapiens
gataaacccacaagacacaaaacatacctttcgagcagttgggccaagatggcggccgccgagggaccggtgggcgacggcgagctgtggcagacctggcttcctaaccacgtcgtgttcttgcggctccgggagggactgaaaaaccagagtccaaccgaagctgagaaaccagcttcttcgtcgttgccttcgtcgccgccgccgcagttgctgacgagaaacgtggtctttggcctcggcggagagcttttcctgtgggacggagaagacagctccttcttagtcgttcgccttcggggccccagcggcggcggcgaagagcccgccctgtcccagtaccagagattgctttgcataaatccacccctgtttgaaatctatcaagtcttgttaagcccaacacaacatcatgtagcacttataggaataaaaggacttatggtattagaattacctaaaagatgggggaagaattctgaatttgaaggtggaaaatcaacagtgaattgtagtaccactccagttgcggagagatttttcaccagttccacctctctgactctaaagcatgctgcatggtatccaagtgaaatcctggatccccacgtagtgctgttaacatcagacaacgtaatcagaatttactcactacgtgagccgcagacacccactaacgtgataatactttcagaagccgaagaggaaagtctagtactcaataaaggaagggcgtataccgcatctctaggagagacagcagttgcatttgactttgggccattggcagcagtcccaaagactctatttggacaaaacggcaaagatgaagtagtggcatacccactgtacatcttatatgccctggaaatattggaaagctgttgggtccattgcccatgcatcctgcggctgaagataactatggttatgatgcgtgtgctgtactctgcttaccctgtgtccccaatatcttagtgatcgctactgaatcaggaatgctgtatcactgtgtcgtgctagaaggggaagaagaagatgaccacacgtcagaaaagtcctgggattccaggattgacctcattccttctctgtatgtgtttgaatgtgttgagttggagcttgctttgaaactggcatctggagaggatgacccttttgattctgacttttcttgtccagtcaaacttcatagagatcccaagtgtccttcaagatatcactgtactcatgaagctggtgtacatagtgttgggctaacttggattcataaacttcacaaatttcttggatcagatgaagaagataaggatagtttacaggaactctctacagaacagaaatgctttgttgaacacatcctttgtacgaagccattgccctgcaggcagccagctccaattcgaggattttggattgtacctgacattctgggacccacgatgatctgcatcaccagtacctatgaatgcctcatatggccgttattaagtacagtccatccagcgtctcctcccctgctttgtactcgagaagatgttgaagtggcagagtctcccctccgtgttctggctgaaaccccagattcctttgaaaagcatattagaagcattttgcaacgtagtgttgccaatccagcatttttgaaagcttctgaaaaggacatagcccctcctcctgaagaatgccttcagctcctcagcagagccacccaggtgttcagagagcagtacattctcaaacaggacttggcaaaggaggagattcagcggagggtcaaattattatgtgaccaaaaaaagaaacaactagaagatctcagttattgtcgagaagagaggaaaagtctgcgggaaatggctgagcgtttagctgacaaatatgaggaagctaaagaaaaacaagaggatatcatgaacaggatgaaaaaactacttcacagttttcactctgagctcccagttctctctgatagtgagcgagacatgaagaaagaattacagctgatacctgatcaacttcgacatttgggcaatgccatcaaacaggttactatgaaaaaggattatcaacagcaaaagatggagaaggtgttgagtcttccaaaacccaccattattctcagtgcctaccagcgaaagtgcattcagtccatcctgaaagaggagggtgaacatataagggaaatggtgaagcaaatcaatgatatccgcaatcatgtaaacttctgacaccaccaggagctgactcacacctgaactgaacaccattgaaggcttaaacccatattgtaaaacaggtagaattatctaatttataaaaaggtgttttgatgacctttggtgtggttcatctttttaaatatgttgttttataataattgagtaaatgcttttatttaaaatttggaatgtgctttataactcaagcctacagttgtgttcagcaaggactcaggattatttcacactgcacactgccagaacctccctgaaccctattgagttttctccatatttgagcaagttagttattcttgtgagctgtgttttaaagtagcagcaccagaaacatgactctgaagagggatagaaccctaggattcaaaggagaagaccacacagtgtacttggcagcagcttttttaatttgaacactttcttcttgaggacacaccttcagtacagttaacaaatggttacacctgaaatctgctgagagcagagcttaagatccacaattgcaaaggccactgctggctcacttcctcacaggctgtattacctttcagagctgagtgaggctgtgctctacgtcccaatacttgttactgagtggacatgaggtgcaagtttagcaccttaaagggagaaaaaaataggttagtatgcagaatgtgattttgtcctcacttcaccttaagtcatctttttacacttgccaatgtgagttctgaaaggtagtactatatctgcttagaaatggctgagtgactgccaattaaaagccacatgataaggtaggttacaggtaagaggtaaatcaggttagacatgcatgagaacatgtaggcacagactgaatataagcacaggaacactcgtgaaacccaactgagcttttcttttgcctagaagggctaaatcctgccttctacatcagttcccatttatgctgaaaacccagttgaaagaattgtttcctacctggacagtgacacagtagtttgtttcataccagaaacacattgctaaacaaaacttaagagtctcagtttgggtttttctacaataaagtgaattccaacagttggcatttgccacagtagagaccactaaccattccctaattgtgatgattttattacccagcaccatcttctggagaaaaatatctgtaaggtgctcagtctcagcagaacacttcactgcaagctctagttcagtcagttcagaaaggctgtgaattgcccaccctgatttacagcactaattttaataatctgaagacaaattcgcttggggcttatccaagggactagtcttaaacctacgtaatttaaattgattgcattttataattaataaaatcccctgtaactcaatagttatatgtttcctttatctaaaccatgtagcactctttataaagggactttaaaccaattaaaataatgtttcatgtgcggcaagcctttagtactatttccataattggtatttatttttaaattcataatcatgaatgcaagactacaataataacccaagagatgaggtatgtagtacttatcatttgtcctatggaagacagaagtacagaagatctttagggtaagtccatagtgacctcatttataacaaagacaattcactttaagttgatggtggcgttatgtgaacaaaacaatctacctagttcactaactcccagaaggctctttcaggtaccctgctgttatgcaaccagtctcaaaaatgatttgaaaaccatcttacttttgaacctcctggatgatgaatccatccactggatattcctgggacagtactctcagcaggtattgatgaacatgaatcaattctttgtgctttctgtagcacttcataaagttatggcaaagacctgtttcactgaggctttcttcacacaggaaaggaatctaatgcttgtaaaatgacaagacagatttccaattctaactaactggctttccataagcattgtcacttacttacattccaggtctgaattcaaaagaaaaatacaaagtatctgtcaacctagttaccatttttgtatttgacacatttgaaacaagtagtacgtaagcctaatgatccaagttgaaaaattagcctatttaaaaacgtatactaatgtttttcactgatccaataactagactaaaacacttcaaaagagtagatggtaccagttcggctttatcctggtaccctgtgggcccatgaagatcatctaagtatgcagaaaaagtgcttccaaagtttcttgtgcttttcctttaaccttcaacttccagtatatatagccccagccaagttttcagatcctcatcattaattcacttcatgaattggttttgtttgccacagtcctatggttctcaggtaagtttcagtagcatttaaggtcctccaaagcaagataagataaaatggtaaaaggaaaacaaaatacagtcagtagccaatggcctgctctcaaaccttcatattttaatataaaatattcatacagcatactacacttctgtctgctaactgaatactgttactgatgagctctagacaacagataaagcaaattctctcttccaatatctatgaacagaaaattccaaacactactgggatgtcgctttagggtagggaaatgtgttccgaaaatctgtcttggagaaagcaggcaaggaaacagcgctttttccatcaccaaatctgatcccacgcctgttggaatcaagcctggagtttatagtgttcgcatttgaaggtctctgggctgcagatcaccccactgtttgctgtttcctgtgccgcacagtcttctccctctagaagtaagcatttctccagtcttccttttgttgtgacttctctttcttcagttaagagttaaataataattactgttgctctaaagatgagttaaaaacccaaagtgcaggctagaatcctgccatgagggtgtcatgtctcaggaagctggttaatgtctgtcagtttagtatcattcagaattgcccggattctctccaaggagtcagcttgccggatcc

SEQ ID NO: 458901 - DNA, 5333 bp, Homo sapiens
ggaggaggggtgcacacgctagtacaagctggttaaaatcggcgagggcgcgcgagtgagggcgacggcgagctgtggcagacctggcttcctaaccacgtcgtgttcttgcggctccgggagggactgaaaaaccagagtccaaccgaagctgagaaaccagcttcttcgtcgttgccttcgtcgccgccgccgcagttgctgacgagaaacgtggtctttggcctcggcggagagcttttcctgtgggacggagaagacagctccttcttagtcgttcgccttcggggccccagcggcggcggcgaagagcccgccctgtcccagtaccagagattgctttgcataaatccacccctgtttgaaatctatcaagtcttgttaagcccaacacaacatcatgtagcacttataggaataaaaggacttatggtattagaattacctaaaagatgggggaagaattctgaatttgaaggtggaaaatcaacagtgaattgtagtaccactccagttgcggagagatttttcaccagttccacctctctgactctaaagcatgctgcatggtatccaagtgaaatcctggatccccacgtagtgctgttaacatcagacaacgtaatcagaatttactcactacgtgagccgcagacacccactaacgtgataatactttcagaagccgaagaggaaagtctagtactcaataaaggaagggcgtataccgcatctctaggagagacagcagttgcatttgactttgggccattggcagcagtcccaaagactctatttggacaaaacggcaaagatgaagtagtggcatacccactgtacatcttatatgaaaatggagagactttcctgacatacatcagtctgttacacagccctggaaatattggaaagctgttgggtccattgcccatgcatcctgcggctgaagataactatggttatgatgcgtgtgctgtactctgcttaccctgtgtccccaatatcttagtgatcgctactgaatcaggaatgctgtatcactgtgtcgtgctagaaggggaagaagaagatgaccacacgtcagaaaagtcctgggattccaggattgacctcattccttctctgtatgtgtttgaatgtgttgagttggagcttgctttgaaactggcatctggagaggatgacccttttgattctgacttttcttgtccagtcaaacttcatagagatcccaagtgtccttcaagatatcactgtactcatgaagctggtgtacatagtgttgggctaacttggattcataaacttcacaaatttcttggatcagatgaagaagataaggatagtttacaggaactctctacagaacagaaatgctttgttgaacacatcctttgtacgaagccattgccctgcaggcagccagctccaattcgaggattttggattgtacctgacattctgggacccacgatgatctgcatcaccagtacctatgaatgcctcatatggccgttattaagtacagtccatccagcgtctcctcccctgctttgtactcgagaagatgttgaagtggcagagtctcccctccgtgttctggctgaaaccccagattcctttgaaaagcatattagaagcattttgcaacgtagtgttgccaatccagcatttttgaaagcttctgaaaaggacatagcccctcctcctgaagaatgccttcagctcctcagcagagccacccaggtgttcagagagcagtacattctcaaacaggacttggcaaaggaggagattcagcggagggtcaaattattatgtgaccaaaaaaagaaacaactagaagatctcagttattgtcgagaagagaggaaaagtctgcgggaaatggctgagcgtttagctgacaaatatgaggaagctaaagaaaaacaagaggatatcatgaacaggatgaaaaaactacttcacagttttcactctgagctcccagttctctctgatagtgagcgagacatgaagaaagaattacagctgatacctgatcaacttcgacatttgggcaatgccatcaaacaggttactatgaaaaaggattatcaacagcaaaagatggagaaggtgttgagtcttccaaaacccaccattattctcagtgcctaccagcgaaagtgcattcagtccatcctgaaagaggagggtgaacatataagggaaatggtgaagcaaatcaatgatatccgcaatcatgtaaacttctgacaccaccaggagctgactcacacctgaactgaacaccattgaaggcttaaacccatattgtaaaacaggtagaattatctaatttataaaaaggtgttttgatgacctttggtgtggttcatctttttaaatatgttgttttataataattgagtaaatgcttttatttaaaatttggaatgtgctttataactcaagcctacagttgtgttcagcaaggactcaggattatttcacactgcacactgccagaacctccctgaaccctattgagttttctccatatttgagcaagttagttattcttgtgagctgtgttttaaagtagcagcaccagaaacatgactctgaagagggatagaaccctaggattcaaaggagaagaccacacagtgtacttggcagcagcttttttaatttgaacactttcttcttgaggacacaccttcagtacagttaacaaatggttacacctgaaatctgctgagagcagagcttaagatccacaattgcaaaggccactgctggctcacttcctcacaggctgtattacctttcagagctgagtgaggctgtgctctacgtcccaatacttgttactgagtggacatgaggtgcaagtttagcaccttaaagggagaaaaaaataggttagtatgcagaatgtgattttgtcctcacttcaccttaagtcatctttttacacttgccaatgtgagttctgaaaggtagtactatatctgcttagaaatggctgagtgactgccaattaaaagccacatgataaggtaggttacaggtaagaggtaaatcaggttagacatgcatgagaacatgtaggcacagactgaatataagcacaggaacactcgtgaaacccaactgagcttttcttttgcctagaagggctaaatcctgccttctacatcagttcccatttatgctgaaaacccagttgaaagaattgtttcctacctggacagtgacacagtagtttgtttcataccagaaacacattgctaaacaaaacttaagagtctcagtttgggtttttctacaataaagtgaattccaacagttggcatttgccacagtagagaccactaaccattccctaattgtgatgattttattacccagcaccatcttctggagaaaaatatctgtaaggtgctcagtctcagcagaacacttcactgcaagctctagttcagtcagttcagaaaggctgtgaattgcccaccctgatttacagcactaattttaataatctgaagacaaattcgcttggggcttatccaagggactagtcttaaacctacgtaatttaaattgattgcattttataattaataaaatcccctgtaactcaatagttatatgtttcctttatctaaaccatgtagcactctttataaagggactttaaaccaattaaaataatgtttcatgtgcggcaagcctttagtactatttccataattggtatttatttttaaattcataatcatgaatgcaagactacaataataacccaagagatgaggtatgtagtacttatcatttgtcctatggaagacagaagtacagaagatctttagggtaagtccatagtgacctcatttataacaaagacaattcactttaagttgatggtggcgttatgtgaacaaaacaatctacctagttcactaactcccagaaggctctttcaggtaccctgctgttatgcaaccagtctcaaaaatgatttgaaaaccatcttacttttgaacctcctggatgatgaatccatccactggatattcctgggacagtactctcagcaggtattgatgaacatgaatcaattctttgtgctttctgtagcacttcataaagttatggcaaagacctgtttcactgaggctttcttcacacaggaaaggaatctaatgcttgtaaaatgacaagacagatttccaattctaactaactggctttccataagcattgtcacttacttacattccaggtctgaattcaaaagaaaaatacaaagtatctgtcaacctagttaccatttttgtatttgacacatttgaaacaagtagtacgtaagcctaatgatccaagttgaaaaattagcctatttaaaaacgtatactaatgtttttcactgatccaataactagactaaaacacttcaaaagagtagatggtaccagttcggctttatcctggtaccctgtgggcccatgaagatcatctaagtatgcagaaaaagtgcttccaaagtttcttgtgcttttcctttaaccttcaacttccagtatatatagccccagccaagttttcagatcctcatcattaattcacttcatgaattggttttgtttgccacagtcctatggttctcaggtaagtttcagtagcatttaaggtcctccaaagcaagataagataaaatggtaaaaggaaaacaaaatacagtcagtagccaatggcctgctctcaaaccttcatattttaatataaaatattcatacagcatactacacttctgtctgctaactgaatactgttactgatgagctctagacaacagataaagcaaattctctcttccaatatctatgaacagaaaattccaaacactactgggatgtcgctttagggtagggaaatgtgttccgaaaatctgtcttggagaaagcaggcaaggaaacagcgctttttccatcaccaaatctgatcccacgcctgttggaatcaagcctggagtttatagtgttcgcatttgaaggtctctgggctgcagatcaccccactgtttgctgtttcctgtgccgcacagtcttctccctctagaagtaagcatttctccagtcttccttttgttgtgacttctctttcttcagttaagagttaaataataattactgttgctctaaagatgagttaaaaacccaaagtgcaggctagaatcctgccatgagggtgtcatgtctcaggaagctggttaatgtctgtcagtttagtatcattcagaattgcccggattctctccaaggagtcagcttgccggatcc

SEQ ID NO: 458902 - DNA, 3644 bp, Homo sapiens
gataaacccacaagacacaaaacatacctttcgagcagttgggccaagatggcggccgccgagggaccggtgggcgacggcgagctgtggcagacctggcttcctaaccacgtcgtgttcttgcggctccgggagggactgaaaaaccagagtccaaccgaagctgagaaaccagcttcttcgtcgttgccttcgtcgccgccgccgcagttgctgacgagaaacgtggtctttggcctcggcggagagcttttcctgtgggacggagaagacagctccttcttagtcgttcgccttcggggccccagcggcggcggcgaagagcccgccctgtcccagtaccagagattgctttgcataaatccacccctgtttgaaatctatcaagtcttgttaagcccaacacaacatcatgtagcacttataggaataaaaggacttatggtattagaattacctaaaagatgggggaagaattctgaatttgaaggtggaaaatcaacagtgaattgtagtaccactccagttgcggagagatttttcaccagttccacctctctgactctaaagcatgctgcatggtatccaagtgaaatcctggatccccacgtagtgctgttaacatcagacaacgtaatcagaatttactcactacgtgagccgcagacacccactaacgtgataatactttcagaagccgaagaggaaagtctagtactcaataaaggaagggcgtataccgcatctctaggagagacagcagttgcatttgactttgggccattggcagcagtcccaaagactctatttggacaaaacggcaaagatgaagtagtggcatacccactgtacatcttatatgaaaatggagagactttcctgacatacatcagtctgttacacagccctggaaatattggaaagctgttgggtccattgcccatgcatcctgcggctgaagataactatggttatgatgcgtgtgctgtactctgcttaccctgtgtccccaatatcttagtgatcgctactgaatcaggaatgctgtatcactgtgtcgtgctagaaggggaagaagaagatgaccacacgtcagaaaagtcctgggattccaggattgacctcattccttctctgtatgtgtttgaatgtgttgagttggagcttgctttgaaactggcatctggagaggatgacccttttgattctgacttttcttgtccagtcaaacttcatagagatcccaagtgtccttcaagatatcactgtactcatgaagctggtgtacatagtgttgggctaacttggattcataaacttcacaaatttcttggatcagatgaagaagataaggatagtttacaggaactctctacagaacagaaatgctttgttgaacacatcctttgtacgaagccattgccctgcaggcagccagctccaattcgaggattttggattgtacctgacattctgggacccacgatgatctgcatcaccagtacctatgaatgcctcatatggccgttattaagtacagtccatccagcgtctcctcccctgctttgtactcgagaagatgttgaagtggcagagtctcccctccgtgttctggctgaaaccccagattcctttgaaaagcatattagaagcattttgcaacgtagtgttgccaatccagcatttttgaaagcttctgaaaaggacatagcccctcctcctgaagaatgccttcagctcctcagcagagccacccaggtgttcagagagcagtacattctcaaacaggacttggcaaaggaggagattcagcggagggtcaaattattatgtgaccaaaaaaagaaacaactagaagatctcagttattgtcgagaagagaggaaaagtctgcgggaaatggctgagcgtttagctgacaaatatgaggaagctaaagaaaaacaagaggatatcatgaacaggatgaaaaaactacttcacagttttcactctgagctcccagttctctctgatagtgagcgagacatgaagaaagaattacagctgatacctgatcaacttcgacatttgggcaatgccatcaaacaggttactatgaaaaaggattatcaacagcaaaagatggagaaggtgttgagtcttccaaaacccaccattattctcagtgcctaccagcgaaagtgcattcagtccatcctgaaagaggagggtgaacatataagggaaatggtgaagcaaatcaatgatatccgcaatcatgtaaacttctgacaccaccaggagctgactcacacctgaactgaacaccattgaaggcttaaacccatattgtaaaacaggtagaattatctaatttataaaaaggtgttttgatgacctttggtgtggttcatctttttaaatatgttgttttataataattgagtaaatgcttttatttaaaatttggaatgtgctttataactcaagcctacagttgtgttcagcaaggactcaggattatttcacactgcacactgccagaacctccctgaaccctattgagttttctccatatttgagcaagttagttattcttgtgagctgtgttttaaagtagcagcaccagaaacatgactctgaagagggatagaaccctaggattcaaaggagaagaccacacagtgtacttggcagcagcttttttaatttgaacactttcttcttgaggacacaccttcagtacagttaacaaatggttacacctgaaatctgctgagagcagagcttaagatccacaattgcaaaggccactgctggctcacttcctcacaggctgtattacctttcagagctgagtgaggctgtgctctacgtcccaatacttgttactgagtggacatgaggtgcaagtttagcaccttaaagggagaaaaaaataggttagtatgcagaatgtgattttgtcctcacttcaccttaagtcatctttttacacttgccaatgtgagttctgaaaggtagtactatatctgcttagaaatggctgagtgactgccaattaaaagccacatgataaggtaggttacaggtaagaggtaaatcaggttagacatgcatgagaacatgtaggcacagactgaatataagcacaggaacactcgtgaaacccaactgagcttttcttttgcctagaagggctaaatcctgccttctacatcagttcccatttatgctgaaaacccagttgaaagaattgtttcctacctggacagtgacacagtagtttgtttcataccagaaacacattgctaaacaaaacttaagagtctcagtttgggtttttctacaataaagtgaattccaacagttggcatttgccacagtagagaccactaaccattccctaattgtgatgattttattacccagcaccatcttctggagaaaaatatctgtaaggtgctcagtctcagcagaacacttcactgcaagctctagttcagtcagttcagaaaggctgtgaattgcccaccctgatttacagcactaattttaataatctgaagacaaattcgcttggggcttatccaagggactagtgtaagcaggaagtgatttcaatcctttgctttttatcatgcatccgttccccggtaact

SEQ ID NO: 458903 - DNA, 5291 bp, Homo sapiens
gataaacccacaagacacaaaacatacctttcgagcagttgggccaagatggcggccgccgagggaccggtgggcgacggcgagctgtggcagacctggcttcctaaccacgtcgtgttcttgcggctccgggagggactgaaaaaccagagtccaaccgaagctgagaaaccagcttcttcgtcgttgccttcgtcgccgccgccgcagttgctgacgagaaacgtggtctttggcctcggcggagagcttttcctgtgggacggagaagacagctccttcttagtcgttcgccttcggggccccagcggcggcggcgaagagcccgccctgtcccagtaccagagattgctttgcataaatccacccctgtttgaaatctatcaagtcttgttaagcccaacacaacatcatgtagcacttataggaataaaaggacttatggtattagaattacctaaaagatgggggaagaattctgaatttgaaggtggttccacctctctgactctaaagcatgctgcatggtatccaagtgaaatcctggatccccacgtagtgctgttaacatcagacaacgtaatcagaatttactcactacgtgagccgcagacacccactaacgtgataatactttcagaagccgaagaggaaagtctagtactcaataaaggaagggcgtataccgcatctctaggagagacagcagttgcatttgactttgggccattggcagcagtcccaaagactctatttggacaaaacggcaaagatgaagtagtggcatacccactgtacatcttatatgaaaatggagagactttcctgacatacatcagtctgttacacagccctggaaatattggaaagctgttgggtccattgcccatgcatcctgcggctgaagataactatggttatgatgcgtgtgctgtactctgcttaccctgtgtccccaatatcttagtgatcgctactgaatcaggaatgctgtatcactgtgtcgtgctagaaggggaagaagaagatgaccacacgtcagaaaagtcctgggattccaggattgacctcattccttctctgtatgtgtttgaatgtgttgagttggagcttgctttgaaactggcatctggagaggatgacccttttgattctgacttttcttgtccagtcaaacttcatagagatcccaagtgtccttcaagatatcactgtactcatgaagctggtgtacatagtgttgggctaacttggattcataaacttcacaaatttcttggatcagatgaagaagataaggatagtttacaggaactctctacagaacagaaatgctttgttgaacacatcctttgtacgaagccattgccctgcaggcagccagctccaattcgaggattttggattgtacctgacattctgggacccacgatgatctgcatcaccagtacctatgaatgcctcatatggccgttattaagtacagtccatccagcgtctcctcccctgctttgtactcgagaagatgttgaagtggcagagtctcccctccgtgttctggctgaaaccccagattcctttgaaaagcatattagaagcattttgcaacgtagtgttgccaatccagcatttttgaaagcttctgaaaaggacatagcccctcctcctgaagaatgccttcagctcctcagcagagccacccaggtgttcagagagcagtacattctcaaacaggacttggcaaaggaggagattcagcggagggtcaaattattatgtgaccaaaaaaagaaacaactagaagatctcagttattgtcgagaagagaggaaaagtctgcgggaaatggctgagcgtttagctgacaaatatgaggaagctaaagaaaaacaagaggatatcatgaacaggatgaaaaaactacttcacagttttcactctgagctcccagttctctctgatagtgagcgagacatgaagaaagaattacagctgatacctgatcaacttcgacatttgggcaatgccatcaaacaggttactatgaaaaaggattatcaacagcaaaagatggagaaggtgttgagtcttccaaaacccaccattattctcagtgcctaccagcgaaagtgcattcagtccatcctgaaagaggagggtgaacatataagggaaatggtgaagcaaatcaatgatatccgcaatcatgtaaacttctgacaccaccaggagctgactcacacctgaactgaacaccattgaaggcttaaacccatattgtaaaacaggtagaattatctaatttataaaaaggtgttttgatgacctttggtgtggttcatctttttaaatatgttgttttataataattgagtaaatgcttttatttaaaatttggaatgtgctttataactcaagcctacagttgtgttcagcaaggactcaggattatttcacactgcacactgccagaacctccctgaaccctattgagttttctccatatttgagcaagttagttattcttgtgagctgtgttttaaagtagcagcaccagaaacatgactctgaagagggatagaaccctaggattcaaaggagaagaccacacagtgtacttggcagcagcttttttaatttgaacactttcttcttgaggacacaccttcagtacagttaacaaatggttacacctgaaatctgctgagagcagagcttaagatccacaattgcaaaggccactgctggctcacttcctcacaggctgtattacctttcagagctgagtgaggctgtgctctacgtcccaatacttgttactgagtggacatgaggtgcaagtttagcaccttaaagggagaaaaaaataggttagtatgcagaatgtgattttgtcctcacttcaccttaagtcatctttttacacttgccaatgtgagttctgaaaggtagtactatatctgcttagaaatggctgagtgactgccaattaaaagccacatgataaggtaggttacaggtaagaggtaaatcaggttagacatgcatgagaacatgtaggcacagactgaatataagcacaggaacactcgtgaaacccaactgagcttttcttttgcctagaagggctaaatcctgccttctacatcagttcccatttatgctgaaaacccagttgaaagaattgtttcctacctggacagtgacacagtagtttgtttcataccagaaacacattgctaaacaaaacttaagagtctcagtttgggtttttctacaataaagtgaattccaacagttggcatttgccacagtagagaccactaaccattccctaattgtgatgattttattacccagcaccatcttctggagaaaaatatctgtaaggtgctcagtctcagcagaacacttcactgcaagctctagttcagtcagttcagaaaggctgtgaattgcccaccctgatttacagcactaattttaataatctgaagacaaattcgcttggggcttatccaagggactagtcttaaacctacgtaatttaaattgattgcattttataattaataaaatcccctgtaactcaatagttatatgtttcctttatctaaaccatgtagcactctttataaagggactttaaaccaattaaaataatgtttcatgtgcggcaagcctttagtactatttccataattggtatttatttttaaattcataatcatgaatgcaagactacaataataacccaagagatgaggtatgtagtacttatcatttgtcctatggaagacagaagtacagaagatctttagggtaagtccatagtgacctcatttataacaaagacaattcactttaagttgatggtggcgttatgtgaacaaaacaatctacctagttcactaactcccagaaggctctttcaggtaccctgctgttatgcaaccagtctcaaaaatgatttgaaaaccatcttacttttgaacctcctggatgatgaatccatccactggatattcctgggacagtactctcagcaggtattgatgaacatgaatcaattctttgtgctttctgtagcacttcataaagttatggcaaagacctgtttcactgaggctttcttcacacaggaaaggaatctaatgcttgtaaaatgacaagacagatttccaattctaactaactggctttccataagcattgtcacttacttacattccaggtctgaattcaaaagaaaaatacaaagtatctgtcaacctagttaccatttttgtatttgacacatttgaaacaagtagtacgtaagcctaatgatccaagttgaaaaattagcctatttaaaaacgtatactaatgtttttcactgatccaataactagactaaaacacttcaaaagagtagatggtaccagttcggctttatcctggtaccctgtgggcccatgaagatcatctaagtatgcagaaaaagtgcttccaaagtttcttgtgcttttcctttaaccttcaacttccagtatatatagccccagccaagttttcagatcctcatcattaattcacttcatgaattggttttgtttgccacagtcctatggttctcaggtaagtttcagtagcatttaaggtcctccaaagcaagataagataaaatggtaaaaggaaaacaaaatacagtcagtagccaatggcctgctctcaaaccttcatattttaatataaaatattcatacagcatactacacttctgtctgctaactgaatactgttactgatgagctctagacaacagataaagcaaattctctcttccaatatctatgaacagaaaattccaaacactactgggatgtcgctttagggtagggaaatgtgttccgaaaatctgtcttggagaaagcaggcaaggaaacagcgctttttccatcaccaaatctgatcccacgcctgttggaatcaagcctggagtttatagtgttcgcatttgaaggtctctgggctgcagatcaccccactgtttgctgtttcctgtgccgcacagtcttctccctctagaagtaagcatttctccagtcttccttttgttgtgacttctctttcttcagttaagagttaaataataattactgttgctctaaagatgagttaaaaacccaaagtgcaggctagaatcctgccatgagggtgtcatgtctcaggaagctggttaatgtctgtcagtttagtatcattcagaattgcccggattctctccaaggagtcagcttgccggatcc

SEQ ID NO: 458904 - DNA, 2652 bp, Homo sapiens
gataaacccacaagacacaaaacatacctttcgagcagttgggccaagatggcggccgccgagggaccggtgggcgacggcgagctgtggcagacctggcttcctaaccacgtcgtgttcttgcggctccgggagggactgaaaaaccagagtccaaccgaagctgagaaaccagcttcttcgtcgttgccttcgtcgccgccgccgcagttgctgacgagaaacgtggtctttggcctcggcggagagcttttcctgtgggacggagaagacagctccttcttagtcgttcgccttcggggccccagcggcggcggcgaagagcccgccctgtcccagtaccagagattgctttgcataaatccacccctgtttgaaatctatcaagtcttgttaagcccaacacaacatcatgtagcacttataggaataaaaggacttatggtattagaattacctaaaagatgggggaagaattctgaatttgaaggtggaaaatcaacagtgaattgtagtaccactccagttgcggagagatttttcaccagttccacctctctgactctaaagcatgctgcatggtatccaagtgaaatcctggatccccacgtagtgctgttaacatcagacaacgtaatcagaatttactcactacgtgagccgcagacacccactaacgtgataatactttcagaagccgaagaggaaagtctagtactcaataaaggaagggcgtataccgcatctctaggagagacagcagttgcatttgactttgggccattggcagcagtcccaaagactctatttggacaaaacggcaaagatgaagtagtggcatacccactgtacatcttatatgaaaatggagagactttcctgacatacatcagtctgttacacagccctggaaatattggaaagctgttgggtccattgcccatgcatcctgcggctgaagataactatggttatgatgcgtgtgctgtactctgcttaccctgtgtccccaatatcttagtgatcgctactgaatcaggaatgctgtatcactgtgtcgtgctagaaggggaagaagaagatgaccacacgtcagaaaagtcctgggattccaggattgacctcattccttctctgtatgtgtttgaatgtgttgagttggagcttgctttgaaactggcatctggagaggatgacccttttgattctgacttttcttgtccagtcaaacttcatagagatcccaagtgtccttcaagatatcactgtactcatgaagctggtgtacatagtgttgggctaacttggattcataaacttcacaaatttcttggatcagatgaagaagataaggatagtttacaggaactctctacagaacagaaatgctttgttgaacacatcctttgtacgaagccattgccctgcaggcagccagctccaattcgaggattttggattgtacctgacattctgggacccacgatgatctgcatcaccagtacctatgaatgcctcatatggccgttattaagtacagtccatccagcgtctcctcccctgctttgtactcgagaagatgttgaagtggcagagtctcccctccgtgttctggctgaaaccccagattcctttgaaaagcatattagaagcattttgcaacgtagtgttgccaatccagcatttttgaaagcttctgaaaaggacatagcccctcctcctgaagaatgccttcagctcctcagcagagccacccaggtgttcagagagcagtacattctcaaacaggacttggcaaaggaggagattcagcggagggtcaaattattatgtgaccaaaaaaagaaacaactagaagatctcagttattgtcgagaagagaggaaaagtctgcgggaaatggctgagcgtttagctgacaaatatgaggaagctaaagaaaaacaagaggatatcatgaacaggatgaaaaaactacttcacagttttcactctgagctcccagttctctctgatagtgagcgagacatgaagaaagaattacagctgatacctgatcaacttcgacatttgggcaatgccatcaaacaggttactatgaaaaaggattatcaacagcaaaagatggagaaggtgttgagtcttccaaaacccaccattattctcagtgcctaccagcgaaagtgcattcagtccatcctgaaagaggagggtgaacatataagggaaatggtgaagcaaatcaatgatatccgcaatcatgtaaacttctgacaccaccaggagctgactcacacctgaactgaacaccattgaaggcttaaacccatattgtaaaacaggtagaattatctaatttataaaaaggtgttttgatgacctttggtgtggttcatctttttaaatatgttgttttataataattgagtaaatgcttttatttaaaatttggaatgtgctttaaaaataaataatatccccttacttacactttctttattccccttcccatatacttcttctcctctccactacccccctcctttattctctatttcccttatttttccttccaccactatacccgatatttctttctctctccctacttcaaactcatatatcggctccttcttcccacatttttttcct

SEQ ID NO: 458905 - DNA, 4166 bp, Homo sapiens
aacttttgagattacagtcagcagcacgctacagttagggattcctgagtgacttagtcacatgggctctagactttagtgtggagctgcattaaaggtttccaagccaccacttttgaggttatggtactgataggatgtcccaagcaacttcagcccaggcctgagaaggccgcggacctgtcatgtctttgctcttggttccattgcatttgctgctttgtaatttaactatgactgtgtttttccaggcagccagctccaattcgaggattttggattgtacctgacattctgggacccacgatgatctgcatcaccagtacctatgaatgcctcatatggccgttattaagtacagtccatccagcgtctcctcccctgctttgtactcgagaagatgttgaagtggcagagtctcccctccgtgttctggctgaaaccccagattcctttgaaaagcatattagaagcattttgcaacgtagtgttgccaatccagcatttttgaaagcttctgaaaaggacatagcccctcctcctgaagaatgccttcagctcctcagcagagccacccaggtgttcagagagcagtacattctcaaacaggacttggcaaaggaggagattcagcggagggtcaaattattatgtgaccaaaaaaagaaacaactagaagatctcagttattgtcgagaagagaggaaaagtctgcgggaaatggctgagcgtttagctgacaaatatgaggaagctaaagaaaaacaagaggatatcatgaacaggatgaaaaaactacttcacagttttcactctgagctcccagttctctctgatagtgagcgagacatgaagaaagaattacagctgatacctgatcaacttcgacatttgggcaatgccatcaaacaggttactatgaaaaaggattatcaacagcaaaagatggagaaggtgttgagtcttccaaaacccaccattattctcagtgcctaccagcgaaagtgcattcagtccatcctgaaagaggagggtgaacatataagggaaatggtgaagcaaatcaatgatatccgcaatcatgtaaacttctgacaccaccaggagctgactcacacctgaactgaacaccattgaaggcttaaacccatattgtaaaacaggtagaattatctaatttataaaaaggtgttttgatgacctttggtgtggttcatctttttaaatatgttgttttataataattgagtaaatgcttttatttaaaatttggaatgtgctttataactcaagcctacagttgtgttcagcaaggactcaggattatttcacactgcacactgccagaacctccctgaaccctattgagttttctccatatttgagcaagttagttattcttgtgagctgtgttttaaagtagcagcaccagaaacatgactctgaagagggatagaaccctaggattcaaaggagaagaccacacagtgtacttggcagcagcttttttaatttgaacactttcttcttgaggacacaccttcagtacagttaacaaatggttacacctgaaatctgctgagagcagagcttaagatccacaattgcaaaggccactgctggctcacttcctcacaggctgtattacctttcagagctgagtgaggctgtgctctacgtcccaatacttgttactgagtggacatgaggtgcaagtttagcaccttaaagggagaaaaaaataggttagtatgcagaatgtgattttgtcctcacttcaccttaagtcatctttttacacttgccaatgtgagttctgaaaggtagtactatatctgcttagaaatggctgagtgactgccaattaaaagccacatgataaggtaggttacaggtaagaggtaaatcaggttagacatgcatgagaacatgtaggcacagactgaatataagcacaggaacactcgtgaaacccaactgagcttttcttttgcctagaagggctaaatcctgccttctacatcagttcccatttatgctgaaaacccagttgaaagaattgtttcctacctggacagtgacacagtagtttgtttcataccagaaacacattgctaaacaaaacttaagagtctcagtttgggtttttctacaataaagtgaattccaacagttggcatttgccacagtagagaccactaaccattccctaattgtgatgattttattacccagcaccatcttctggagaaaaatatctgtaaggtgctcagtctcagcagaacacttcactgcaagctctagttcagtcagttcagaaaggctgtgaattgcccaccctgatttacagcactaattttaataatctgaagacaaattcgcttggggcttatccaagggactagtcttaaacctacgtaatttaaattgattgcattttataattaataaaatcccctgtaactcaatagttatatgtttcctttatctaaaccatgtagcactctttataaagggactttaaaccaattaaaataatgtttcatgtgcggcaagcctttagtactatttccataattggtatttatttttaaattcataatcatgaatgcaagactacaataataacccaagagatgaggtatgtagtacttatcatttgtcctatggaagacagaagtacagaagatctttagggtaagtccatagtgacctcatttataacaaagacaattcactttaagttgatggtggcgttatgtgaacaaaacaatctacctagttcactaactcccagaaggctctttcaggtaccctgctgttatgcaaccagtctcaaaaatgatttgaaaaccatcttacttttgaacctcctggatgatgaatccatccactggatattcctgggacagtactctcagcaggtattgatgaacatgaatcaattctttgtgctttctgtagcacttcataaagttatggcaaagacctgtttcactgaggctttcttcacacaggaaaggaatctaatgcttgtaaaatgacaagacagatttccaattctaactaactggctttccataagcattgtcacttacttacattccaggtctgaattcaaaagaaaaatacaaagtatctgtcaacctagttaccatttttgtatttgacacatttgaaacaagtagtacgtaagcctaatgatccaagttgaaaaattagcctatttaaaaacgtatactaatgtttttcactgatccaataactagactaaaacacttcaaaagagtagatggtaccagttcggctttatcctggtaccctgtgggcccatgaagatcatctaagtatgcagaaaaagtgcttccaaagtttcttgtgcttttcctttaaccttcaacttccagtatatatagccccagccaagttttcagatcctcatcattaattcacttcatgaattggttttgtttgccacagtcctatggttctcaggtaagtttcagtagcatttaaggtcctccaaagcaagataagataaaatggtaaaaggaaaacaaaatacagtcagtagccaatggcctgctctcaaaccttcatattttaatataaaatattcatacagcatactacacttctgtctgctaactgaatactgttactgatgagctctagacaacagataaagcaaattctctcttccaatatctatgaacagaaaattccaaacactactgggatgtcgctttagggtagggaaatgtgttccgaaaatctgtcttggagaaagcaggcaaggaaacagcgctttttccatcaccaaatctgatcccacgcctgttggaatcaagcctggagtttatagtgttcgcatttgaaggtctctgggctgcagatcaccccactgtttgctgtttcctgtgccgcacagtcttctccctctagaagtaagcatttctccagtcttccttttgttgtgacttctctttcttcagttaagagttaaataataattactgttgctctaaagatgagttaaaaacccaaagtgcaggctagaatcctgccatgagggtgtcatgtctcaggaagctggttaatgtctgtcagtttagtatcattcagaattgcccggattctctccaaggagtcagcttgccggatcc

SEQ ID NO: 458906 - DNA, 3292 bp, Homo sapiens
  misc_feature (2540)..(2540): n is a, c, g, or t
  misc_feature (2551)..(2551): n is a, c, g, or t
  misc_feature (2634)..(2634): n is a, c, g, or t
gataaacccacaagacacaaaacatacctttcgagcagttgggccaagatggcggccgccgagggaccggtgggcgacggcgagctgtggcagacctggcttcctaaccacgtcgtgttcttgcggctccgggagggactgaaaaaccagagtccaaccgaagctgagaaaccagcttcttcgtcgttgccttcgtcgccgccgccgcagttgctgacgagaaacgtggtctttggcctcggcggagagcttttcctgtgggacggagaagacagctccttcttagtcgttcgccttcggggccccagcggcggcggcgaagagcccgccctgtcccagtaccagagattgctttgcataaatccacccctgtttgaaatctatcaagtcttgttaagcccaacacaacatcatgtagcacttataggaataaaaggacttatggtattagaattacctaaaagatgggggaagaattctgaatttgaaggtggaaaatcaacagtgaattgtagtaccactccagttgcggagagatttttcaccagttccacctctctgactctaaagcatgctgcatggtatccaagtgaaatcctggatccccacgtagtgctgttaacatcagacaacgtaatcagaatttactcactacgtgagccgcagacacccactaacgtgataatactttcagaagccgaagaggaaagtctagtactcaataaaggaagggcgtataccgcatctctaggagagacagcagttgcatttgactttgggccattggcagcagtcccaaagactctatttggacaaaacggcaaagatgaagtagtggcatacccactgtacatcttatatgaaaatggagagactttcctgacatacatcagtctgttacacagccctggaaatattggaaagctgttgggtccattgcccatgcatcctgcggctgaagataactatggttatgatgcgtgtgctgtactctgcttaccctgtgtccccaatatcttagtgatcgctactgaatcaggaatgctgtatcactgtgtcgtgctagaaggggaagaagaagatgaccacacgtcagaaaagtcctgggattccaggattgacctcattccttctctgtatgtgtttgaatgtgttgagttggagcttgctttgaaactggcatctggagaggatgacccttttgattctgacttttcttgtccagtcaaacttcatagagatcccaagtgtccttcaagatatcactgtactcatgaagctggtgtacatagtgttgggctaacttggattcataaacttcacaaatttcttggatcagatgaagaagataaggatagtttacaggaactctctacagaacagaaatgctttgttgaacacatcctttgtacgaagccattgccctgcaggcagccagctccaattcgaggattttggattgtacctgacattctgggacccacgatgatctgcatcaccagtacctatgaatgcctcatatggccgttattaagtacagtccatccagcgtctcctcccctgctttgtactcgagaagatgttgaagtggcagagtctcccctccgtgttctggctgaaaccccagattcctttgaaaagcatattagaagcattttgcaacgtagtgttgccaatccagcatttttgaaagcttctgaaaaggacatagcccctcctcctgaagaatgccttcagctcctcagcagagccacccaggtgttcagagagcagtacattctcaaacaggacttggcaaaggaggagattcagcggagggtcaaattattatgtgaccaaaaaaagaaacaactagaagatctcagttattgtcgagaagagaggaaaagtctgcgggaaatggctgagcgtttagctgacaaatatgaggaagctaaagaaaaacaagaggatatcatgaacagttctctctgatagtgagcgagacatgaagaaagaattacagctgatacctgatcaacttcgacatttgggcaatgccatcaaacaggttactatgaaaaaggattatcaacagcaaaagatggagaaggtgttgagtcttccaaaacccaccattattctcagtgcctaccagcgaaagtgcattcagtccatcctgaaagaggacatcaacagcagaccggcaattgcgcttttgatctaaaggaaagatgaaagcctggatcctgcaatacactgagattatagaaaactgcaaagcaaaccaaatccaggttgctctaacttaaattccgcaatgctagtcaggcagattgctccaacctgagagctgtgagttcaggtggggaggttcacattccactgtgattaactagctagctcctttctctgtcacaattacctggaatacccaaggcagactatgacaagggtcaggtgacacacgttaatatccattgctggcaacatgtgcctgcactgactccaggaaccgtctgttgaatgaacgctaaatcccagagcttcccagtgtgccncagcgtgagangaggaaaaacgtgagaaaggtaactcacctctttctgcaagagattccattctgtttcactaactaaacgataaccactaggngacacataggcactctccatgccctgggtaacgctggagaggagggacgctgtctcttcttgttctggtgtcatcgccttgattgctctttcctgatctttggttaacataaacccacttggcatctggagtgacccaagggatgcagtatcaaagttctcagacactgaatctgctcctaccagtggtccaaaatctgactcgtccaggtttccagcagattttgctttgtagttatagcctaaagctttggattgcaatgagcccgaggttcccaagctgtctgtagactgtgctctcctgagtccatctttaaacatgtcattgtccgatttactgaaaggatctccagatggcaacagcaagcctgcatctaaggaatgaactgagccacgggtgctgtctaaatgctcctgaaatgtgaaaatacatatggccaagttagacaattctctgcgtttttaaagacaaaaactataataaatgtattccgccactcattacacatgataatcattaatgtgctaccttcacagactcattgaacaaacactaagtgtcatttctacatgctggacacaaaaccaggccctcaggatacaactgtgagcaagatataatccctgacctcgagatacatacggcttcaaaaaaaaaa

SEQ ID NO: 458907 - DNA, 2447 bp, Homo sapiens
gataaacccacaagacacaaaacatacctttcgagcagttgggccaagatggcggccgccgagggaccggtgggcgacggcgagctgtggcagacctggcttcctaaccacgtcgtgttcttgcggctccgggagggactgaaaaaccagagtccaaccgaagctgagaaaccagcttcttcgtcgttgccttcgtcgccgccgccgcagttgctgacgagaaacgtggtctttggcctcggcggagagcttttcctgtgggacggagaagacagctccttcttagtcgttcgccttcggggccccagcggcggcggcgaagagcccgccctgtcccagtaccagagattgctttgcataaatccacccctgtttgaaatctatcaagtcttgttaagcccaacacaacatcatgtagcacttataggaataaaaggacttatggtattagaattacctaaaagatgggggaagaattctgaatttgaaggtggaaaatcaacagtgaattgtagtaccactccagttgcggagagatttttcaccagttccacctctctgactctaaagcatgctgcatggtatccaagtgaaatcctggatccccacgtagtgctgttaacatcagacaacgtaatcagaatttactcactacgtgagccgcagacacccactaacgtgataatactttcagaagccgaagaggaaagtctagtactcaataaaggaagggcgtataccgcatctctaggagagacagcagttgcatttgactttgggccattggcagcagtcccaaagactctatttggacaaaacggcaaagatgaagtagtggcatacccactgtacatcttatatgaaaatggagagactttcctgacatacatcagtctgttacacagccctggaaatattggaaagctgttgggtccattgcccatgcatcctgcggctgaagataactatggttatgatgcgtgtgctgtactctgcttaccctgtgtccccaatatcttagtgatcgctactgaatcaggaatgctgtatcactgtgtcgtgctagaaggggaagaagaagatgaccacacgtcagaaaagtcctgggattccaggattgacctcattccttctctgtatgtgtttgaatgtgttgagttggagcttgctttgaaactggcatctggagaggatgacccttttgattctgacttttcttgtccagtcaaacttcatagagatcccaagtgtccttcaagatatcactgtactcatgaagctggtgtacatagtgttgggctaacttggattcataaacttcacaaatttcttggatcagatgaagaagataaggatagtttacaggaactctctacagaacagaaatgctttgttgaacacatcctttgtacgaagccattgccctgcaggcagccagctccaattcgaggattttggattgtacctgacattctgggacccacgatgatctgcatcaccagtacctatgaatgcctcatatggccgttattaagtacagtccatccagcgtctcctcccctgctttgtactcgagaagatgttgaagtggcagagtctcccctccgtgttctggctgaaaccccagattcctttgaaaagcatattagaagcattttgcaacgtagtgttgccaatccagcatttttgaattgttttactcagctaaggaaaataaaggtagaaactttgtttttagcttctgaaaaggacatagcccctcctcctgaagaatgccttcagctcctcagcagagccacccaggtgttcagagagcagtacattctcaaacaggacttggcaaaggaggagattcagcggagggtcaaattattatgtgaccaaaaaaagaaacaactagaagatctcagttattgtcgagaagagaggaaaagtctgcgggaaatggctgagcgtttagctgacaaatatgaggaagctaaagaaaaacaagaggatatcatgaacaggatgaaaaaactacttcacagttttcactctgagctcccagttctctctgatagtgagcgagacatgaagaaagaattacagctgatacctgatcaacttcgacatttgggcaatgccatcaaacaggttactatgaaaaaggattatcaacagcaaaagatggagaaggtgttgagtcttccaaaacccaccattattctcagtgcctaccagcgaaagtgcattcagtccatcctgaaagaggatgagtgactttacaattttacaggggtgaacatataagggaaatggtgaagcaaatcaatgatatccgcaatcatgtaaacttctgacaccaccaggagctgactcacacctgaactgaacaccattgaaggcttaaacccatattgtaaaacaggtagaattatctaatttataaaaaggtgttttgatga

SEQ ID NO: 458908 - DNA, 2224 bp, Homo sapiens
gataaacccacaagacacaaaacatacctttcgagcagttgggccaagatggcggccgccgagggaccggtgggcgacggcgagctgtggcagacctggcttcctaaccacgtcgtgttcttgcggctccgggagggactgaaaaaccagagtccaaccgaagctgagaaaccagcttcttcgtcgttgccttcgtcgccgccgccgcagttgctgacgagaaacgtggtctttggcctcggcggagagcttttcctgtgggacggagaagacagctccttcttagtcgttcgccttcggggccccagcggcggcggcgaagagcccgccctgtcccagtaccagagattgctttgcataaatccacccctgtttgaaatctatcaagtcttgttaagcccaacacaacatcatgtagcacttataggaataaaaggacttatggtattagaattacctaaaagatgggggaagaattctgaatttgaaggtggaaaatcaacagtgaattgtagtaccactccagttgcggagagatttttcaccagttccacctctctgactctaaagcatgctgcatggtatccaagtgaaatcctggatccccacgtagtgctgttaacatcagacaacgtaatcagaatttactcactacgtgagccgcagacacccactaacgtgataatactttcagaagccgaagaggaaagtctagtactcaataaaggaagggcgtataccgcatctctaggagagacagcagttgcatttgactttgggccattggcagcagtcccaaagactctatttggacaaaacggcaaagatgaagtagtggcatacccactgtacatcttatatgaaaatggagagactttcctgacatacatcagtctgttacacagccctggaaatattggaaagctgttgggtccattgcccatgcatcctgcggctgaagataactatggttatgatgcgtgtgctgtactctgcttaccctgtgtccccaatatcttagtgatcgctactgaatcaggaatgctgtatcactgtgtcgtgctagaaggggaagaagaagatgaccacacgtcagaaaagtcctgggattccaggattgacctcattccttctctgtatgtgtttgaatgtgttgagttggagcttgctttgaaactggcatctggagaggatgacccttttgattctgacttttcttgtccagtcaaacttcatagagatcccaagtgtccttcaagatatcactgtactcatgaagctggtgtacatagtgttgggctaacttggattcataaacttcacaaatttcttggatcagatgaagaagataaggatagtttacaggaactctctacagaacagaaatgctttgttgaacacatcctttgtacgaagccattgccctgcaggcagccagctccaattcgaggattttggattgtacctgacattctgggacccacgatgatctgcatcaccagtacctatgaatgcctcatatggccgttattaagtacagtccatccagcgtctcctcccctgctttgtactcgagaagatgttgaagtggcagagtctcccctccgtgttctggctgaaaccccagattcctttgaaaagcatattagaagcattttgcaacgtagtgttgccaatccagcatttttgaagtatgcaaccttgggcatagcggttttatgaatgggttctcttctgtcttcagaattactgtgcatcctttctgtcctcatctgtttcatatactttttactgtgataaatttggaagaaactggatatatttgatcagctagtgaatggggagcaggagggaagtggcacctgagaatgataaacaggaagtgtttaaaaagaagttaggctaggccgggcgtggtggctcacacctgtaatctcagcactttgggagaccaagacgggtgaatcgcgaggtcaggagatcgagaccatcctggctaacacagcaaaaccccatctctataaaaatgcaataattagccaggcgtggtggtgggcacctgtaatcccagctactcgagaggctgaggcagaagaattgctcgaacctgggaggtggaggttgcagtgagccgagatagcaccaatgcactccagcctgggtgacagagcgagactgcatctcaaataaataaattaaaaatataaaaagtttaaaaagcacc

SEQ ID NO: 458909 - DNA, 1617 bp, Homo sapiens
gataaacccacaagacacaaaacatacctttcgagcagttgggccaagatggcggccgccgagggaccggtgggcgacggcgagctgtggcagacctggcttcctaaccacgtcgtgttcttgcggctccgggagggactgaaaaaccagagtccaaccgaagctgagaaaccagcttcttcgtcgttgccttcgtcgccgccgccgcagttgctgacgagaaacgtggtctttggcctcggcggagagcttttcctgtgggacggagaagacagctccttcttagtcgttcgccttcggggccccagcggcggcggcgaagagcccgccctgtcccagtaccagagattgctttgcataaatccacccctgtttgaaatctatcaagtcttgttaagcccaacacaacatcatgtagcacttataggaataaaaggacttatggtattagaattacctaaaagatgggggaagaattctgaatttgaaggtggaaaatcaacagtgaattgtagtaccactccagttgcggagagatttttcaccagttccacctctctgactctaaagcatgctgcatggtatccaagtgaaatcctggatccccacgtagtgctgttaacatcagacaacgtaatcagaatttactcactacgtgagccgcagacacccactaacgtgataatactttcagaagccgaagaggaaagtctagtactcaataaaggaagggcgtataccgcatctctaggagagacagcagttgcatttgactttgggccattggcagcagtcccaaagactctatttggacaaaacggcaaagatgaagtagtggcatacccactgtacatcttatatgaaaatggagagactttcctgacatacatcagtctgttacacagccctggaaatattggaaagctgttgggtccattgcccatgcatcctgcggctgaagataactatggttatgatgcgtgtgctgtactctgcttaccctgtgtccccaatatcttagtgatcgctactgaatcaggaatgctgtatcactgtgtcgtgctagaaggggaagaagaagatgaccacacgtcagaaaagtcctgggattccaggattgacctcattccttctctgtatgtgtttgaatgtgttgagttggagcttgctttgaaactggcatctggagaggatgacccttttgattctgacttttcttgtccagtcaaacttcatagagatcccaagtgtccttcaagatatcactgtactcatgaagctggtgtacatagtgttgggctaacttggattcataaacttcacaaatttcttggatcagatgaagaagataaggatagtttacaggaactctctacagaacagaaatgctttgttgaacacatcctttgtacgaagccattgccctgcaggcagccagctccaattcgaggattttggattgtacctgacattctgggacccacgatgatctgcatcaccagtacctatgaatgcctcatatggccgttattgtacgtcccattttatattctccacacagctcttgttaattctgcaatatctaagttgggaaaatgcactcagtaaccaacttga

SEQ ID NO: 458910 - DNA, 3226 bp, Homo sapiens
agatgtttcaacattaccagtttaaattcttaagaatccatataaatggtttattataattccaaaagtgagtgactttacaattttacaggggtgaacatataagggaaatggtgaagcaaatcaatgatatccgcaatcatgtaaacttctgacaccaccaggagctgactcacacctgaactgaacaccattgaaggcttaaacccatattgtaaaacaggtagaattatctaatttataaaaaggtgttttgatgacctttggtgtggttcatctttttaaatatgttgttttataataattgagtaaatgcttttatttaaaatttggaatgtgctttataactcaagcctacagttgtgttcagcaaggactcaggattatttcacactgcacactgccagaacctccctgaaccctattgagttttctccatatttgagcaagttagttattcttgtgagctgtgttttaaagtagcagcaccagaaacatgactctgaagagggatagaaccctaggattcaaaggagaagaccacacagtgtacttggcagcagcttttttaatttgaacactttcttcttgaggacacaccttcagtacagttaacaaatggttacacctgaaatctgctgagagcagagcttaagatccacaattgcaaaggccactgctggctcacttcctcacaggctgtattacctttcagagctgagtgaggctgtgctctacgtcccaatacttgttactgagtggacatgaggtgcaagtttagcaccttaaagggagaaaaaaataggttagtatgcagaatgtgattttgtcctcacttcaccttaagtcatctttttacacttgccaatgtgagttctgaaaggtagtactatatctgcttagaaatggctgagtgactgccaattaaaagccacatgataaggtaggttacaggtaagaggtaaatcaggttagacatgcatgagaacatgtaggcacagactgaatataagcacaggaacactcgtgaaacccaactgagcttttcttttgcctagaagggctaaatcctgccttctacatcagttcccatttatgctgaaaacccagttgaaagaattgtttcctacctggacagtgacacagtagtttgtttcataccagaaacacattgctaaacaaaacttaagagtctcagtttgggtttttctacaataaagtgaattccaacagttggcatttgccacagtagagaccactaaccattccctaattgtgatgattttattacccagcaccatcttctggagaaaaatatctgtaaggtgctcagtctcagcagaacacttcactgcaagctctagttcagtcagttcagaaaggctgtgaattgcccaccctgatttacagcactaattttaataatctgaagacaaattcgcttggggcttatccaagggactagtcttaaacctacgtaatttaaattgattgcattttataattaataaaatcccctgtaactcaatagttatatgtttcctttatctaaaccatgtagcactctttataaagggactttaaaccaattaaaataatgtttcatgtgcggcaagcctttagtactatttccataattggtatttatttttaaattcataatcatgaatgcaagactacaataataacccaagagatgaggtatgtagtacttatcatttgtcctatggaagacagaagtacagaagatctttagggtaagtccatagtgacctcatttataacaaagacaattcactttaagttgatggtggcgttatgtgaacaaaacaatctacctagttcactaactcccagaaggctctttcaggtaccctgctgttatgcaaccagtctcaaaaatgatttgaaaaccatcttacttttgaacctcctggatgatgaatccatccactggatattcctgggacagtactctcagcaggtattgatgaacatgaatcaattctttgtgctttctgtagcacttcataaagttatggcaaagacctgtttcactgaggctttcttcacacaggaaaggaatctaatgcttgtaaaatgacaagacagatttccaattctaactaactggctttccataagcattgtcacttacttacattccaggtctgaattcaaaagaaaaatacaaagtatctgtcaacctagttaccatttttgtatttgacacatttgaaacaagtagtacgtaagcctaatgatccaagttgaaaaattagcctatttaaaaacgtatactaatgtttttcactgatccaataactagactaaaacacttcaaaagagtagatggtaccagttcggctttatcctggtaccctgtgggcccatgaagatcatctaagtatgcagaaaaagtgcttccaaagtttcttgtgcttttcctttaaccttcaacttccagtatatatagccccagccaagttttcagatcctcatcattaattcacttcatgaattggttttgtttgccacagtcctatggttctcaggtaagtttcagtagcatttaaggtcctccaaagcaagataagataaaatggtaaaaggaaaacaaaatacagtcagtagccaatggcctgctctcaaaccttcatattttaatataaaatattcatacagcatactacacttctgtctgctaactgaatactgttactgatgagctctagacaacagataaagcaaattctctcttccaatatctatgaacagaaaattccaaacactactgggatgtcgctttagggtagggaaatgtgttccgaaaatctgtcttggagaaagcaggcaaggaaacagcgctttttccatcaccaaatctgatcccacgcctgttggaatcaagcctggagtttatagtgttcgcatttgaaggtctctgggctgcagatcaccccactgtttgctgtttcctgtgccgcacagtcttctccctctagaagtaagcatttctccagtcttccttttgttgtgacttctctttcttcagttaagagttaaataataattactgttgctctaaagatgagttaaaaacccaaagtgcaggctagaatcctgccatgagggtgtcatgtctcaggaagctggttaatgtctgtcagtttagtatcattcagaattgcccggattctctccaaggagtcagcttgccggatcc

SEQ ID NO: 458911 - DNA, 1262 bp, Homo sapiens
gataaacccacaagacacaaaacatacctttcgagcagttgggccaagatggcggccgccgagggaccggtgggcgacggcgagctgtggcagacctggcttcctaaccacgtcgtgttcttgcggctccgggagggactgaaaaaccagagtccaaccgaagctgagaaaccagcttcttcgtcgttgccttcgtcgccgccgccgcagttgctgacgagaaacgtggtctttggcctcggcggagagcttttcctgtgggacggagaagacagctccttcttagtcgttcgccttcggggccccagcggcggcggcgaagagcccgccctgtcccagtaccagagattgctttgcataaatccacccctgtttgaaatctatcaagtcttgttaagcccaacacaacatcatgtagcacttataggaataaaaggacttatggtattagaattacctaaaagatgggggaagaattctgaatttgaaggtggaaaatcaacagtgaattgtagtaccactccagttgcggagagatttttcaccagttccacctctctgactctaaagcatgctgcatggtatccaagtgaaatcctggatccccacgtagtgctgttaacatcagacaacgtaatcagaatttactcactacgtgagccgcagacacccactaacgtgataatactttcagaagccgaagaggaaagtctagtactcaataaaggaagggcgtataccgcatctctaggagagacagcagttgcatttgactttgggccattggcagcagtcccaaagactctatttggacaaaacggcaaagatgaagtagtggcatacccactgtacatcttatatgaaaatggagagactttcctgacatacatcagtctgttacacagccctggaaatattggaaagctgttgggtccattgcccatgcatcctgcggctgaagataactatggttatgatgcgtgtgctgtactctgcttaccctgtgtccccaatatcttagtgatcgctactgaatcaggaatgctgtatcactgtgtcgtgctagaaggggaagaagaagatgaccacacgtcagaaaagtcctgggattccaggattgacctcattccttctctgtatgtgtttgaatgtgttgagttggagcttgctttgaaactggcatctggagaggatgacccttttgattctgacttttcttgtccagtcaaacttcatagaggtaagctcttcaataaatgtag

SEQ ID NO: 458912 - DNA, 2261 bp, Homo sapiens
  misc_feature (18)..(18): n is a, c, g, or t
ggaccacttcagagtgcncttccggagtaggcacagactgaatataagcacaggaacactcgtgaaacccaactgagcttttcttttgcctagaagggctaaatcctgccttctacatcagttcccatttatgctgaaaacccagttgaaagaattgtttcctacctggacagtgacacagtagtttgtttcataccagaaacacattgctaaacaaaacttaagagtctcagtttgggtttttctacaataaagtgaattccaacagttggcatttgccacagtagagaccactaaccattccctaattgtgatgattttattacccagcaccatcttctggagaaaaatatctgtaaggtgctcagtctcagcagaacacttcactgcaagctctagttcagtcagttcagaaaggctgtgaattgcccaccctgatttacagcactaattttaataatctgaagacaaattcgcttggggcttatccaagggactagtcttaaacctacgtaatttaaattgattgcattttataattaataaaatcccctgtaactcaatagttatatgtttcctttatctaaaccatgtagcactctttataaagggactttaaaccaattaaaataatgtttcatgtgcggcaagcctttagtactatttccataattggtatttatttttaaattcataatcatgaatgcaagactacaataataacccaagagatgaggtatgtagtacttatcatttgtcctatggaagacagaagtacagaagatctttagggtaagtccatagtgacctcatttataacaaagacaattcactttaagttgatggtggcgttatgtgaacaaaacaatctacctagttcactaactcccagaaggctctttcaggtaccctgctgttatgcaaccagtctcaaaaatgatttgaaaaccatcttacttttgaacctcctggatgatgaatccatccactggatattcctgggacagtactctcagcaggtattgatgaacatgaatcaattctttgtgctttctgtagcacttcataaagttatggcaaagacctgtttcactgaggctttcttcacacaggaaaggaatctaatgcttgtaaaatgacaagacagatttccaattctaactaactggctttccataagcattgtcacttacttacattccaggtctgaattcaaaagaaaaatacaaagtatctgtcaacctagttaccatttttgtatttgacacatttgaaacaagtagtacgtaagcctaatgatccaagttgaaaaattagcctatttaaaaacgtatactaatgtttttcactgatccaataactagactaaaacacttcaaaagagtagatggtaccagttcggctttatcctggtaccctgtgggcccatgaagatcatctaagtatgcagaaaaagtgcttccaaagtttcttgtgcttttcctttaaccttcaacttccagtatatatagccccagccaagttttcagatcctcatcattaattcacttcatgaattggttttgtttgccacagtcctatggttctcaggtaagtttcagtagcatttaaggtcctccaaagcaagataagataaaatggtaaaaggaaaacaaaatacagtcagtagccaatggcctgctctcaaaccttcatattttaatataaaatattcatacagcatactacacttctgtctgctaactgaatactgttactgatgagctctagacaacagataaagcaaattctctcttccaatatctatgaacagaaaattccaaacactactgggatgtcgctttagggtagggaaatgtgttccgaaaatctgtcttggagaaagcaggcaaggaaacagcgctttttccatcaccaaatctgatcccacgcctgttggaatcaagcctggagtttatagtgttcgcatttgaaggtctctgggctgcagatcaccccactgtttgctgtttcctgtgccgcacagtcttctccctctagaagtaagcatttctccagtcttccttttgttgtgacttctctttcttcagttaagagttaaataataattactgttgctctaaagatgagttaaaaacccaaagtgcaggctagaatcctgccatgagggtgtcatgtctcaggaagctggttaatgtctgtcagtttagtatcattcagaattgcccggattctctccaaggagtcagcttgccggatcc

SEQ ID NO: 458913 - DNA, 684 bp, Homo sapiens
gataaacccacaagacacaaaacatacctttcgagcagttgggccaagatggcggccgccgagggaccggtgggcgacggcgagctgtggcagacctggcttcctaaccacgtcgtgttcttgcggctccgggagggactgaaaaaccagagtccaaccgaagctgagaaaccagcttcttcgtcgttgccttcgtcgccgccgccgcagttgctgacgagaaacgtggtctttggcctcggcggagagcttttcctgtgggacggagaagacagctccttcttagtcgttcgccttcggggccccagcggcggcggcgaagagcccgccctgtcccagtaccaggtaatgccaggccgatcttggaagtgaccctcaccgggatcggaaccagtcttttttgttccttgctcctcttggctgtttttcatcttgtggcaggcgttccagcggattgactccgacgctgccatacgcggtcgcggggactcaggctctctcgatgcttacggcctggaggcctgggaggaaggaaagggtcattgaatattcaataaaaatactagtgacggatgagtgctctggagaaaaacaaagcgggctaaaggggttgagaacgagtgggcggagttgctatttttagtttcgtcgagagaaacctgtttcctgatgtgacgcttataa

SEQ ID NO: 458914 - DNA, 604 bp, Homo sapiens
aataaataaattaaaaatataaaaagtttaaaaagcacctgtgacttgagtctatttattttcagttgttttactcagctaaggaaaataaaggtagaaactttgtttttagcttctgaaaaggacatagcccctcctcctgaagaatgccttcagctcctcagcagagccacccaggtgttcagagagcagtacattctcaaacaggacttggcaaaggaggagattcagcggaggtatgatgtcctgtgttcacaaaccatcgatccctggctggtagctgatgctgtatggtagcctagacctggcttctgaataaactctatttctttttgtttttaaagggtcaaattattatgtgaccaaaaaaagaaacaactagaagatctcagttattgtcgagaagagaggtaagtgtcaaaaataagaagaatacaataggtcagtaagactggaaccatattctcaccctaagatgctgagccacattaggtggtttcagcatcaaggggtggacctcaagagtctcttgtgtcttacatcattaggaaaagtctgcgggaaatggctgagcgtttagctgacaaatatgaggaagctaaag

SEQ ID NO: 458915 - DNA, 405 bp, Homo sapiens
ttagctgacaaatatgaggaagctaaagaaaaacaagaggatatcatgaacaggtcagtgggctgtataacatttagttacctagtcaggtactaacaacgatatttaagaaaatgggcattggcaggtgcttacatacctacggaactgaactgatccccctgcctctcctctgaagtatatgttggggaaaacatgaggctctcccctaacccttcctatggggcctacttcagaaacaccagattcatgaattatgagcttgtgattatgtttctcctaattagtagagaccttaaattgagatgtttgcttgccttttctaaaggatgaaaaaactacttcacagttttcactctgagctcccagttctctctgatagtgagcgagacatgaagaaagaat

SEQ ID NO: 458916 - DNA, 383 bp, Homo sapiens
aaatgtgtggcaaaccactgccaaaatatctattattttaatacttaaggttactatgaaaaaggattatcaacagcaaaagatggagaaggtgttgagtcttccaaaacccaccattattctcagtgcctaccagcgaaagtgcattcagtccatcctgaaagaggagtaagtaaatacttccaatcagctattatcgtgagatagtttttcctttacagtatgccagaatcaacctgtcttaatagaaacctgaatcttggtatttgcatgtcaagtaattactgggatgagagccacatgatacatagggacttaagaaatgactatggtgggaggattgaaagggatgaccttctagtaacatgattttgttgtgtggc

SEQ ID NO: 458917 - DNA, 815 bp, Homo sapiens
gtctcccctccgtgttctggctgaaaccccagattcctttgaaaagcatattagaagcattttgcaacgtagtgttgccaatccagcatttttgaagtatgcaaccttgggcatagcggttttatgaatgggttctcttctgtcttcagaattactgtgcatcctttctgtcctcatctgtttcatatactttttactgtgataaatttggaagaaactggatatatttgatcagctagtgaatggggagcaggagggaagtggcacctgagaatgataaacaggaagtgtttaaaaagaagttaggctaggccgggcgtggtggctcacacctgtaatctcagcactttgggagaccaagacgggtgaatcgcgaggtcaggagatcgagaccatcctggctaacacagcaaaaccccatctctactaaaaatacaaaaaaaaattagctgggtgtggtggcagatgcctgtaatcccagctacttgggaggctgaggcaggagaaccgcttgaacctgggaggcagaggttgcagtgagctgagatcccaccactgcactccagcctgggcgacagtgagactcgtctcaagttaggctgggcacggtggcttacagctgtaatcccagcactttgggaggcccaggcaggcggatcacctaaggtcaggagttcaaaaccagcccggccaacatggtgaaaccctgtctctactaaaaatgcaataattagccaggcgtggtggtgggcacctgtaatcccagctactcgagaggctgaggcagaagaattgctcgaacctgggaggtggag

SEQ ID NO: 458918 - DNA, 452 bp, Homo sapiens
tgtttttgtttttaacaagttggtttttacatctctttccagaagggcgtataccgcatctctaggagagacagcagttgcatttgactttgggccattggcagcagtcccaaagactctatttggacaaaacggcaaagatgaagtagtggcatacccactgtacatcttatatgaaaatggagagactttcctgacatacatcagtctgttacacaggtaagttgaggtggtcacccacctgaaatgaaaactcagtttgggctccagtagatatcattgaggctggacttgggagccatgtttttgagtctgtggaaatgttgcagccttcacatgcttggcttgcatatttttgagaaagagttagtacaggtcatttggcctttcatttcttcatattatttgggtaagttctatagaattcttggataatcacttatgataggcct

SEQ ID NO: 458919 - DNA, 2379 bp, Homo sapiens
gataaacccacaagacacaaaacatacctttcgagcagttgggccaagatggcggccgccgagggaccggtgggcgacggcgagctgtggcagacctggcttcctaaccacgtcgtgttcttgcggctccgggagggactgaaaaaccagagtccaaccgaagctgagaaaccagcttcttcgtcgttgccttcgtcgccgccgccgcagttgctgacgagaaacgtggtctttggcctcggcggagagcttttcctgtgggacggagaagacagctccttcttagtcgttcgccttcggggccccagcggcggcggcgaagagcccgccctgtcccagtaccagagattgctttgcataaatccacccctgtttgaaatctatcaagtcttgttaagcccaacacaacatcatgtagcacttataggaataaaaggacttatggtattagaattacctaaaagatgggggaagaattctgaatttgaaggtggaaaatcaacagtgaattgtagtaccactccagttgcggagagatttttcaccagttccacctctctgactctaaagcatgctgcatggtatccaagtgaaatcctggatccccacgtagtgctgttaacatcagacaacgtaatcagaatttactcactacgtgagccgcagacacccactaacgtgataatactttcagaagccgaagaggaaagtctagtactcaataaaggaagggcgtataccgcatctctaggagagacagcagttgcatttgactttgggccattggcagcagtcccaaagactctatttggacaaaacggcaaagatgaagtagtggcatacccactgtacatcttatatgaaaatggagagactttcctgacatacatcagtctgttacacagccctggaaatattggaaagctgttgggtccattgcccatgcatcctgcggctgaagataactatggttatgatgcgtgtgctgtactctgcttaccctgtgtccccaatatcttagtgatcgctactgaatcaggaatgctgtatcactgtgtcgtgctagaaggggaagaagaagatgaccacacgtcagaaaagtcctgggattccaggattgacctcattccttctctgtatgtgtttgaatgtgttgagttggagcttgctttgaaactggcatctggagaggatgacccttttgattctgacttttcttgtccagtcaaacttcatagagatcccaagtgtccttcaagatatcactgtactcatgaagctggtgtacatagtgttgggctaacttggattcataaacttcacaaatttcttggatcagatgaagaagataaggatagtttacaggaactctctacagaacagaaatgctttgttgaacacatcctttgtacgaagccattgccctgcaggcagccagctccaattcgaggattttggattgtacctgacattctgggacccacgatgatctgcatcaccagtacctatgaatgcctcatatggccgttattaagtacagtccatccagcgtctcctcccctgctttgtactcgagaagatgttgaagtggcagagtctcccctccgtgttctggctgaaaccccagattcctttgaaaagcatattagaagcattttgcaacgtagtgttgccaatccagcatttttgaaagcttctgaaaaggacatagcccctcctcctgaagaatgccttcagctcctcagcagagccacccaggtgttcagagagcagtacattctcaaacaggacttggcaaaggaggagattcagcggagggtcaaattattatgtgaccaaaaaaagaaacaactagaagatctcagttattgtcgagaagagaggaaaagtctgcgggaaatggctgagcgtttagctgacaaatatgaggaagctaaagaaaaacaagaggatatcatgaacaggatgaaaaaactacttcacagttttcactctgagctcccagttctctctgatagtgagcgagacatgaagaaagaattacagctgatacctgatcaacttcgacatttgggcaatgccatcaaacaggttactatgaaaaaggattatcaacagcaaaagatggagaaggtgttgagtcttccaaaacccaccattattctcagtgcctaccagcgaaagtgcattcagtccatcctgaaagaggagggtgaacatataagggaaatggtgaagcaaatcaatgatatccgcaatcatgtaaacttctgacaccaccaggagctgactcacacctgaactgaacaccattgaaggcttaaacccatattgtaaaacaggtagaattatctaatttataaaaaggtgttttgatga

SEQ ID NO: 458920 - DNA, 5345 bp, Homo sapiens
gataaacccacaagacacaaaacatacctttcgagcagttgggccaagatggcggccgccgagggaccggtgggcgacggcgagctgtggcagacctggcttcctaaccacgtcgtgttcttgcggctccgggagggactgaaaaaccagagtccaaccgaagctgagaaaccagcttcttcgtcgttgccttcgtcgccgccgccgcagttgctgacgagaaacgtggtctttggcctcggcggagagcttttcctgtgggacggagaagacagctccttcttagtcgttcgccttcggggccccagcggcggcggcgaagagcccgccctgtcccagtaccagagattgctttgcataaatccacccctgtttgaaatctatcaagtcttgttaagcccaacacaacatcatgtagcacttataggaataaaaggacttatggtattagaattacctaaaagatgggggaagaattctgaatttgaaggtggaaaatcaacagtgaattgtagtaccactccagttgcggagagatttttcaccagttccacctctctgactctaaagcatgctgcatggtatccaagtgaaatcctggatccccacgtagtgctgttaacatcagacaacgtaatcagaatttactcactacgtgagccgcagacacccactaacgtgataatactttcagaagccgaagaggaaagtctagtactcaataaaggaagggcgtataccgcatctctaggagagacagcagttgcatttgactttgggccattggcagcagtcccaaagactctatttggacaaaacggcaaagatgaagtagtggcatacccactgtacatcttatatgaaaatggagagactttcctgacatacatcagtctgttacacagccctggaaatattggaaagctgttgggtccattgcccatgcatcctgcggctgaagataactatggttatgatgcgtgtgctgtactctgcttaccctgtgtccccaatatcttagtgatcgctactgaatcaggaatgctgtatcactgtgtcgtgctagaaggggaagaagaagatgaccacacgtcagaaaagtcctgggattccaggattgacctcattccttctctgtatgtgtttgaatgtgttgagttggagcttgctttgaaactggcatctggagaggatgacccttttgattctgacttttcttgtccagtcaaacttcatagagatcccaagtgtccttcaagatatcactgtactcatgaagctggtgtacatagtgttgggctaacttggattcataaacttcacaaatttcttggatcagatgaagaagataaggatagtttacaggaactctctacagaacagaaatgctttgttgaacacatcctttgtacgaagccattgccctgcaggcagccagctccaattcgaggattttggattgtacctgacattctgggacccacgatgatctgcatcaccagtacctatgaatgcctcatatggccgttattaagtacagtccatccagcgtctcctcccctgctttgtactcgagaagatgttgaagtggcagagtctcccctccgtgttctggctgaaaccccagattcctttgaaaagcatattagaagcattttgcaacgtagtgttgccaatccagcatttttgaaagcttctgaaaaggacatagcccctcctcctgaagaatgccttcagctcctcagcagagccacccaggtgttcagagagcagtacattctcaaacaggacttggcaaaggaggagattcagcggagggtcaaattattatgtgaccaaaaaaagaaacaactagaagatctcagttattgtcgagaagagaggaaaagtctgcgggaaatggctgagcgtttagctgacaaatatgaggaagctaaagaaaaacaagaggatatcatgaacaggatgaaaaaactacttcacagttttcactctgagctcccagttctctctgatagtgagcgagacatgaagaaagaattacagctgatacctgatcaacttcgacatttgggcaatgccatcaaacaggttactatgaaaaaggattatcaacagcaaaagatggagaaggtgttgagtcttccaaaacccaccattattctcagtgcctaccagcgaaagtgcattcagtccatcctgaaagaggagggtgaacatataagggaaatggtgaagcaaatcaatgatatccgcaatcatgtaaacttctgacaccaccaggagctgactcacacctgaactgaacaccattgaaggcttaaacccatattgtaaaacaggtagaattatctaatttataaaaaggtgttttgatgacctttggtgtggttcatctttttaaatatgttgttttataataattgagtaaatgcttttatttaaaatttggaatgtgctttataactcaagcctacagttgtgttcagcaaggactcaggattatttcacactgcacactgccagaacctccctgaaccctattgagttttctccatatttgagcaagttagttattcttgtgagctgtgttttaaagtagcagcaccagaaacatgactctgaagagggatagaaccctaggattcaaaggagaagaccacacagtgtacttggcagcagcttttttaatttgaacactttcttcttgaggacacaccttcagtacagttaacaaatggttacacctgaaatctgctgagagcagagcttaagatccacaattgcaaaggccactgctggctcacttcctcacaggctgtattacctttcagagctgagtgaggctgtgctctacgtcccaatacttgttactgagtggacatgaggtgcaagtttagcaccttaaagggagaaaaaaataggttagtatgcagaatgtgattttgtcctcacttcaccttaagtcatctttttacacttgccaatgtgagttctgaaaggtagtactatatctgcttagaaatggctgagtgactgccaattaaaagccacatgataaggtaggttacaggtaagaggtaaatcaggttagacatgcatgagaacatgtaggcacagactgaatataagcacaggaacactcgtgaaacccaactgagcttttcttttgcctagaagggctaaatcctgccttctacatcagttcccatttatgctgaaaacccagttgaaagaattgtttcctacctggacagtgacacagtagtttgtttcataccagaaacacattgctaaacaaaacttaagagtctcagtttgggtttttctacaataaagtgaattccaacagttggcatttgccacagtagagaccactaaccattccctaattgtgatgattttattacccagcaccatcttctggagaaaaatatctgtaaggtgctcagtctcagcagaacacttcactgcaagctctagttcagtcagttcagaaaggctgtgaattgcccaccctgatttacagcactaattttaataatctgaagacaaattcgcttggggcttatccaagggactagtcttaaacctacgtaatttaaattgattgcattttataattaataaaatcccctgtaactcaatagttatatgtttcctttatctaaaccatgtagcactctttataaagggactttaaaccaattaaaataatgtttcatgtgcggcaagcctttagtactatttccataattggtatttatttttaaattcataatcatgaatgcaagactacaataataacccaagagatgaggtatgtagtacttatcatttgtcctatggaagacagaagtacagaagatctttagggtaagtccatagtgacctcatttataacaaagacaattcactttaagttgatggtggcgttatgtgaacaaaacaatctacctagttcactaactcccagaaggctctttcaggtaccctgctgttatgcaaccagtctcaaaaatgatttgaaaaccatcttacttttgaacctcctggatgatgaatccatccactggatattcctgggacagtactctcagcaggtattgatgaacatgaatcaattctttgtgctttctgtagcacttcataaagttatggcaaagacctgtttcactgaggctttcttcacacaggaaaggaatctaatgcttgtaaaatgacaagacagatttccaattctaactaactggctttccataagcattgtcacttacttacattccaggtctgaattcaaaagaaaaatacaaagtatctgtcaacctagttaccatttttgtatttgacacatttgaaacaagtagtacgtaagcctaatgatccaagttgaaaaattagcctatttaaaaacgtatactaatgtttttcactgatccaataactagactaaaacacttcaaaagagtagatggtaccagttcggctttatcctggtaccctgtgggcccatgaagatcatctaagtatgcagaaaaagtgcttccaaagtttcttgtgcttttcctttaaccttcaacttccagtatatatagccccagccaagttttcagatcctcatcattaattcacttcatgaattggttttgtttgccacagtcctatggttctcaggtaagtttcagtagcatttaaggtcctccaaagcaagataagataaaatggtaaaaggaaaacaaaatacagtcagtagccaatggcctgctctcaaaccttcatattttaatataaaatattcatacagcatactacacttctgtctgctaactgaatactgttactgatgagctctagacaacagataaagcaaattctctcttccaatatctatgaacagaaaattccaaacactactgggatgtcgctttagggtagggaaatgtgttccgaaaatctgtcttggagaaagcaggcaaggaaacagcgctttttccatcaccaaatctgatcccacgcctgttggaatcaagcctggagtttatagtgttcgcatttgaaggtctctgggctgcagatcaccccactgtttgctgtttcctgtgccgcacagtcttctccctctagaagtaagcatttctccagtcttccttttgttgtgacttctctttcttcagttaagagttaaataataattactgttgctctaaagatgagttaaaaacccaaagtgcaggctagaatcctgccatgagggtgtcatgtctcaggaagctggttaatgtctgtcagtttagtatcattcagaattgcccggattctctccaaggagtcagcttgccggatcc

SEQ ID NO: 458921 - DNA, 5246 bp, Homo sapiens
gataaacccacaagacacaaaacatacctttcgagcagttgggccaagatggcggccgccgagggaccggtgggcgacggcgagctgtggcagacctggcttcctaaccacgtcgtgttcttgcggctccgggagggactgaaaaaccagagtccaaccgaagctgagaaaccagcttcttcgtcgttgccttcgtcgccgccgccgcagttgctgacgagaaacgtggtctttggcctcggcggagagcttttcctgtgggacggagaagacagctccttcttagtcgttcgccttcggggccccagcggcggcggcgaagagcccgccctgtcccagtaccagagattgctttgcataaatccacccctgtttgaaatctatcaagtcttgttaagcccaacacaacatcatgtagcacttataggaataaaaggacttatggtattagaattacctaaaagatgggggaagaattctgaatttgaaggtggaaaatcaacagtgaattgtagtaccactccagttgcggagagatttttcaccagttccacctctctgactctaaagcatgctgcatggtatccaagtgaaatcctggatccccacgtagtgctgttaacatcagacaacgtaatcagaatttactcactacgtgagccgcagacacccactaacgtgataatactttcagaagccgaagaggaaagtctagtactcaataaaggaagggcgtataccgcatctctaggagagacagcagttgcatttgactttgggccattggcagcagtcccaaagactctatttggacaaaacggcaaagatgaagtagtggcatacccactgtacatcttatatgaaaatggagagactttcctgacatacatcagtctgttacacagccctggaaatattggaaagctgttgggtccattgcccatgcatcctgcggctgaagataactatggttatgatgcgtgtgctgtactctgcttaccctgtgtccccaatatcttagtgatcgctactgaatcaggaatgctgtatcactgtgtcgtgctagaaggggaagaagaagatgaccacacgtcagaaaagtcctgggattccaggattgacctcattccttctctgtatgtgtttgaatgtgttgagttggagcttgctttgaaactggcatctggagaggatgacccttttgattctgacttttcttgtccagtcaaacttcatagagatgaagaagataaggatagtttacaggaactctctacagaacagaaatgctttgttgaacacatcctttgtacgaagccattgccctgcaggcagccagctccaattcgaggattttggattgtacctgacattctgggacccacgatgatctgcatcaccagtacctatgaatgcctcatatggccgttattaagtacagtccatccagcgtctcctcccctgctttgtactcgagaagatgttgaagtggcagagtctcccctccgtgttctggctgaaaccccagattcctttgaaaagcatattagaagcattttgcaacgtagtgttgccaatccagcatttttgaaagcttctgaaaaggacatagcccctcctcctgaagaatgccttcagctcctcagcagagccacccaggtgttcagagagcagtacattctcaaacaggacttggcaaaggaggagattcagcggagggtcaaattattatgtgaccaaaaaaagaaacaactagaagatctcagttattgtcgagaagagaggaaaagtctgcgggaaatggctgagcgtttagctgacaaatatgaggaagctaaagaaaaacaagaggatatcatgaacaggatgaaaaaactacttcacagttttcactctgagctcccagttctctctgatagtgagcgagacatgaagaaagaattacagctgatacctgatcaacttcgacatttgggcaatgccatcaaacaggttactatgaaaaaggattatcaacagcaaaagatggagaaggtgttgagtcttccaaaacccaccattattctcagtgcctaccagcgaaagtgcattcagtccatcctgaaagaggagggtgaacatataagggaaatggtgaagcaaatcaatgatatccgcaatcatgtaaacttctgacaccaccaggagctgactcacacctgaactgaacaccattgaaggcttaaacccatattgtaaaacaggtagaattatctaatttataaaaaggtgttttgatgacctttggtgtggttcatctttttaaatatgttgttttataataattgagtaaatgcttttatttaaaatttggaatgtgctttataactcaagcctacagttgtgttcagcaaggactcaggattatttcacactgcacactgccagaacctccctgaaccctattgagttttctccatatttgagcaagttagttattcttgtgagctgtgttttaaagtagcagcaccagaaacatgactctgaagagggatagaaccctaggattcaaaggagaagaccacacagtgtacttggcagcagcttttttaatttgaacactttcttcttgaggacacaccttcagtacagttaacaaatggttacacctgaaatctgctgagagcagagcttaagatccacaattgcaaaggccactgctggctcacttcctcacaggctgtattacctttcagagctgagtgaggctgtgctctacgtcccaatacttgttactgagtggacatgaggtgcaagtttagcaccttaaagggagaaaaaaataggttagtatgcagaatgtgattttgtcctcacttcaccttaagtcatctttttacacttgccaatgtgagttctgaaaggtagtactatatctgcttagaaatggctgagtgactgccaattaaaagccacatgataaggtaggttacaggtaagaggtaaatcaggttagacatgcatgagaacatgtaggcacagactgaatataagcacaggaacactcgtgaaacccaactgagcttttcttttgcctagaagggctaaatcctgccttctacatcagttcccatttatgctgaaaacccagttgaaagaattgtttcctacctggacagtgacacagtagtttgtttcataccagaaacacattgctaaacaaaacttaagagtctcagtttgggtttttctacaataaagtgaattccaacagttggcatttgccacagtagagaccactaaccattccctaattgtgatgattttattacccagcaccatcttctggagaaaaatatctgtaaggtgctcagtctcagcagaacacttcactgcaagctctagttcagtcagttcagaaaggctgtgaattgcccaccctgatttacagcactaattttaataatctgaagacaaattcgcttggggcttatccaagggactagtcttaaacctacgtaatttaaattgattgcattttataattaataaaatcccctgtaactcaatagttatatgtttcctttatctaaaccatgtagcactctttataaagggactttaaaccaattaaaataatgtttcatgtgcggcaagcctttagtactatttccataattggtatttatttttaaattcataatcatgaatgcaagactacaataataacccaagagatgaggtatgtagtacttatcatttgtcctatggaagacagaagtacagaagatctttagggtaagtccatagtgacctcatttataacaaagacaattcactttaagttgatggtggcgttatgtgaacaaaacaatctacctagttcactaactcccagaaggctctttcaggtaccctgctgttatgcaaccagtctcaaaaatgatttgaaaaccatcttacttttgaacctcctggatgatgaatccatccactggatattcctgggacagtactctcagcaggtattgatgaacatgaatcaattctttgtgctttctgtagcacttcataaagttatggcaaagacctgtttcactgaggctttcttcacacaggaaaggaatctaatgcttgtaaaatgacaagacagatttccaattctaactaactggctttccataagcattgtcacttacttacattccaggtctgaattcaaaagaaaaatacaaagtatctgtcaacctagttaccatttttgtatttgacacatttgaaacaagtagtacgtaagcctaatgatccaagttgaaaaattagcctatttaaaaacgtatactaatgtttttcactgatccaataactagactaaaacacttcaaaagagtagatggtaccagttcggctttatcctggtaccctgtgggcccatgaagatcatctaagtatgcagaaaaagtgcttccaaagtttcttgtgcttttcctttaaccttcaacttccagtatatatagccccagccaagttttcagatcctcatcattaattcacttcatgaattggttttgtttgccacagtcctatggttctcaggtaagtttcagtagcatttaaggtcctccaaagcaagataagataaaatggtaaaaggaaaacaaaatacagtcagtagccaatggcctgctctcaaaccttcatattttaatataaaatattcatacagcatactacacttctgtctgctaactgaatactgttactgatgagctctagacaacagataaagcaaattctctcttccaatatctatgaacagaaaattccaaacactactgggatgtcgctttagggtagggaaatgtgttccgaaaatctgtcttggagaaagcaggcaaggaaacagcgctttttccatcaccaaatctgatcccacgcctgttggaatcaagcctggagtttatagtgttcgcatttgaaggtctctgggctgcagatcaccccactgtttgctgtttcctgtgccgcacagtcttctccctctagaagtaagcatttctccagtcttccttttgttgtgacttctctttcttcagttaagagttaaataataattactgttgctctaaagatgagttaaaaacccaaagtgcaggctagaatcctgccatgagggtgtcatgtctcaggaagctggttaatgtctgtcagtttagtatcattcagaattgcccggattctctccaaggagtcagcttgccggatcc

SEQ ID NO: 458922 - DNA, 5291 bp, Homo sapiens
gataaacccacaagacacaaaacatacctttcgagcagttgggccaagatggcggccgccgagggaccggtgggcgacggcgagctgtggcagacctggcttcctaaccacgtcgtgttcttgcggctccgggagggactgaaaaaccagagtccaaccgaagctgagaaaccagcttcttcgtcgttgccttcgtcgccgccgccgcagttgctgacgagaaacgtggtctttggcctcggcggagagcttttcctgtgggacggagaagacagctccttcttagtcgttcgccttcggggccccagcggcggcggcgaagagcccgccctgtcccagtaccagagattgctttgcataaatccacccctgtttgaaatctatcaagtcttgttaagcccaacacaacatcatgtagcacttataggaataaaaggacttatggtattagaattacctaaaagatgggggaagaattctgaatttgaaggtggaaaatcaacagtgaattgtagtaccactccagttgcggagagatttttcaccagttccacctctctgactctaaagcatgctgcatggtatccaagtgaaatcctggatccccacgtagtgctgttaacatcagacaacgtaatcagaatttactcactacgtgagccgcagacacccactaacgtgataatactttcagaagccgaagaggaaagtctagtactcaataaaggaagggcgtataccgcatctctaggagagacagcagttgcatttgactttgggccattggcagcagtcccaaagactctatttggacaaaacggcaaagatgaagtagtggcatacccactgtacatcttatatgaaaatggagagactttcctgacatacatcagtctgttacacagccctggaaatattggaaagctgttgggtccattgcccatgcatcctgcggctgaagataactatggttatgatgcgtgtgctgtactctgcttaccctgtgtccccaatatcttagtgatcgctactgaatcaggaatgctgtatcactgtgtcgtgctagaaggggaagaagaagatgaccacacgtcagaaaagtcctgggattccaggattgacctcattccttctctgtatgtgtttgaatgtgttgagttggagcttgctttgaaactggcatctggagaggatgacccttttgattctgacttttcttgtccagtcaaacttcatagagatcccaagtgtccttcaagatatcactgtactcatgaagctggtgtacatagtgttgggctaacttggattcataaacttcacaaatttcttggatcagatgaagaagataaggatagtttacaggaactctctacagaacagaaatgctttgttgaacacatcctttgtacgaagccattgccctgcaggcagccagctccaattcgaggattttggattgtacctgacattctgggacccacgatgatctgcatcaccagtacctatgaatgcctcatatggccgttattaagtacagtccatccagcgtctcctcccctgctttgtactcgagaagatgttgaagtggcagagtctcccctccgtgttctggctgaaaccccagattcctttgaaaagcatattagaagcattttgcaacgtagtgttgccaatccagcatttttgaaagcttctgaaaaggacatagcccctcctcctgaagaatgccttcagctcctcagcagagccacccaggtgttcagagagcagtacattctcaaacaggacttggcaaaggaggagattcagcggagggtcaaattattatgtgaccaaaaaaagaaacaactagaagatctcagttattgtcgagaagagaggaaaagtctgcgggaaatggctgagcgtttagctgacaaatatgaggaagctaaagaaaaacaagaggatatcatgaacaggatgaaaaaactacttcacagttttcactctgagctcccagttctctctgatagtgagcgagacatgaagaaagaattacagctgatacctgatcaacttcgacatttgggcaatgccatcaaacaggttactatgaaaaaggattatcaacagcaaaagatggagaaggtgttgagtcttccaaaacccaccattattctcagtgcctaccagcgaaagtgcattcagtccatcctgaaagaggagggtgaacatataagggaaatggtgaagcaaatcaatgatatccgcaatcatgtaaacttctgacaccaccaggagctgactcacacctgaactgaacaccattgaaggcttaaacccatattgtaaaacaggtagaattatctaatttataaaaaggtgttttgatgacctttggtgtggttcatctttttaaatatgttgttttataataattgagtaaatgcttttatttaaaatttggaatgtgctttataactcaagcctacagttgtgttcagcaaggactcaggattatttcacactgcacactgccagaacctccctgaaccctattgagttttctccatatttgagcaagttagttattcttgtgagctgtgttttaaagtagcagcaccagaaacatgactctgaagagggatagaaccctaggattcaaaggagaagaccacacagtgtacttggcagcagcttttttaatttgaacactttcttcttgaggacacaccttcagtacagttaacaaatggttacacctgaaatctgctgagagcagagcttaagatccacaattgcaaaggccactgctggctcacttcctcacaggctgtattacctttcagagctgagtgaggctgtgctctacgtcccaatacttgttactgagtggacatgaggtgcaagtttagcaccttaaagggagaaaaaaataggttagtatgcagaatgtgattttgtcctcacttcaccttaagtcatctttttacacttgccaatgtgagttctgaaaggtagtactatatctgcttagaaatggctgagtgactgccaattaaaagccacatgataaggtaggttacaggtaagaggtaaatcaggttagacatgcatgagaacatttcttttgcctagaagggctaaatcctgccttctacatcagttcccatttatgctgaaaacccagttgaaagaattgtttcctacctggacagtgacacagtagtttgtttcataccagaaacacattgctaaacaaaacttaagagtctcagtttgggtttttctacaataaagtgaattccaacagttggcatttgccacagtagagaccactaaccattccctaattgtgatgattttattacccagcaccatcttctggagaaaaatatctgtaaggtgctcagtctcagcagaacacttcactgcaagctctagttcagtcagttcagaaaggctgtgaattgcccaccctgatttacagcactaattttaataatctgaagacaaattcgcttggggcttatccaagggactagtcttaaacctacgtaatttaaattgattgcattttataattaataaaatcccctgtaactcaatagttatatgtttcctttatctaaaccatgtagcactctttataaagggactttaaaccaattaaaataatgtttcatgtgcggcaagcctttagtactatttccataattggtatttatttttaaattcataatcatgaatgcaagactacaataataacccaagagatgaggtatgtagtacttatcatttgtcctatggaagacagaagtacagaagatctttagggtaagtccatagtgacctcatttataacaaagacaattcactttaagttgatggtggcgttatgtgaacaaaacaatctacctagttcactaactcccagaaggctctttcaggtaccctgctgttatgcaaccagtctcaaaaatgatttgaaaaccatcttacttttgaacctcctggatgatgaatccatccactggatattcctgggacagtactctcagcaggtattgatgaacatgaatcaattctttgtgctttctgtagcacttcataaagttatggcaaagacctgtttcactgaggctttcttcacacaggaaaggaatctaatgcttgtaaaatgacaagacagatttccaattctaactaactggctttccataagcattgtcacttacttacattccaggtctgaattcaaaagaaaaatacaaagtatctgtcaacctagttaccatttttgtatttgacacatttgaaacaagtagtacgtaagcctaatgatccaagttgaaaaattagcctatttaaaaacgtatactaatgtttttcactgatccaataactagactaaaacacttcaaaagagtagatggtaccagttcggctttatcctggtaccctgtgggcccatgaagatcatctaagtatgcagaaaaagtgcttccaaagtttcttgtgcttttcctttaaccttcaacttccagtatatatagccccagccaagttttcagatcctcatcattaattcacttcatgaattggttttgtttgccacagtcctatggttctcaggtaagtttcagtagcatttaaggtcctccaaagcaagataagataaaatggtaaaaggaaaacaaaatacagtcagtagccaatggcctgctctcaaaccttcatattttaatataaaatattcatacagcatactacacttctgtctgctaactgaatactgttactgatgagctctagacaacagataaagcaaattctctcttccaatatctatgaacagaaaattccaaacactactgggatgtcgctttagggtagggaaatgtgttccgaaaatctgtcttggagaaagcaggcaaggaaacagcgctttttccatcaccaaatctgatcccacgcctgttggaatcaagcctggagtttatagtgttcgcatttgaaggtctctgggctgcagatcaccccactgtttgctgtttcctgtgccgcacagtcttctccctctagaagtaagcatttctccagtcttccttttgttgtgacttctctttcttcagttaagagttaaataataattactgttgctctaaagatgagttaaaaacccaaagtgcaggctagaatcctgccatgagggtgtcatgtctcaggaagctggttaatgtctgtcagtttagtatcattcagaattgcccggattctctccaaggagtcagcttgccggatcc

SEQ ID NO: 458923 - DNA, 5472 bp, Homo sapiens
gataaacccacaagacacaaaacatacctttcgagcagttgggccaagatggcggccgccgagggaccggtgggcgacggcgagctgtggcagacctggcttcctaaccacgtcgtgttcttgcggctccgggagggactgaaaaaccagagtccaaccgaagctgagaaaccagcttcttcgtcgttgccttcgtcgccgccgccgcagttgctgacgagaaacgtggtctttggcctcggcggagagcttttcctgtgggacggagaagacagctccttcttagtcgttcgccttcggggccccagcggcggcggcgaagagcccgccctgtcccagtaccagatggagtttcgctcttgttgcccaggctggagtgcaatggcgccatctcggctcaccgcaacctccaccttccagtttcaagcgattcttctgcctcagcccccccggcgagtagctgggattacagagattgctttgcataaatccacccctgtttgaaatctatcaagtcttgttaagcccaacacaacatcatgtagcacttataggaataaaaggacttatggtattagaattacctaaaagatgggggaagaattctgaatttgaaggtggaaaatcaacagtgaattgtagtaccactccagttgcggagagatttttcaccagttccacctctctgactctaaagcatgctgcatggtatccaagtgaaatcctggatccccacgtagtgctgttaacatcagacaacgtaatcagaatttactcactacgtgagccgcagacacccactaacgtgataatactttcagaagccgaagaggaaagtctagtactcaataaaggaagggcgtataccgcatctctaggagagacagcagttgcatttgactttgggccattggcagcagtcccaaagactctatttggacaaaacggcaaagatgaagtagtggcatacccactgtacatcttatatgaaaatggagagactttcctgacatacatcagtctgttacacagccctggaaatattggaaagctgttgggtccattgcccatgcatcctgcggctgaagataactatggttatgatgcgtgtgctgtactctgcttaccctgtgtccccaatatcttagtgatcgctactgaatcaggaatgctgtatcactgtgtcgtgctagaaggggaagaagaagatgaccacacgtcagaaaagtcctgggattccaggattgacctcattccttctctgtatgtgtttgaatgtgttgagttggagcttgctttgaaactggcatctggagaggatgacccttttgattctgacttttcttgtccagtcaaacttcatagagatcccaagtgtccttcaagatatcactgtactcatgaagctggtgtacatagtgttgggctaacttggattcataaacttcacaaatttcttggatcagatgaagaagataaggatagtttacaggaactctctacagaacagaaatgctttgttgaacacatcctttgtacgaagccattgccctgcaggcagccagctccaattcgaggattttggattgtacctgacattctgggacccacgatgatctgcatcaccagtacctatgaatgcctcatatggccgttattaagtacagtccatccagcgtctcctcccctgctttgtactcgagaagatgttgaagtggcagagtctcccctccgtgttctggctgaaaccccagattcctttgaaaagcatattagaagcattttgcaacgtagtgttgccaatccagcatttttgaaagcttctgaaaaggacatagcccctcctcctgaagaatgccttcagctcctcagcagagccacccaggtgttcagagagcagtacattctcaaacaggacttggcaaaggaggagattcagcggagggtcaaattattatgtgaccaaaaaaagaaacaactagaagatctcagttattgtcgagaagagaggaaaagtctgcgggaaatggctgagcgtttagctgacaaatatgaggaagctaaagaaaaacaagaggatatcatgaacaggatgaaaaaactacttcacagttttcactctgagctcccagttctctctgatagtgagcgagacatgaagaaagaattacagctgatacctgatcaacttcgacatttgggcaatgccatcaaacaggttactatgaaaaaggattatcaacagcaaaagatggagaaggtgttgagtcttccaaaacccaccattattctcagtgcctaccagcgaaagtgcattcagtccatcctgaaagaggagggtgaacatataagggaaatggtgaagcaaatcaatgatatccgcaatcatgtaaacttctgacaccaccaggagctgactcacacctgaactgaacaccattgaaggcttaaacccatattgtaaaacaggtagaattatctaatttataaaaaggtgttttgatgacctttggtgtggttcatctttttaaatatgttgttttataataattgagtaaatgcttttatttaaaatttggaatgtgctttataactcaagcctacagttgtgttcagcaaggactcaggattatttcacactgcacactgccagaacctccctgaaccctattgagttttctccatatttgagcaagttagttattcttgtgagctgtgttttaaagtagcagcaccagaaacatgactctgaagagggatagaaccctaggattcaaaggagaagaccacacagtgtacttggcagcagcttttttaatttgaacactttcttcttgaggacacaccttcagtacagttaacaaatggttacacctgaaatctgctgagagcagagcttaagatccacaattgcaaaggccactgctggctcacttcctcacaggctgtattacctttcagagctgagtgaggctgtgctctacgtcccaatacttgttactgagtggacatgaggtgcaagtttagcaccttaaagggagaaaaaaataggttagtatgcagaatgtgattttgtcctcacttcaccttaagtcatctttttacacttgccaatgtgagttctgaaaggtagtactatatctgcttagaaatggctgagtgactgccaattaaaagccacatgataaggtaggttacaggtaagaggtaaatcaggttagacatgcatgagaacatgtaggcacagactgaatataagcacaggaacactcgtgaaacccaactgagcttttcttttgcctagaagggctaaatcctgccttctacatcagttcccatttatgctgaaaacccagttgaaagaattgtttcctacctggacagtgacacagtagtttgtttcataccagaaacacattgctaaacaaaacttaagagtctcagtttgggtttttctacaataaagtgaattccaacagttggcatttgccacagtagagaccactaaccattccctaattgtgatgattttattacccagcaccatcttctggagaaaaatatctgtaaggtgctcagtctcagcagaacacttcactgcaagctctagttcagtcagttcagaaaggctgtgaattgcccaccctgatttacagcactaattttaataatctgaagacaaattcgcttggggcttatccaagggactagtcttaaacctacgtaatttaaattgattgcattttataattaataaaatcccctgtaactcaatagttatatgtttcctttatctaaaccatgtagcactctttataaagggactttaaaccaattaaaataatgtttcatgtgcggcaagcctttagtactatttccataattggtatttatttttaaattcataatcatgaatgcaagactacaataataacccaagagatgaggtatgtagtacttatcatttgtcctatggaagacagaagtacagaagatctttagggtaagtccatagtgacctcatttataacaaagacaattcactttaagttgatggtggcgttatgtgaacaaaacaatctacctagttcactaactcccagaaggctctttcaggtaccctgctgttatgcaaccagtctcaaaaatgatttgaaaaccatcttacttttgaacctcctggatgatgaatccatccactggatattcctgggacagtactctcagcaggtattgatgaacatgaatcaattctttgtgctttctgtagcacttcataaagttatggcaaagacctgtttcactgaggctttcttcacacaggaaaggaatctaatgcttgtaaaatgacaagacagatttccaattctaactaactggctttccataagcattgtcacttacttacattccaggtctgaattcaaaagaaaaatacaaagtatctgtcaacctagttaccatttttgtatttgacacatttgaaacaagtagtacgtaagcctaatgatccaagttgaaaaattagcctatttaaaaacgtatactaatgtttttcactgatccaataactagactaaaacacttcaaaagagtagatggtaccagttcggctttatcctggtaccctgtgggcccatgaagatcatctaagtatgcagaaaaagtgcttccaaagtttcttgtgcttttcctttaaccttcaacttccagtatatatagccccagccaagttttcagatcctcatcattaattcacttcatgaattggttttgtttgccacagtcctatggttctcaggtaagtttcagtagcatttaaggtcctccaaagcaagataagataaaatggtaaaaggaaaacaaaatacagtcagtagccaatggcctgctctcaaaccttcatattttaatataaaatattcatacagcatactacacttctgtctgctaactgaatactgttactgatgagctctagacaacagataaagcaaattctctcttccaatatctatgaacagaaaattccaaacactactgggatgtcgctttagggtagggaaatgtgttccgaaaatctgtcttggagaaagcaggcaaggaaacagcgctttttccatcaccaaatctgatcccacgcctgttggaatcaagcctggagtttatagtgttcgcatttgaaggtctctgggctgcagatcaccccactgtttgctgtttcctgtgccgcacagtcttctccctctagaagtaagcatttctccagtcttccttttgttgtgacttctctttcttcagttaagagttaaataataattactgttgctctaaagatgagttaaaaacccaaagtgcaggctagaatcctgccatgagggtgtcatgtctcaggaagctggttaatgtctgtcagtttagtatcattcagaattgcccggattctctccaaggagtcagcttgccggatcc

SEQ ID NO: 458924 - DNA, 3465 bp, Homo sapiens
  misc_feature (2713)..(2713): n is a, c, g, or t
  misc_feature (2724)..(2724): n is a, c, g, or t
  misc_feature (2807)..(2807): n is a, c, g, or t
gataaacccacaagacacaaaacatacctttcgagcagttgggccaagatggcggccgccgagggaccggtgggcgacggcgagctgtggcagacctggcttcctaaccacgtcgtgttcttgcggctccgggagggactgaaaaaccagagtccaaccgaagctgagaaaccagcttcttcgtcgttgccttcgtcgccgccgccgcagttgctgacgagaaacgtggtctttggcctcggcggagagcttttcctgtgggacggagaagacagctccttcttagtcgttcgccttcggggccccagcggcggcggcgaagagcccgccctgtcccagtaccagagattgctttgcataaatccacccctgtttgaaatctatcaagtcttgttaagcccaacacaacatcatgtagcacttataggaataaaaggacttatggtattagaattacctaaaagatgggggaagaattctgaatttgaaggtggaaaatcaacagtgaattgtagtaccactccagttgcggagagatttttcaccagttccacctctctgactctaaagcatgctgcatggtatccaagtgaaatcctggatccccacgtagtgctgttaacatcagacaacgtaatcagaatttactcactacgtgagccgcagacacccactaacgtgataatactttcagaagccgaagaggaaagtctagtactcaataaaggaagggcgtataccgcatctctaggagagacagcagttgcatttgactttgggccattggcagcagtcccaaagactctatttggacaaaacggcaaagatgaagtagtggcatacccactgtacatcttatatgaaaatggagagactttcctgacatacatcagtctgttacacagccctggaaatattggaaagctgttgggtccattgcccatgcatcctgcggctgaagataactatggttatgatgcgtgtgctgtactctgcttaccctgtgtccccaatatcttagtgatcgctactgaatcaggaatgctgtatcactgtgtcgtgctagaaggggaagaagaagatgaccacacgtcagaaaagtcctgggattccaggattgacctcattccttctctgtatgtgtttgaatgtgttgagttggagcttgctttgaaactggcatctggagaggatgacccttttgattctgacttttcttgtccagtcaaacttcatagagatcccaagtgtccttcaagatatcactgtactcatgaagctggtgtacatagtgttgggctaacttggattcataaacttcacaaatttcttggatcagatgaagaagataaggatagtttacaggaactctctacagaacagaaatgctttgttgaacacatcctttgtacgaagccattgccctgcaggcagccagctccaattcgaggattttggattgtacctgacattctgggacccacgatgatctgcatcaccagtacctatgaatgcctcatatggccgttattaagtacagtccatccagcgtctcctcccctgctttgtactcgagaagatgttgaagtggcagagtctcccctccgtgttctggctgaaaccccagattcctttgaaaagcatattagaagcattttgcaacgtagtgttgccaatccagcatttttgaaagcttctgaaaaggacatagcccctcctcctgaagaatgccttcagctcctcagcagagccacccaggtgttcagagagcagtacattctcaaacaggacttggcaaaggaggagattcagcggagggtcaaattattatgtgaccaaaaaaagaaacaactagaagatctcagttattgtcgagaagagaggaaaagtctgcgggaaatggctgagcgtttagctgacaaatatgaggaagctaaagaaaaacaagaggatatcatgaacaggatgaaaaaactacttcacagttttcactctgagctcccagttctctctgatagtgagcgagacatgaagaaagaattacagctgatacctgatcaacttcgacatttgggcaatgccatcaaacaggttactatgaaaaaggattatcaacagcaaaagatggagaaggtgttgagtcttccaaaacccaccattattctcagtgcctaccagcgaaagtgcattcagtccatcctgaaagaggagggtgaacatataagggaaatggtgaagcaaatcaatgatatccgcaatcatgtaaacttctgacaccaccaggagctgactcacacctgaactgaacaccattgaaggcttaaacccatattgtaaaacagcatcaacagcagaccggcaattgcgcttttgatctaaaggaaagatgaaagcctggatcctgcaatacactgagattatagaaaactgcaaagcaaaccaaatccaggttgctctaacttaaattccgcaatgctagtcaggcagattgctccaacctgagagctgtgagttcaggtggggaggttcacattccactgtgattaactagctagctcctttctctgtcacaattacctggaatacccaaggcagactatgacaagggtcaggtgacacacgttaatatccattgctggcaacatgtgcctgcactgactccaggaaccgtctgttgaatgaacgctaaatcccagagcttcccagtgtgccncagcgtgagangaggaaaaacgtgagaaaggtaactcacctctttctgcaagagattccattctgtttcactaactaaacgataaccactaggngacacataggcactctccatgccctgggtaacgctggagaggagggacgctgtctcttcttgttctggtgtcatcgccttgattgctctttcctgatctttggttaacataaacccacttggcatctggagtgacccaagggatgcagtatcaaagttctcagacactgaatctgctcctaccagtggtccaaaatctgactcgtccaggtttccagcagattttgctttgtagttatagcctaaagctttggattgcaatgagcccgaggttcccaagctgtctgtagactgtgctctcctgagtccatctttaaacatgtcattgtccgatttactgaaaggatctccagatggcaacagcaagcctgcatctaaggaatgaactgagccacgggtgctgtctaaatgctcctgaaatgtgaaaatacatatggccaagttagacaattctctgcgtttttaaagacaaaaactataataaatgtattccgccactcattacacatgataatcattaatgtgctaccttcacagactcattgaacaaacactaagtgtcatttctacatgctggacacaaaaccaggccctcaggatacaactgtgagcaagatataatccctgacctcgagatacatacggcttcaaaaaaaaaa

SEQ ID NO: 458925 - DNA, 2232 bp, Homo sapiens
gataaacccacaagacacaaaacatacctttcgagcagttgggccaagatggcggccgccgagggaccggtgggcgacggcgagctgtggcagacctggcttcctaaccacgtcgtgttcttgcggctccgggagggactgaaaaaccagagtccaaccgaagctgagaaaccagcttcttcgtcgttgccttcgtcgccgccgccgcagttgctgacgagaaacgtggtctttggcctcggcggagagcttttcctgtgggacggagaagacagctccttcttagtcgttcgccttcggggccccagcggcggcggcgaagagcccgccctgtcccagtaccagagattgctttgcataaatccacccctgtttgaaatctatcaagtcttgttaagcccaacacaacatcatgtagcacttataggaataaaaggacttatggtattagaattacctaaaagatgggggaagaattctgaatttgaaggtggaaaatcaacagtgaattgtagtaccactccagttgcggagagatttttcaccagttccacctctctgactctaaagcatgctgcatggtatccaagtgaaatcctggatccccacgtagtgctgttaacatcagacaacgtaatcagaatttactcactacgtgagccgcagacacccactaacgtgataatactttcagaagccgaagaggaaagtctagtactcaataaaggaagggcgtataccgcatctctaggagagacagcagttgcatttgactttgggccattggcagcagtcccaaagactctatttggacaaaacggcaaagatgaagtagtggcatacccactgtacatcttatatgaaaatggagagactttcctgacatacatcagtctgttacacagccctggaaatattggaaagctgttgggtccattgcccatgcatcctgcggctgaagataactatggttatgatgcgtgtgctgtactctgcttaccctgtgtccccaatatcttagtgatcgctactgaatcaggaatgctgtatcactgtgtcgtgctagaaggggaagaagaagatgaccacacgtcagaaaagtcctgggattccaggattgacctcattccttctctgtatgtgtttgaatgtgttgagttggagcttgctttgaaactggcatctggagaggatgacccttttgattctgacttttcttgtccagtcaaacttcatagagatcccaagtgtccttcaagatatcactgtactcatgaagctggtgtacatagtgttgggctaacttggattcataaacttcacaaatttcttggatcagatgaagaagataaggatagtttacaggaactctctacagaacagaaatgctttgttgaacacatcctttgtacgaagccattgccctgcaggcagccagctccaattcgaggattttggattgtacctgacattctgggacccacgatgatctgcatcaccagtacctatgaatgcctcatatggccgttattaagtacagtccatccagcgtctcctcccctgctttgtactcgagaagatgttgaagtggcagagtctcccctccgtgttctggctgaaaccccagattcctttgaaaagcatattagaagcattttgcaacgtagtgttgccaatccagcatttttgaaagcttctgaaaaggacatagcccctcctcctgaagaatgccttcagctcctcagcagagccacccaggtgttcagagagcagtacattctcaaacaggacttggcaaaggaggagattcagcggagggtcaaattattatgtgaccaaaaaaagaaacaactagaagatctcagttattgtcgagaagagaggaaaagtctgcgggaaatggctgagcgtttagctgacaaatatgaggaagctaaagaaaaacaagaggatatcatgaacaggatgaaaaaactacttcacagttttcactctgagctcccagttctctctgatagtgagcgagacatgaagaaagaattacagctgatacctgatcaacttcgacatttgggcaatgccatcaaacaggttactatgaaaaaggattatcaacagcaaaagatggagaaggtgttgagtcttccaaaacccaccattattctcagtgcctaccagcgaaagtgcattcagtccatcctgaaagaggagtaagtaaatacttccaatcag

SEQ ID NO: 458926 - DNA, 3819 bp, Homo sapiens
accatcttctcgagtacaaagcaggggaggagacgctggatggactcgagaagatgttgaagtggcagagtctcccctccgtgttctggctgaaaccccagattcctttgaaaagcatattagaagcattttgcaacgtagtgttgccaatccagcatttttgaaagcttctgaaaaggacatagcccctcctcctgaagaatgccttcagctcctcagcagagccacccaggtgttcagagagcagtacattctcaaacaggacttggcaaaggaggagattcagcggagggtcaaattattatgtgaccaaaaaaagaaacaactagaagatctcagttattgtcgagaagagaggaaaagtctgcgggaaatggctgagcgtttagctgacaaatatgaggaagctaaagaaaaacaagaggatatcatgaacaggatgaaaaaactacttcacagttttcactctgagctcccagttctctctgatagtgagcgagacatgaagaaagaattacagctgatacctgatcaacttcgacatttgggcaatgccatcaaacaggttactatgaaaaaggattatcaacagcaaaagatggagaaggtgttgagtcttccaaaacccaccattattctcagtgcctaccagcgaaagtgcattcagtccatcctgaaagaggagggtgaacatataagggaaatggtgaagcaaatcaatgatatccgcaatcatgtaaacttctgacaccaccaggagctgactcacacctgaactgaacaccattgaaggcttaaacccatattgtaaaacaggtagaattatctaatttataaaaaggtgttttgatgacctttggtgtggttcatctttttaaatatgttgttttataataattgagtaaatgcttttatttaaaatttggaatgtgctttataactcaagcctacagttgtgttcagcaaggactcaggattatttcacactgcacactgccagaacctccctgaaccctattgagttttctccatatttgagcaagttagttattcttgtgagctgtgttttaaagtagcagcaccagaaacatgactctgaagagggatagaaccctaggattcaaaggagaagaccacacagtgtacttggcagcagcttttttaatttgaacactttcttcttgaggacacaccttcagtacagttaacaaatggttacacctgaaatctgctgagagcagagcttaagatccacaattgcaaaggccactgctggctcacttcctcacaggctgtattacctttcagagctgagtgaggctgtgctctacgtcccaatacttgttactgagtggacatgaggtgcaagtttagcaccttaaagggagaaaaaaataggttagtatgcagaatgtgattttgtcctcacttcaccttaagtcatctttttacacttgccaatgtgagttctgaaaggtagtactatatctgcttagaaatggctgagtgactgccaattaaaagccacatgataaggtaggttacaggtaagaggtaaatcaggttagacatgcatgagaacatgtaggcacagactgaatataagcacaggaacactcgtgaaacccaactgagcttttcttttgcctagaagggctaaatcctgccttctacatcagttcccatttatgctgaaaacccagttgaaagaattgtttcctacctggacagtgacacagtagtttgtttcataccagaaacacattgctaaacaaaacttaagagtctcagtttgggtttttctacaataaagtgaattccaacagttggcatttgccacagtagagaccactaaccattccctaattgtgatgattttattacccagcaccatcttctggagaaaaatatctgtaaggtgctcagtctcagcagaacacttcactgcaagctctagttcagtcagttcagaaaggctgtgaattgcccaccctgatttacagcactaattttaataatctgaagacaaattcgcttggggcttatccaagggactagtcttaaacctacgtaatttaaattgattgcattttataattaataaaatcccctgtaactcaatagttatatgtttcctttatctaaaccatgtagcactctttataaagggactttaaaccaattaaaataatgtttcatgtgcggcaagcctttagtactatttccataattggtatttatttttaaattcataatcatgaatgcaagactacaataataacccaagagatgaggtatgtagtacttatcatttgtcctatggaagacagaagtacagaagatctttagggtaagtccatagtgacctcatttataacaaagacaattcactttaagttgatggtggcgttatgtgaacaaaacaatctacctagttcactaactcccagaaggctctttcaggtaccctgctgttatgcaaccagtctcaaaaatgatttgaaaaccatcttacttttgaacctcctggatgatgaatccatccactggatattcctgggacagtactctcagcaggtattgatgaacatgaatcaattctttgtgctttctgtagcacttcataaagttatggcaaagacctgtttcactgaggctttcttcacacaggaaaggaatctaatgcttgtaaaatgacaagacagatttccaattctaactaactggctttccataagcattgtcacttacttacattccaggtctgaattcaaaagaaaaatacaaagtatctgtcaacctagttaccatttttgtatttgacacatttgaaacaagtagtacgtaagcctaatgatccaagttgaaaaattagcctatttaaaaacgtatactaatgtttttcactgatccaataactagactaaaacacttcaaaagagtagatggtaccagttcggctttatcctggtaccctgtgggcccatgaagatcatctaagtatgcagaaaaagtgcttccaaagtttcttgtgcttttcctttaaccttcaacttccagtatatatagccccagccaagttttcagatcctcatcattaattcacttcatgaattggttttgtttgccacagtcctatggttctcaggtaagtttcagtagcatttaaggtcctccaaagcaagataagataaaatggtaaaaggaaaacaaaatacagtcagtagccaatggcctgctctcaaaccttcatattttaatataaaatattcatacagcatactacacttctgtctgctaactgaatactgttactgatgagctctagacaacagataaagcaaattctctcttccaatatctatgaacagaaaattccaaacactactgggatgtcgctttagggtagggaaatgtgttccgaaaatctgtcttggagaaagcaggcaaggaaacagcgctttttccatcaccaaatctgatcccacgcctgttggaatcaagcctggagtttatagtgttcgcatttgaaggtctctgggctgcagatcaccccactgtttgctgtttcctgtgccgcacagtcttctccctctagaagtaagcatttctccagtcttccttttgttgtgacttctctttcttcagttaagagttaaataataattactgttgctctaaagatgagttaaaaacccaaagtgcaggctagaatcctgccatgagggtgtcatgtctcaggaagctggttaatgtctgtcagtttagtatcattcagaattgcccggattctctccaaggagtcagcttgccggatcc

SEQ ID NO: 458927 - DNA, 4211 bp, Homo sapiens
aacttttgagattacagtcagcagcacgctacagttagggattcctgagtgacttagtcacatgggctctagactttagtgtggagctgcattaaaggtttccaagccaccacttttgaggttatggtactgataggatgtcccaagcaacttcagcccaggcctgagaaggccgcggacctgtcatgtctttgctcttggttccattgcatttgctgctttgtaatttaactatgactgtgtttttccaggcagccagctccaattcgaggattttggattgtacctgacattctgggacccacgatgatctgcatcaccagtacctatgaatgcctcatatggccgttattaagtacagtccatccagcgtctcctcccctgctttgtactcgagaagatgttgaagtggcagagtctcccctccgtgttctggctgaaaccccagattcctttgaaaagcatattagaagcattttgcaacgtagtgttgccaatccagcatttttgaattgttttactcagctaaggaaaataaaggtagaaactttgtttttagcttctgaaaaggacatagcccctcctcctgaagaatgccttcagctcctcagcagagccacccaggtgttcagagagcagtacattctcaaacaggacttggcaaaggaggagattcagcggagggtcaaattattatgtgaccaaaaaaagaaacaactagaagatctcagttattgtcgagaagagaggaaaagtctgcgggaaatggctgagcgtttagctgacaaatatgaggaagctaaagaaaaacaagaggatatcatgaacaggatgaaaaaactacttcacagttttcactctgagctcccagttctctctgatagtgagcgagacatgaagaaagaattacagctgatacctgatcaacttcgacatttgggcaatgccatcaaacaggttactatgaaaaaggattatcaacagcaaaagatggagaaggtgttgagtcttccaaaacccaccattattctcagtgcctaccagcgaaagtgcattcagtccatcctgaaagaggagggtgaacatataagggaaatggtgaagcaaatcaatgatatccgcaatcatgtaaacttctgacaccaccaggagctgactcacacctgaactgaacaccattgaaggcttaaacccatattgtaaaacaggtagaattatctaatttataaaaaggtgttttgatgacctttggtgtggttcatctttttaaatatgttgttttataataattgagtaaatgcttttatttaaaatttggaatgtgctttataactcaagcctacagttgtgttcagcaaggactcaggattatttcacactgcacactgccagaacctccctgaaccctattgagttttctccatatttgagcaagttagttattcttgtgagctgtgttttaaagtagcagcaccagaaacatgactctgaagagggatagaaccctaggattcaaaggagaagaccacacagtgtacttggcagcagcttttttaatttgaacactttcttcttgaggacacaccttcagtacagttaacaaatggttacacctgaaatctgctgagagcagagcttaagatccacaattgcaaaggccactgctggctcacttcctcacaggctgtattacctttcagagctgagtgaggctgtgctctacgtcccaatacttgttactgagtggacatgaggtgcaagtttagcaccttaaagggagaaaaaaataggttagtatgcagaatgtgattttgtcctcacttcaccttaagtcatctttttacacttgccaatgtgagttctgaaaggtagtactatatctgcttagaaatggctgagtgactgccaattaaaagccacatgataaggtaggttacaggtaagaggtaaatcaggttagacatgcatgagaacatgtaggcacagactgaatataagcacaggaacactcgtgaaacccaactgagcttttcttttgcctagaagggctaaatcctgccttctacatcagttcccatttatgctgaaaacccagttgaaagaattgtttcctacctggacagtgacacagtagtttgtttcataccagaaacacattgctaaacaaaacttaagagtctcagtttgggtttttctacaataaagtgaattccaacagttggcatttgccacagtagagaccactaaccattccctaattgtgatgattttattacccagcaccatcttctggagaaaaatatctgtaaggtgctcagtctcagcagaacacttcactgcaagctctagttcagtcagttcagaaaggctgtgaattgcccaccctgatttacagcactaattttaataatctgaagacaaattcgcttggggcttatccaagggactagtcttaaacctacgtaatttaaattgattgcattttataattaataaaatcccctgtaactcaatagttatatgtttcctttatctaaaccatgtagcactctttataaagggactttaaaccaattaaaataatgtttcatgtgcggcaagcctttagtactatttccataattggtatttatttttaaattcataatcatgaatgcaagactacaataataacccaagagatgaggtatgtagtacttatcatttgtcctatggaagacagaagtacagaagatctttagggtaagtccatagtgacctcatttataacaaagacaattcactttaagttgatggtggcgttatgtgaacaaaacaatctacctagttcactaactcccagaaggctctttcaggtaccctgctgttatgcaaccagtctcaaaaatgatttgaaaaccatcttacttttgaacctcctggatgatgaatccatccactggatattcctgggacagtactctcagcaggtattgatgaacatgaatcaattctttgtgctttctgtagcacttcataaagttatggcaaagacctgtttcactgaggctttcttcacacaggaaaggaatctaatgcttgtaaaatgacaagacagatttccaattctaactaactggctttccataagcattgtcacttacttacattccaggtctgaattcaaaagaaaaatacaaagtatctgtcaacctagttaccatttttgtatttgacacatttgaaacaagtagtacgtaagcctaatgatccaagttgaaaaattagcctatttaaaaacgtatactaatgtttttcactgatccaataactagactaaaacacttcaaaagagtagatggtaccagttcggctttatcctggtaccctgtgggcccatgaagatcatctaagtatgcagaaaaagtgcttccaaagtttcttgtgcttttcctttaaccttcaacttccagtatatatagccccagccaagttttcagatcctcatcattaattcacttcatgaattggttttgtttgccacagtcctatggttctcaggtaagtttcagtagcatttaaggtcctccaaagcaagataagataaaatggtaaaaggaaaacaaaatacagtcagtagccaatggcctgctctcaaaccttcatattttaatataaaatattcatacagcatactacacttctgtctgctaactgaatactgttactgatgagctctagacaacagataaagcaaattctctcttccaatatctatgaacagaaaattccaaacactactgggatgtcgctttagggtagggaaatgtgttccgaaaatctgtcttggagaaagcaggcaaggaaacagcgctttttccatcaccaaatctgatcccacgcctgttggaatcaagcctggagtttatagtgttcgcatttgaaggtctctgggctgcagatcaccccactgtttgctgtttcctgtgccgcacagtcttctccctctagaagtaagcatttctccagtcttccttttgttgtgacttctctttcttcagttaagagttaaataataattactgttgctctaaagatgagttaaaaacccaaagtgcaggctagaatcctgccatgagggtgtcatgtctcaggaagctggttaatgtctgtcagtttagtatcattcagaattgcccggattctctccaaggagtcagcttgccggatcc

SEQ ID NO: 458928 - DNA, 1672 bp, Homo sapiens
gataaacccacaagacacaaaacatacctttcgagcagttgggccaagatggcggccgccgagggaccggtgggcgacggcgagctgtggcagacctggcttcctaaccacgtcgtgttcttgcggctccgggagggactgaaaaaccagagtccaaccgaagctgagaaaccagcttcttcgtcgttgccttcgtcgccgccgccgcagttgctgacgagaaacgtggtctttggcctcggcggagagcttttcctgtgggacggagaagacagctccttcttagtcgttcgccttcggggccccagcggcggcggcgaagagcccgccctgtcccagtaccagagattgctttgcataaatccacccctgtttgaaatctatcaagtcttgttaagcccaacacaacatcatgtagcacttataggaataaaaggacttatggtattagaattacctaaaagatgggggaagaattctgaatttgaaggtggaaaatcaacagtgaattgtagtaccactccagttgcggagagatttttcaccagttccacctctctgactctaaagcatgctgcatggtatccaagtgaaatcctggatccccacgtagtgctgttaacatcagacaacgtaatcagaatttactcactacgtgagccgcagacacccactaacgtgataatactttcagaagccgaagaggaaagtctagtactcaataaaggaagggcgtataccgcatctctaggagagacagcagttgcatttgactttgggccattggcagcagtcccaaagactctatttggacaaaacggcaaagatgaagtagtggcatacccactgtacatcttatatgaaaatggagagactttcctgacatacatcagtctgttacacagccctggaaatattggaaagctgttgggtccattgcccatgcatcctgcggctgaagataactatggttatgatgcgtgtgctgtactctgcttaccctgtgtccccaatatcttagtgatcgctactgaatcaggaatgctgtatcactgtgtcgtgctagaaggggaagaagaagatgaccacacgtcagaaaagtcctgggattccaggattgacctcattccttctctgtatgtgtttgaatgtgttgagttggagcttgctttgaaactggcatctggagaggatgacccttttgattctgacttttcttgtccagtcaaacttcatagagatgaagaagataaggatagtttacaggaactctctacagaacagaaatgctttgttgaacacatcctttgtacgaagccattgccctgcaggcagccagctccaattcgaggattttggattgtacctgacattctgggacccacgatgatctgcatcaccagtacctatgaatgcctcatatggccgttattaagtacagtccatccagcgtctcctcccctgctttgtactcgagaagatgttgaagtggcagagtctcccctccgtgttctggctgaaaccccagattcctttgaaaagcatattagaagcattttgcaacgtagtgttgccaatccagcatttttgaaagcttctgaaaaggacatagcccctcctcttgaagacactcgagtgttcttacaagatgtcactaggcgacgagaaatta

SEQ ID NO: 458929 - DNA, 1725 bp, Homo sapiens
gataaacccacaagacacaaaacatacctttcgagcagttgggccaagatggcggccgccgagggaccggtgggcgacggcgagctgtggcagacctggcttcctaaccacgtcgtgttcttgcggctccgggagggactgaaaaaccagagtccaaccgaagctgagaaaccagcttcttcgtcgttgccttcgtcgccgccgccgcagttgctgacgagaaacgtggtctttggcctcggcggagagcttttcctgtgggacggagaagacagctccttcttagtcgttcgccttcggggccccagcggcggcggcgaagagcccgccctgtcccagtaccagagattgctttgcataaatccacccctgtttgaaatctatcaagtcttgttaagcccaacacaacatcatgtagcacttataggaataaaaggacttatggtattagaattacctaaaagatgggggaagaattctgaatttgaaggtggaaaatcaacagtgaattgtagtaccactccagttgcggagagatttttcaccagttccacctctctgactctaaagcatgctgcatggtatccaagtgaaatcctggatccccacgtagtgctgttaacatcagacaacgtaatcagaatttactcactacgtgagccgcagacacccactaacgtgataatactttcagaagccgaagaggaaagtctagtactcaataaaggaagggcgtataccgcatctctaggagagacagcagttgcatttgactttgggccattggcagcagtcccaaagactctatttggacaaaacggcaaagatgaagtagtggcatacccactgtacatcttatatgaaaatggagagactttcctgacatacatcagtctgttacacagccctggaaatattggaaagctgttgggtccattgcccatgcatcctgcggctgaagataactatggttatgatgcgtgtgctgtactctgcttaccctgtgtccccaatatcttagtgatcgctactgaatcaggaatgctgtatcactgtgtcgtgctagaaggggaagaagaagatgaccacacgaatgaaacccccacacacacacacatgcatacacacacacacacagcacacacacagaaaatatactgtaaagaaagagagaaaataaaaagttaaaaagttaaaaaaaaaaaaaaacctgtggtgcacctccagggggaggcaccacccaagagaacctccaccaatggtggaagagtttctctctctggactgggccacccatcggcgtgggttgtgggccccattttatccaccatataaaacgagtaacgcagctggctaaaaccaagaaaatttacaacggcggtacttacctttttgtcgaccgttgtgtccctactgtgattaacacatatttaacggaccgtggcggtggtgtaatttcccctatattaaccccaagaaccttgtggtaccacgtttaaacgcctattattctactacaacagctgtgtgtgggccaagctgcgtccacggacttaataacatgtcgcgcgggaattatattacaaacgggtcctttctcatgggtgggacccaacctttgggccttttcggccccaaaaagagattttctagaacggtaaacaaaatacttcagcgttccccattgggttcccaatttcaaccttaccatggagaacaacagca

SEQ ID NO: 458930 - DNA, 4836 bp, Homo sapiens
cagcctggtcagtgagtcactgcaacagcgagtgcatggcatggcactgtcagaactgggcacattcttgaggagcttcagtgatgctctgatccgattctcccgagaccacttcagggggaaatcaatggcccctcattacgtgccctacctactggccgccctcaaccacaagtcagcactcagctcctcagtgtctgtcctgcagctggacggggcgccttcaggggccttggctccagtggaagctgcgctggacgagttgcagaggaggatctaccgcttggtgttggaggcgctgcaggcggagctccagcccctgttcgcggatctgccctcgcgccaatggctgtcgagccctgagctcctgcaaagtgtgtgtgaaccggactggggcgcttctgccgggacttctggcgcgtgcggaaccccacggttcagctgctgctggctgaggccgagcgtgccgtggtgctccagtacctgagcgcgctgatgcaaggccgcctggtgtgccgcggagccgacgagaggacccaggcggccgagcgcctgcggcacgatgctgcccagcttcagcagcttttcctcagtttggtgagagcttcttgggcgggcagacgggcgagagtctcagtggctgggtgggagagaggtgctggcgcgagaccctaccccgacgtgctcagggcctggaggagaacgcgcactgcgcgccggtgctgctcgccctgagggagctgctaaacctccgcgaccccgcgctgctgggcctggaggtggctggcctgcggcaacaatttcccgacgtgagcgaggaccacgtctccgccctcttgggcctgcgcggggacttgtcccgggagcagcacctggccgcgctcagctccctgcaggctgcgctgccgccgtcgccccgcgcgagccgccgcgtcctcttcagcctagtgcccgcgcccgcgctcgcgccggcctcctgcctgccctcggggtcctgcgcccgagccctgctgctcgcagaataaaccacggctgccggacgcctgagtctgtgtgtgttggggaaggtgggatggaataaaagtgcccacgagggttgagggaattcttgcagagtgacacgcttaaagtatcctggctcccgtcctggtacacgggctgcgccccgcctatgcaggcatctgccctctgtgcagactgcgttcccgaggccgcgggctacgcccccacgtctccgcgcccaggccgtgagcaagagtctccgccgccctggccgcctggagcccctgaagcccagcaactcgctgtggccttgggaagggggcgggcccaggaccacgaacaccgccccctcaaccctgcctggcttcgctcccagtggcctcgggggcgcgccgccgcggagactgacgcgaagccccacgctttcgtaagagcgtgcgcgcgcccgaggacgtacgtcatcggcgacggctcccgccggctgggcgtccggtggccggtgtagcagagcggggagcggcgggcggcgagcagaggagctaacaggtgggggcacggcacgcggacggacccccccaaaggccgggaggaggcgcgcgacgcgacctttcctgatctcccggagaagcctccactccattgtctcctggccccaccctccattgggcacgcccttcaccttatcccccaccacttattggctgcaggtcacgcccctcctctatttctggttccccattggctcttcaccttgtcctctccggggcttctctccgcacaggccacaccctctcatttgtcactagaccccgccttaatagtggggggctcctcccccatccatccttcattcattatgcacccagtgctgggtgcttggtacacgggggtgaatcagaccccattcctgccttcggggagttcaggggattgtgggaggacacggacctagactccaacagtgacagctctgagtaaagaagtcgccgaagcagtgggacactagacgcggggaaggcttcctggaggaagtgaggcctaaactgagccttgaagaatggttaagagtttgctccaggaatatattgcaaaggcattcttggcggaaggacccgagacgtgaaaaaaacaggcgtattctggtaatttcgaggagaggtcgacagtgtggggagttggagtgacccggctggatgtgacccccaggacagaatggtgctggactcaggggctcaggcgtatgatcaggcaccccccagcccgcctaccagtcccccatccctgcgccataggctgaagccctcagaccgagatgggccaccactgtacccctggtctcagtccctggccttgcccctggctctggcagtccccccagcgctgcagccccagcctgagcagcagccgttctcacagatgctcctgggccaccgtggccacatgcgtcgcagtgagagcacctactctgtaaatagtactggccggcgggggcgtggcaccctgggacggcctccacctggacggggacggaacccaggtgggggcaccctgcggcctgcagcctccctgcctcacattgctaagactcaaagggatgcaggccatattgccagcaagagcccctgcatgttggtggccctgcggccaaccaacatggaccgtgagcgagacaagttcttccagtcccattacacctacaatccacagtttgagtaccaggagcccatgcccacggctgtgctggaaaagtactgcgaggcctctggacagttcatccatcaggcagttggcatcattgaggctgttctggagaagtttggaacctatgaacactttgaggctgccactggggggcagctgctcaccaagtgccagatatggtcgattgtgcgcaaatacatgcagaaggagggctgcgctggggaggttgtggtgcagctgagtgaggacctgctgtcccaggcagtgatgatggtggagaacagccggcccacattggcgatcaacctgaccggagcccgccagtactggttggagggcatgctgcggcatgagataggcacccactacctgcggggcgtgaacaacgcgcgccagccgtggcacaacgcggagggccggctgcggtacgggctgcggccggcgaaccccacggaggagggcctggccagcctgcacagcgtgctgttccgcaagcagccgttcctgtggcgcgctgcactgctctactacaccatccaccgcgccgcgcgcatgtccttccgtcagctcttccaggacctggagcgctacgtgcaggacgccgatgtgcgctgggagtactgcgtgcgcgccaagcgcggccagaccgacacctcgctgccaggttgtttcagcaaggaccaggtgtacctggacggcatcgtgcgcattctgcgacatcgccagaccatcgatttcccgttgctgacctcactgggcaaggtgtcctatgaggatgtggaccacctgcggccccatggggtgctggataatacccgggtgccccacttcatgcaggacttggcacgctaccggcagcagctggagcacatcatggccaccaaccggctggatgaggcggagctgggtcgcctgctacccgactgatgtccgttgagggctgcagtcagaggccctggacagaagctccagataggcccctagaacatgaagcagtttgctctgtgcgtccacggcctaggtgtttcttgggggtgttgggagggcaggagcattccttgaggaggagtggcaacatcaaagtgtttgtgtcccttgccagcctccctggggtctggggacctgcagcagcatgtctggcaaactgagtcgccctcctgcctccagctctctgttgagcagagggaaggcatgggggcaggaagagagctgagcattgatggggatgggggtggtttgggaatagaaacttgttcttgcatgagatggctttggttgtcccagtactccagtctctcccttcccttacctggccccttggtgctccttcagcatttgtgctgtctacctctcactgggtcctggtgggggtcgggctcccttctcctggggtgattgatggcctgagcctggggtcctggtagtagagacccagctggcctggggtctgctttccgacattttgcctctctcactggtcatgtatttattccatatttatatggtctacttcctgtggctgggagcagcagctcctgaaggttccgtgggggtgcggggggttggacaggacactccttcttggaaggcaccaattttcccagccccactcccattacacacacacacacacacacacacacacacacacacacacacacacacacacacacactgattcaggccttgagagtcaagcccaagagctcccttggccctgttccccactccctccactggcctctgctgttcctgtctttgctcacaccctcacagctgctctctggcagaggttggcatagcctaggagcagctgcaattgcacctgagggacaggccctagagtttggtggcccaagtcctgaacccctcttagaccaggtgaggtgcagaggtggttgctgcttccagtttcccttcagacttagctgtgtgaaccccactcctatcctttggccttagttttcccatctgtaaaactcagaaacgcagttggaaagtccttattcatttagtaagcgaatatattataatatgtatagagcgccttttgtgtaagtcactggtcagaatcctcactgagctcccagtccagagagaagccagacaattaaaacagtaatgacaataaag

SEQ ID NO: 458931 - DNA, 3386 bp, Homo sapiens
ttttttttttttttttgagatggagtttcgctgttgttgcccaggctggagtgccatggcacaatcttggctcaccgcaaactccgcctcccgggttcaagcgattctcctacctcagcctcccgagtagctggggttacaggcatgtgccaccacgcccagctaattttgtattttagtagagacggggtttctccatgttggtcaggctggtctcgaactcccgacctcaggtgatccgcccgcctcggcctcccaaagtgctgggattacaggcgtgagccaccctgcctggcctccaggaggtagtgattaactgtatcgggtgctgatcaatatgaaggtcattgctggtcattggtgaccttgatcagatcaatttggatggagtgctgggaacaaaaggctaattggagtgaatttaagagagaacaggaaaaaaggaactggagactgggtatagatgactcgaggtatgtgctgcaataggagcaagtggagggagatgcagcggggctgtagctggaggagtgtgggttctagtgagggttttgttttgttttttaagatggagaagtaacagcatgtgtttatcctgatggaaagagtccagtagagaggaagagattgatgatgtaggagagaggagaaatgctggaagtgagtcactgagcaggcaagggagctcagcagctggagcctctccagaggtcgacagtgtggggagttggagtgacccggctggatgtgacccccaggacagaatggtgctggactcaggggctcaggcgtatgatcaggcaccccccagcccgcctaccagtcccccatccctgcgccataggctgaagccctcagaccgagatgggccaccactgtacccctggtctcagtccctggccttgcccctggctctggcagtccccccagcgctgcagccccagcctgagcagcagccgttctcacagatgctcctgggccaccgtggccacatgcgtcgcagtgagagcacctactctgtaaatagtactggccggcgggggcgtggcaccctgggacggcctccacctggacggggacggaacccaggtgggggcaccctgcggcctgcagcctccctgcctcacattgctaagactcaaagggatgcaggccatattgccagcaagagcccctgcatgttggtggccctgcggccaaccaacatggaccgtgagcgagacaagttcttccagtcccattacacctacaatccacagtttgagtaccaggagcccatgcccacggctgtgctggaaaagtactgcgaggcctctggacagttcatccatcaggcagttggcatcattgaggctgttctggagaagtttggaacctatgaacactttgaggctgccactggggggcagctgctcaccaagtgccagatatggtcgattgtgcgcaaatacatgcagaaggagggctgcgctggggaggttgtggtgcagctgagtgaggacctgctgtcccaggcagtgatgatggtggagaacagccggcccacattggcgatcaacctgaccggagcccgccagtactggttggagggcatgctgcggcatgagataggcacccactacctgcggggcgtgaacaacgcgcgccagccgtggcacaacgcggagggccggctgcggtacgggctgcggccggcgaaccccacggaggagggcctggccagcctgcacagcgtgctgttccgcaagcagccgttcctgtggcgcgctgcactgctctactacaccatccaccgcgccgcgcgcatgtccttccgtcagctcttccaggacctggagcgctacgtgcaggacgccgatgtgcgctgggagtactgcgtgcgcgccaagcgcggccagaccgacacctcgctgccaggttgtttcagcaaggaccaggtgtacctggacggcatcgtgcgcattctgcgacatcgccagaccatcgatttcccgttgctgacctcactgggcaaggtgtcctatgaggatgtggaccacctgcggccccatggggtgctggataatacccgggtgccccacttcatgcaggacttggcacgctaccggcagcagctggagcacatcatggccaccaaccggctggatgaggcggagctgggtcgcctgctacccgactgatgtccgttgagggctgcagtcagaggccctggacagaagctccagataggcccctagaacatgaagcagtttgctctgtgcgtccacggcctaggtgtttcttgggggtgttgggagggcaggagcattccttgaggaggagtggcaacatcaaagtgtttgtgtcccttgccagcctccctggggtctggggacctgcagcagcatgtctggcaaactgagtcgccctcctgcctccagctctctgttgagcagagggaaggcatgggggcaggaagagagctgagcattgatggggatgggggtggtttgggaatagaaacttgttcttgcatgagatggctttggttgtcccagtactccagtctctcccttcccttacctggccccttggtgctccttcagcatttgtgctgtctacctctcactgggtcctggtgggggtcgggctcccttctcctggggtgattgatggcctgagcctggggtcctggtagtagagacccagctggcctggggtctgctttccgacattttgcctctctcactggtcatgtatttattccatatttatatggtctacttcctgtggctgggagcagcagctcctgaaggttccgtgggggtgcggggggttggacaggacactccttcttggaaggcaccaattttcccagccccactcccattacacacacacacacacacacacacacacacacacacacacacacacacacacacacactgattcaggccttgagagtcaagcccaagagctcccttggccctgttccccactccctccactggcctctgctgttcctgtctttgctcacaccctcacagctgctctctggcagaggttggcatagcctaggagcagctgcaattgcacctgagggacaggccctagagtttggtggcccaagtcctgaacccctcttagaccaggtgaggtgcagaggtggttgctgcttccagtttcccttcagacttagctgtgtgaaccccactcctatcctttggccttagttttcccatctgtaaaactcagaaacgcagttggaaagtccttattcatttagtaagcgaatatattataatatgtatagagcgccttttgtgtaagtcactggtcagaatcctcactgagctcccagtccagagagaagccagacaattaaaacagtaatgacaataaag

SEQ ID NO: 458932 - DNA, 2677 bp, Homo sapiens
cactatggctaggtctgaggcgagtttgtaattggtggaggataggctctcgtcagacacgctgactcggtccccgcatccgtgcgcccagttgctgaaactgtcagagcgaggtgggcgaccagggtacgccaggtcgcgattccgctggtgcttcgccctcttggctctgggggctccccccaatgcgtgcagggcctgggcgtgagtgagtaggccgttctggagcaggatgctcgcttggtccgatgccgtgagtcgtgcgtcagggtgcagatacctcctacgtctggttaaaatagtaacttgggccggtcggttttaagaagagactgctgtgatctgtctaccacttgtgaagcgtcgtatcggagatccaggtgggggcaccctgcggcctgcagcctccctgcctcacattgctaagactcaaagggatgcaggccatattgccagcaagagcccctgcatgttggtggccctgcggccaaccaacatggaccgtgagcgagacaagttcttccagtcccattacacctacaatccacagtttgagtaccaggagcccatgcccacggctgtgctggaaaagtactgcgaggcctctggacagttcatccatcaggcagttggcatcattgaggctgttctggagaagtttggaacctatgaacactttgaggctgccactggggggcagctgctcaccaagtgccagatatggtcgattgtgcgcaaatacatgcagaaggagggctgcgctggggaggttgtggtgcagctgagtgaggacctgctgtcccaggcagtgatgatggtggagaacagccggcccacattggcgatcaacctgaccggagcccgccagtactggttggagggcatgctgcggcatgagataggcacccactacctgcggggcgtgaacaacgcgcgccagccgtggcacaacgcggagggccggctgcggtacgggctgcggccggcgaaccccacggaggagggcctggccagcctgcacagcgtgctgttccgcaagcagccgttcctgtggcgcgctgcactgctctactacaccatccaccgcgccgcgcgcatgtccttccgtcagctcttccaggacctggagcgctacgtgcaggacgccgatgtgcgctgggagtactgcgtgcgcgccaagcgcggccagaccgacacctcgctgccaggttgtttcagcaaggaccaggtgtacctggacggcatcgtgcgcattctgcgacatcgccagaccatcgatttcccgttgctgacctcactgggcaaggtgtcctatgaggatgtggaccacctgcggccccatggggtgctggataatacccgggtgccccacttcatgcaggacttggcacgctaccggcagcagctggagcacatcatggccaccaaccggctggatgaggcggagctgggtcgcctgctacccgactgatgtccgttgagggctgcagtcagaggccctggacagaagctccagataggcccctagaacatgaagcagtttgctctgtgcgtccacggcctaggtgtttcttgggggtgttgggagggcaggagcattccttgaggaggagtggcaacatcaaagtgtttgtgtcccttgccagcctccctggggtctggggacctgcagcagcatgtctggcaaactgagtcgccctcctgcctccagctctctgttgagcagagggaaggcatgggggcaggaagagagctgagcattgatggggatgggggtggtttgggaatagaaacttgttcttgcatgagatggctttggttgtcccagtactccagtctctcccttcccttacctggccccttggtgctccttcagcatttgtgctgtctacctctcactgggtcctggtgggggtcgggctcccttctcctggggtgattgatggcctgagcctggggtcctggtagtagagacccagctggcctggggtctgctttccgacattttgcctctctcactggtcatgtatttattccatatttatatggtctacttcctgtggctgggagcagcagctcctgaaggttccgtgggggtgcggggggttggacaggacactccttcttggaaggcaccaattttcccagccccactcccattacacacacacacacacacacacacacacacacacacacacacacacacacacacacactgattcaggccttgagagtcaagcccaagagctcccttggccctgttccccactccctccactggcctctgctgttcctgtctttgctcacaccctcacagctgctctctggcagaggttggcatagcctaggagcagctgcaattgcacctgagggacaggccctagagtttggtggcccaagtcctgaacccctcttagaccaggtgaggtgcagaggtggttgctgcttccagtttcccttcagacttagctgtgtgaaccccactcctatcctttggccttagttttcccatctgtaaaactcagaaacgcagttggaaagtccttattcatttagtaagcgaatatattataatatgtatagagcgccttttgtgtaagtcactggtcagaatcctcactgagctcccagtccagagagaagccagacaattaaaacagtaatgacaataaag

SEQ ID NO: 458933 - DNA, 4668 bp, Homo sapiens
ccttcctcttgggtggtatgttctttttggtgggggcaaggaaaacaagtgatgattttttactccctcctcactgggatacttcccttcctttacgaatgaggaaacagaaaccgaaagaatgttttcctcaaggacgcaccgcgaatttgaggcaggtctcgctgggctgtgtcctttgcagctcgccaagcgcccgtctcccagccctggtccatgcctgggaccagaagtgcagagagccgctgttctcgctccctcccgtcaaacacttgccccacaaggtggcgccggagggtctggaccaccgagggccatgcgggccttggccttggtcctgaagccgtagttttgcttggtccagctcctcagtgtctgtcctgcagctggacggggcgccttcaggggccttggctccagtggaagctgcgctggacgagttgcagaggaggatctaccgcttggtgttggaggcgctgcaggcggagctccagcccctgttcgcggatctgccctcgcgccaatggctgtcgagccctgagctcctgcaaagtgtgtgtgaaccggactggggcgcttctgccgggacttctggcgcgtgcggaaccccacggttcagctgctgctggctgaggccgagcgtgccgtggtgctccagtacctgagcgcgctgatgcaaggccgcctggtgtgccgcggagccgacgagaggacccaggcggccgagcgcctgcggcacgatgctgcccagcttcagcagcttttcctcagtttggtgagagcttcttgggcgggcagacgggcgagagtctcagtggctgggtgggagagaggtgctggcgcgagaccctaccccgacgtgctcagggcctggaggagaacgcgcactgcgcgccggtgctgctcgccctgagggagctgctaaacctccgcgaccccgcgctgctgggcctggaggtggctggcctgcggcaacaatttcccgacgtgagcgaggaccacgtctccgccctcttgggcctgcgcggggacttgtcccgggagcagcacctggccgcgctcagctccctgcaggctgcgctgccgccgtcgccccgcgcgagccgccgcgtcctcttcagcctagtgcccgcgcccgcgctcgcgccggcctcctgcctgccctcggggtcctgcgcccgagccctgctgctcgcagaataaaccacggctgccggacgcctgagtctgtgtgtgttggggaaggtgggatggaataaaagtgcccacgagggttgagggaattcttgcagagtgacacgcttaaagtatcctggctcccgtcctggtacacgggctgcgccccgcctatgcaggcatctgccctctgtgcagactgcgttcccgaggccgcgggctacgcccccacgtctccgcgcccaggccgtgagcaagagtctccgccgccctggccgcctggagcccctgaagcccagcaactcgctgtggccttgggaagggggcgggcccaggaccacgaacaccgccccctcaaccctgcctggcttcgctcccagtggcctcgggggcgcgccgccgcggagactgacgcgaagccccacgctttcgtaagagcgtgcgcgcgcccgaggacgtacgtcatcggcgacggctcccgccggctgggcgtccggtggccggtgtagcagagcggggagcggcgggcggcgagcagaggagctaacaggtgggggcacggcacgcggacggacccccccaaaggccgggaggaggcgcgcgacgcgacctttcctgatctcccggagaagcctccactccattgtctcctggccccaccctccattgggcacgcccttcaccttatcccccaccacttattggctgcaggtcacgcccctcctctatttctggttccccattggctcttcaccttgtcctctccggggcttctctccgcacaggccacaccctctcatttgtcactagaccccgccttaatagtggggggctcctcccccatccatccttcattcattatgcacccagtgctgggtgcttggtacacgggggtgaatcagaccccattcctgccttcggggagttcaggggattgtgggaggacacggacctagactccaacagtgacagctctgagtaaagaagtcgccgaagcagtgggacactagacgcggggaaggcttcctggaggaagtgaggcctaaactgagccttgaagaatggttaagagtttgctccaggaatatattgcaaaggcattcttggcggaaggacccgagacgtgaaaaaaacaggcgtattctggtaatttcgaggagaggtcgacagtgtggggagttggagtgacccggctggatgtgacccccaggacagaatggtgctggactcaggggctcaggcgtatgatcaggcaccccccagcccgcctaccagtcccccatccctgcgccataggctgaagccctcagaccgagatgggccaccactgtacccctggtctcagtccctggccttgcccctggctctggcagtccccccagcgctgcagccccagcctgagcagcagccgttctcacagatgctcctgggccaccgtggccacatgcgtcgcagtgagagcacctactctgtaaatagtactggccggcgggggcgtggcaccctgggacggcctccacctggacggggacggaacccaggtgggggcaccctgcggcctgcagcctccctgcctcacattgctaagactcaaagggatgcaggccatattgccagcaagagcccctgcatgttggtggccctgcggccaaccaacatggaccgtgagcgagacaagttcttccagtcccattacacctacaatccacagtttgagtaccaggagcccatgcccacggctgtgctggaaaagtactgcgaggcctctggacagttcatccatcaggcagttggcatcattgaggctgttctggagaagtttggaacctatgaacactttgaggctgccactggggggcagctgctcaccaagtgccagatatggtcgattgtgcgcaaatacatgcagaaggagggctgcgctggggaggttgtggtgcagctgagtgaggacctgctgtcccaggcagtgatgatggtggagaacagccggcccacattggcgatcaacctgaccggagcccgccagtactggttggagggcatgctgcggcatgagataggcacccactacctgcggggcgtgaacaacgcgcgccagccgtggcacaacgcggagggccggctgcggtacgggctgcggccggcgaaccccacggaggagggcctggccagcctgcacagcgtgctgttccgcaagcagccgttcctgtggcgcgctgcactgctctactacaccatccaccgcgccgcgcgcatgtccttccgtcagctcttccaggacctggagcgctacgtgcaggacgccgatgtgcgctgggagtactgcgtgcgcgccaagcgcggccagaccgacacctcgctgccaggttgtttcagcaaggaccaggtgtacctggacggcatcgtgcgcattctgcgacatcgccagaccatcgatttcccgttgctgacctcactgggcaaggtgtcctatgaggatgtggaccacctgcggccccatggggtgctggataatacccgggtgccccacttcatgcaggacttggcacgctaccggcagcagctggagcacatcatggccaccaaccggctggatgaggcggagctgggtcgcctgctacccgactgatgtccgttgagggctgcagtcagaggccctggacagaagctccagataggcccctagaacatgaagcagtttgctctgtgcgtccacggcctaggtgtttcttgggggtgttgggagggcaggagcattccttgaggaggagtggcaacatcaaagtgtttgtgtcccttgccagcctccctggggtctggggacctgcagcagcatgtctggcaaactgagtcgccctcctgcctccagctctctgttgagcagagggaaggcatgggggcaggaagagagctgagcattgatggggatgggggtggtttgggaatagaaacttgttcttgcatgagatggctttggttgtcccagtactccagtctctcccttcccttacctggccccttggtgctccttcagcatttgtgctgtctacctctcactgggtcctggtgggggtcgggctcccttctcctggggtgattgatggcctgagcctggggtcctggtagtagagacccagctggcctggggtctgctttccgacattttgcctctctcactggtcatgtatttattccatatttatatggtctacttcctgtggctgggagcagcagctcctgaaggttccgtgggggtgctgcttccagtttcccttcagacttagctgtgtgaaccccactcctatcctttggccttagttttcccatctgtaaaactcagaaacgcagttggaaagtccttattcatttagtaagcgaatatattataatatgtatagagcgccttttgtgtaagtcactggtcagaatcctcactgagctcccagtccagagagaagccagacaattaaaacagtaatgacaataaag

SEQ ID NO: 458934 - DNA, 4579 bp, Homo sapiens
ccttcctcttgggtggtatgttctttttggtgggggcaaggaaaacaagtgatgattttttactccctcctcactgggatacttcccttcctttacgaatgaggaaacagaaaccgaaagaatgttttcctcaaggacgcaccgcgaatttgaggcaggtctcgctgggctgtgtcctttgcagctcgccaagcgcccgtctcccagccctggtccatgcctgggaccagaagtgcagagagccgctgttctcgctccctcccgtcaaacacttgccccacaaggtggcgccggagggtctggaccaccgagggccatgcgggccttggccttggtcctgaagccgtagttttgcttggtccagctcctcagtgtctgtcctgcagctggacggggcgccttcaggggccttggctccagtggaagctgcgctggacgagttgcagaggaggatctaccgcttggtgttggaggcgctgcaggcggagctccagcccctgttcgcggatctgccctcgcgccaatggctgtcgagccctgagctcctgcaaagtgtgtgtgaaccggactggggcgcttctgccgggacttctggcgcgtgcggaaccccacggttcagctgctgctggctgaggccgagcgtgccgtggtgctccagtacctgagcgcgctgatgcaaggccgcctggtgtgccgcggagccgacgagaggacccaggcggccgagcgcctgcggcacgatgctgcccagcttcagcagcttttcctcagtttggtgagagcttcttgggcgggcagacgggcgagagtctcagtggctgggtgggagagaggtgctggcgcgagaccctaccccgacgtgctcagggcctggaggagaacgcgcactgcgcgccggtgctgctcgccctgagggagctgctaaacctccgcgaccccgcgctgctgggcctggaggtggctggcctgcggcaacaatttcccgacgtgagcgaggaccacgtctccgccctcttgggcctgcgcggggacttgtcccgggagcagcacctggccgcgctcagctccctgcaggctgcgctgccgccgtcgccccgcgcgagccgccgcgtcctcttcagcctagtgcccgcgcccgcgctcgcgccggcctcctgcctgccctcggggtcctgcgcccgagccctgctgctcgcagaataaaccacggctgccggacgcctgagtctgtgtgtgttggggaaggtgggatggaataaaagtgcccacgagggttgagggaattcttgcagagtgacacgcttaaagtatcctggctcccgtcctggtacacgggctgcgccccgcctatgcaggcatctgccctctgtgcagactgcgttcccgaggccgcgggctacgcccccacgtctccgcgcccaggccgtgagcaagagtctccgccgccctggccgcctggagcccctgaagcccagcaactcgctgtggccttgggaagggggcgggcccaggaccacgaacaccgccccctcaaccctgcctggcttcgctcccagtggcctcgggggcgcgccgccgcggagactgacgcgaagccccacgctttcgtaagagcgtgcgcgcgcccgaggacgtacgtcatcggcgacggctcccgccggctgggcgtccggtggccggtgtagcagagcggggagcggcgggcggcgagcagaggagctaacaggtgggggcacggcacgcggacggacccccccaaaggccgggaggaggcgcgcgacgcgacctttcctgatctcccggagaagcctccactccattgtctcctggccccaccctccattgggcacgcccttcaccttatcccccaccacttattggctgcaggtcacgcccctcctctatttctggttccccattggctcttcaccttgtcctctccggggcttctctccgcacaggccacaccctctcatttgtcactagaccccgccttaatagtggggggctcctcccccatccatccttcattcattatgcacccagtgctgggtgcttggtacacgggggtgaatcagaccccattcctgccttcggggagttcaggggattgtgggaggacacggacctagactccaacagtgacagctctgagtaaagaagtcgccgaagcagtgggacactagacgcggggaaggcttcctggaggaagtgaggcctaaactgagccttgaagaatggttaagagtttgctccaggaatatattgcaaaggcattcttggcggaaggacccgagacgtgaaaaaaacaggcgtattctggtaatttcgaggagaggtcgacagtgtggggagttggagtgacccggctggatgtgacccccaggacagaatggtgctggactcaggggctcaggcgtatgatcaggcaccccccagcccgcctaccagtcccccatccctgcgccataggctgaagccctcagaccgagatgggccaccactgtacccctggtctcagtccctggccttgcccctggctctggcagtccccccagcgctgcagccccagcctgagcagcagccgttctcacagatgctcctgggccaccgtggccacatgcgtcgcagtgagagcacctactctgtaaatagtactggccggcgggggcgtggcaccctgggacggcctccacctggacggggacggaacccaggtgggggcaccctgcggcctgcagcctccctgcctcacattgctaagactcaaagggatgcaggccatattgccagcaagagcccctgcatgttggtggccctgcggccaaccaacatggaccgtgagcgagacaagttcttccagtcccattacacctacaatccacagtttgagtaccaggagcccatgcccacggctgtgctggaaaagtactgcgaggcctctggacagttcatccatcaggcagttggcatcattgaggctgttctggagaagtttggaacctatgaacactttgaggctgccactggggggcagctgctcaccaagtgccagatatggtcgattgtgcgcaaatacatgcagaaggagggctgcgctggggaggttgtggtgcagctgagtgaggacctgctgtcccaggcagtgatgatggtggagaacagccggcccacattggcgatcaacctgaccggagcccgccagtactggttggagggcatgctgcggcatgagataggcacccactacctgcggggcgtgaacaacgcgcgccagccgtggcacaacgcggagggccggctgcggtacgggctgcggccggcgaaccccacggaggagggcctggccagcctgcacagcgtgctgttccgcaagcagccgttcctgtggcgcgctgcactgctctactacaccatccaccgcgccgcgcgcatgtccttccgtcagctcttccaggacctggagcgctacgtgcaggacgccgatgtgcgctgggagtactgcgtgcgcgccaagcgcggccagaccgacacctcgctgccaggttgtttcagcaaggaccaggtgtacctggacggcatcgtgcgcattctgcgacatcgccagaccatcgatttcccgttgctgacctcactgggcaaggtgtcctatgaggatgtggaccacctgcggccccatggggtgctggataatacccgggtgccccacttcatgcaggacttggcacgctaccggcagcagctggagcacatcatggccaccaaccggctggatgaggcggagctgggtcgcctgctacccgactgatgtccgttgagggctgcagtcagaggccctggacagaagctccagataggcccctagaacatgaagcagtttgctctgtgcgtccacggcctaggtgtttcttgggggtgttgggagggcaggagcattccttgaggaggagtggcaacatcaaagtgtttgtgtcccttgccagcctccctggggtctggggacctgcagcagcatgtctggcaaactgagtcgccctcctgcctccagctctctgttgagcagagggaaggcatgggggcaggaagagagctgagcattgatggggatgggggtggtttgggaatagaaacttgttcttgcatgagatggctttggttgtcccagtactccagtctctcccttcccttacctggccccttggtgctccttcagcatttgtgctgtctacctctcactgggtcctggtgggggtcgggctcccttctcctggggtgattgatggcctgagcctggggtcctggtagtagagacccagctggcctggggtctgctttccgacattttgcctctctcactggtcatgtatttattccatatttatatggtctacttatcctttggccttagttttcccatctgtaaaactcagaaacgcagttggaaagtccttattcatttagtaagcgaatatattataatatgtatagagcgccttttgtgtaagtcactggtcagaatcctcactgagctcccagtccagagagaagccagacaattaaaacagtaatgacaataaag

SEQ ID NO: 458935 - DNA, 2489 bp, Homo sapiens
ccttcctcttgggtggtatgttctttttggtgggggcaaggaaaacaagtgatgattttttactccctcctcactgggatacttcccttcctttacgaatgaggaaacagaaaccgaaagaatgttttcctcaaggacgcaccgcgaatttgaggcaggtctcgctgggctgtgtcctttgcagctcgccaagcgcccgtctcccagccctggtccatgcctgggaccagaagtgcagagagccgctgttctcgctccctcccgtcaaacacttgccccacaaggtggcgccggagggtctggaccaccgagggccatgcgggccttggccttggtcctgaagccgtagttttgcttggtccagctcctcagtgtctgtcctgcagctggacggggcgccttcaggggccttggctccagtggaagctgcgctggacgagttgcagaggaggatctaccgcttggtgttggaggcgctgcaggcggagctccagcccctgttcgcggatctgccctcgcgccaatggctgtcgagccctgagctcctgcaaagtgtgtgtgaaccggactggggcgcttctgccgggacttctggcgcgtgcggaaccccacggttcagctgctgctggctgaggccgagcgtgccgtggtgctccagtacctgagcgcgctgatgcaaggccgcctggtgtgccgcggagccgacgagaggacccaggcggccgagcgcctgcggcacgatgctgcccagcttcagcagcttttcctcagtttggtgagagcttcttgggcgggcagacgggcgagagtctcagtggctgggtgggagagaggtgctggcgcgagaccctaccccgacgtgctcagggcctggaggagaacgcgcactgcgcgccggtgctgctcgccctgagggagctgctaaacctccgcgaccccgcgctgctgggcctggaggtggctggcctgcggcaacaatttcccgacgtgagcgaggaccacgtctccgccctcttgggcctgcgcggggacttgtcccgggagcagcacctggccgcgctcagctccctgcaggctgcgctgccgccgtcgccccgcgcgagccgccgcgtcctcttcagcctagtgcccgcgcccgcgctcgcgccggcctcctgcctgccctcggggtcctgcgcccgagccctgctgctcgcagaataaaccacggctgccggacgcctgagtctgtgtgtgttggggaaggtgggatggaataaaagtgcccacgagggttgagggaattcttgcagagtgacacgcttaaagtatcctggctcccgtcctggtacacgggctgcgccccgcctatgcaggcatctgccctctgtgcagactgcgttcccgaggccgcgggctacgcccccacgtctccgcgcccaggccgtgagcaagagtctccgccgccctggccgcctggagcccctgaagcccagcaactcgctgtggccttgggaagggggcgggcccaggaccacgaacaccgccccctcaaccctgcctggcttcgctcccagtggcctcgggggcgcgccgccgcggagactgacgcgaagccccacgctttcgtaagagcgtgcgcgcgcccgaggacgtacgtcatcggcgacggctcccgccggctgggcgtccggtggccggtgtagcagagcggggagcggcgggcggcgagcagaggagctaacaggtgggggcacggcacgcggacggacccccccaaaggccgggaggaggcgcgcgacgcgacctttcctgatctcccggagaagcctccactccattgtctcctggccccaccctccattgggcacgcccttcaccttatcccccaccacttattggctgcaggtcacgcccctcctctatttctggttccccattggctcttcaccttgtcctctccggggcttctctccgcacaggccacaccctctcatttgtcactagaccccgccttaatagtggggggctcctcccccatccatccttcattcattatgcacccagtgctgggtgcttggtacacgggggtgaatcagaccccattcctgccttcggggagttcaggggattgtgggaggacacggacctagactccaacagtgacagctctgagtaaagaagtcgccgaagcagtgggacactagacgcggggaaggcttcctggaggaagtgaggcctaaactgagccttgaagaatggttaagagtttgctccagtgcttccagtttcccttcagacttagctgtgtgaaccccactcctatcctttggccttagttttcccatctgtaaaactcagaaacgcagttggaaagtccttattcatttagtaagcgaatatattataatatgtatagagcgccttttgtgtaagtcactggtcagaatcctcactgagctcccagtccagagagaagccagacaattaaaacagtaatgacaataaag

SEQ ID NO: 458936 - DNA, 2312 bp, Homo sapiens
ccttcctcttgggtggtatgttctttttggtgggggcaaggaaaacaagtgatgattttttactccctcctcactgggatacttcccttcctttacgaatgaggaaacagaaaccgaaagaatgttttcctcaaggacgcaccgcgaatttgaggcaggtctcgctgggctgtgtcctttgcagctcgccaagcgcccgtctcccagccctggtccatgcctgggaccagaagtgcagagagccgctgttctcgctccctcccgtcaaacacttgccccacaaggtggcgccggagggtctggaccaccgagggccatgcgggccttggccttggtcctgaagccgtagttttgcttggtccagctcctcagtgtctgtcctgcagctggacggggcgccttcaggggccttggctccagtggaagctgcgctggacgagttgcagaggaggatctaccgcttggtgttggaggcgctgcaggcggagctccagcccctgttcgcggatctgccctcgcgccaatggctgtcgagccctgagctcctgcaaagtgtgtgtgaaccggactggggcgcttctgccgggacttctggcgcgtgcggaaccccacggttcagctgctgctggctgaggccgagcgtgccgtggtgctccagtacctgagcgcgctgatgcaaggccgcctggtgtgccgcggagccgacgagaggacccaggcggccgagcgcctgcggcacgatgctgcccagcttcagcagcttttcctcagtttggtgagagcttcttgggcgggcagacgggcgagagtctcagtggctgggtgggagagaggtgctggcgcgagaccctaccccgacgtgctcagggcctggaggagaacgcgcactgcgcgccggtgctgctcgccctgagggagctgctaaacctccgcgaccccgcgctgctgggcctggaggtggctggcctgcggcaacaatttcccgacgtgagcgaggaccacgtctccgccctcttgggcctgcgcggggacttgtcccgggagcagcacctggccgcgctcagctccctgcaggctgcgctgccgccgtcgccccgcgcgagccgccgcgtcctcttcagcctagtgcccgcgcccgcgctcgcgccggcctcctgcctgccctcggggtcctgcgcccgagccctgctgctcgcagaataaaccacggctgccggacgcctgagtctgtgtgtgttggggaaggtgggatggaataaaagtgcccacgagggttgagggaattcttgcagagtgacacgcttaaagtatcctggctcccgtcctggtacacgggctgcgccccgcctatgcaggcatctgccctctgtgcagactgcgttcccgaggccgcgggctacgcccccacgtctccgcgcccaggccgtgagcaagagtctccgccgccctggccgcctggagcccctgaagcccagcaactcgctgtggccttgggaagggggcgggcccaggaccacgaacaccgccccctcaaccctgcctggcttcgctcccagtggcctcgggggcgcgccgccgcggagactgacgcgaagccccacgctttcgtaagagcgtgcgcgcgcccgaggacgtacgtcatcggcgacggctcccgccggctgggcgtccggtggccggtgtagcagagcggggagcggcgggcggcgagcagaggagctaacaggtgggggcacggcacgcggacggacccccccaaaggccgggaggaggcgcgcgacgcgacctttcctgatctcccggagaagcctccactccattgtctcctggccccaccctccattgggcacgcccttcaccttatcccccaccacttattggctgcaggtcacgcccctcctctatttctggttccccattggctcttcaccttgtcctctccggggcttctctccgcacaggccacaccctctcatttgtcactagaccccgccttaatagtggggggctcctcccccatccatccttcattcattatgcacccagtgctgggtgcttggtacacgggggtgaatcagaccccattcctgccttcggggagttcaggggattgtgggaggacacggacctagactccaacagtgacagctctgtaaaactcagaaacgcagttggaaagtccttattcatttagtaagcgaatatattataatatgtatagagcgccttttgtgtaagtcactggtcagaatcctcactgagctcccagtccagagagaagccagacaattaaaacagtaatgacaataaag

SEQ ID NO: 458937 - DNA, 5014 bp, Homo sapiens
ccttcctcttgggtggtatgttctttttggtgggggcaaggaaaacaagtgatgattttttactccctcctcactgggatacttcccttcctttacgaatgaggaaacagaaaccgaaagaatgttttcctcaaggacgcaccgcgaatttgaggcaggtctcgctgggctgtgtcctttgcagctcgccaagcgcccgtctcccagccctggtccatgcctgggaccagaagtgcagagagccgctgttctcgctccctcccgtcaaacacttgccccacaaggtggcgccggagggtctggaccaccgagggccatgcgggccttggccttggtcctgaagccgtagttttgcttggtccagctcctcagtgtctgtcctgcagctggacggggcgccttcaggggccttggctccagtggaagctgcgctggacgagttgcagaggaggatctaccgcttggtgttggaggcgctgcaggcggagctccagcccctgttcgcggatctgccctcgcgccaatggctgtcgagccctgagctcctgcaaagtgtgtgtgaaccggactggggcgcttctgccgggacttctggcgcgtgcggaaccccacggttcagctgctgctggctgaggccgagcgtgccgtggtgctccagtacctgagcgcgctgatgcaaggccgcctggtgtgccgcggagccgacgagaggacccaggcggccgagcgcctgcggcacgatgctgcccagcttcagcagcttttcctcagtttggtgagagcttcttgggcgggcagacgggcgagagtctcagtggctgggtgggagagaggtgctggcgcgagaccctaccccgacgtgctcagggcctggaggagaacgcgcactgcgcgccggtgctgctcgccctgagggagctgctaaacctccgcgaccccgcgctgctgggcctggaggtggctggcctgcggcaacaatttcccgacgtgagcgaggaccacgtctccgccctcttgggcctgcgcggggacttgtcccgggagcagcacctggccgcgctcagctccctgcaggctgcgctgccgccgtcgccccgcgcgagccgccgcgtcctcttcagcctagtgcccgcgcccgcgctcgcgccggcctcctgcctgccctcggggtcctgcgcccgagccctgctgctcgcagaataaaccacggctgccggacgcctgagtctgtgtgtgttggggaaggtgggatggaataaaagtgcccacgagggttgagggaattcttgcagagtgacacgcttaaagtatcctggctcccgtcctggtacacgggctgcgccccgcctatgcaggcatctgccctctgtgcagactgcgttcccgaggccgcgggctacgcccccacgtctccgcgcccaggccgtgagcaagagtctccgccgccctggccgcctggagcccctgaagcccagcaactcgctgtggccttgggaagggggcgggcccaggaccacgaacaccgccccctcaaccctgcctggcttcgctcccagtggcctcgggggcgcgccgccgcggagactgacgcgaagccccacgctttcgtaagagcgtgcgcgcgcccgaggacgtacgtcatcggcgacggctcccgccggctgggcgtccggtggccggtgtagcagagcggggagcggcgggcggcgagcagaggagctaacaggtgggggcacggcacgcggacggacccccccaaaggccgggaggaggcgcgcgacgcgacctttcctgatctcccggagaagcctccactccattgtctcctggccccaccctccattgggcacgcccttcaccttatcccccaccacttattggctgcaggtcacgcccctcctctatttctggttccccattggctcttcaccttgtcctctccggggcttctctccgcacaggccacaccctctcatttgtcactagaccccgccttaatagtggggggctcctcccccatccatccttcattcattatgcacccagtgctgggtgcttggtacacgggggtgaatcagaccccattcctgccttcggggagttcaggggattgtgggaggacacggacctagactccaacagtgacagctctgagtaaagaagtcgccgaagcagtgggacactagacgcggggaaggcttcctggaggaagtgaggcctaaactgagccttgaagaatggttaagagtttgctccaggaatatattgcaaaggcattcttggcggaaggacccgagacgtgaaaaaaacaggcgtattctggtaatttcgaggagaggtcgacagtgtggggagttggagtgacccggctggatgtgacccccaggacagaatggtgctggactcaggggctcaggcgtatgatcaggcaccccccagcccgcctaccagtcccccatccctgcgccataggctgaagccctcagaccgagatgggccaccactgtacccctggtctcagtccctggccttgcccctggctctggcagtccccccagcgctgcagccccagcctgagcagcagccgttctcacagatgctcctgggccaccgtggccacatgcgtcgcagtgagagcacctactctgtaaatagtactggccggcgggggcgtggcaccctgggacggcctccacctggacggggacggaacccaggtgggggcaccctgcggcctgcagcctccctgcctcacattgctaagactcaaagggatgcaggccatattgccagcaagagcccctgcatgttggtggccctgcggccaaccaacatggaccgtgagcgagacaagttcttccagtcccattacacctacaatccacagtttgagtaccaggagcccatgcccacggctgtgctggaaaagtactgcgaggcctctggacagttcatccatcaggcagttggcatcattgaggctgttctggagaagtttggaacctatgaacactttgaggctgccactggggggcagctgctcaccaagtgccagatatggtcgattgtgcgcaaatacatgcagaaggagggctgcgctggggaggttgtggtgcagctgagtgaggacctgctgtcccaggcagtgatgatggtggagaacagccggcccacattggcgatcaacctgaccggagcccgccagtactggttggagggcatgctgcggcatgagataggcacccactacctgcggggcgtgaacaacgcgcgccagccgtggcacaacgcggagggccggctgcggtacgggctgcggccggcgaaccccacggaggagggcctggccagcctgcacagcgtgctgttccgcaagcagccgttcctgtggcgcgctgcactgctctactacaccatccaccgcgccgcgcgcatgtccttccgtcagctcttccaggacctggagcgctacgtgcaggacgccgatgtgcgctgggagtactgcgtgcgcgccaagcgcggccagaccgacacctcgctgccaggttgtttcagcaaggaccaggtgtacctggacggcatcgtgcgcattctgcgacatcgccagaccatcgatttcccgttgctgacctcactgggcaaggtgtcctatgaggatgtggaccacctgcggccccatggggtgctggataatacccgggtgccccacttcatgcaggacttggcacgctaccggcagcagctggagcacatcatggccaccaaccggctggatgaggcggagctgggtcgcctgctacccgactgatgtccgttgagggctgcagtcagaggccctggacagaagctccagataggcccctagaacatgaagcagtttgctctgtgcgtccacggcctaggtgtttcttgggggtgttgggagggcaggagcattccttgaggaggagtggcaacatcaaagtgtttgtgtcccttgccagcctccctggggtctggggacctgcagcagcatgtctggcaaactgagtcgccctcctgcctccagctctctgttgagcagagggaaggcatgggggcaggaagagagctgagcattgatggggatgggggtggtttgggaatagaaacttgttcttgcatgagatggctttggttgtcccagtactccagtctctcccttcccttacctggccccttggtgctccttcagcatttgtgctgtctacctctcactgggtcctggtgggggtcgggctcccttctcctggggtgattgatggcctgagcctggggtcctggtagtagagacccagctggcctggggtctgctttccgacattttgcctctctcactggtcatgtatttattccatatttatatggtctacttcctgtggctgggagcagcagctcctgaaggttccgtgggggtgcggggggttggacaggacactccttcttggaaggcaccaattttcccagccccactcccattacacacacacacacacacacacacacacacacacacacacacacacacacacacacactgattcaggccttgagagtcaagcccaagagctcccttggccctgttccccactccctccactggcctctgctgttcctgtctttgctcacaccctcacagctgctctctggcagaggttggcatagcctaggagcagctgcaattgcacctgagggacaggccctagagtttggtggcccaagtcctgaacccctcttagaccaggtgaggtgcagaggtggttgctgcttccagtttcccttcagacttagctgtgtgaaccccactcctatcctttggccttagttttcccatctgtaaaactcagaaacgcagttggaaagtccttattcatttagtaagcgaatatattataatatgtatagagcgccttttgtgtaagtcactggtcagaatcctcactgagctcccagtccagagagaagccagacaattaaaacagtaatgacaataaag

SEQ ID NO: 458938 - DNA, 4142 bp, Homo sapiens
ggcggcgcgggtgagaggcgacctgcacccgcctgattgcctccccgcagctgctgctggctgaggccgagcgtgccgtggtgctccagtacctgagcgcgctgatgcaaggccgcctggtgtgccgcggagccgacgagaggacccaggcggccgagcgcctgcggcacgatgctgcccagcttcagcagcttttcctcagtttggtgagagcttcttgggcgggcagacgggcgagagtctcagtggctgggtgggagagaggtggctcgcgccggcctcctgcctgccctcggggtcctgcgcccgagccctgctgctcgcagaataaaccacggctgccggacgcctgagtctgtgtgtgttggggaaggtgggatggaataaaagtgcccacgagggttgagggaattcttgcagagtgacacgcttaaagtatcctggctcccgtcctggtacacgggctgcgccccgcctatgcaggcatctgccctctgtgcagactgcgttcccgaggccgcgggctacgcccccacgtctccgcgcccaggccgtgagcaagagtctccgccgccctggccgcctggagcccctgaagcccagcaactcgctgtggccttgggaagggggcgggcccaggaccacgaacaccgccccctcaaccctgcctggcttcgctcccagtggcctcgggggcgcgccgccgcggagactgacgcgaagccccacgctttcgtaagagcgtgcgcgcgcccgaggacgtacgtcatcggcgacggctcccgccggctgggcgtccggtggccggtgtagcagagcggggagcggcgggcggcgagcagaggagctaacaggtgggggcacggcacgcggacggacccccccaaaggccgggaggaggcgcgcgacgcgacctttcctgatctcccggagaagcctccactccattgtctcctggccccaccctccattgggcacgcccttcaccttatcccccaccacttattggctgcaggtcacgcccctcctctatttctggttccccattggctcttcaccttgtcctctccggggcttctctccgcacaggccacaccctctcatttgtcactagaccccgccttaatagtggggggctcctcccccatccatccttcattcattatgcacccagtgctgggtgcttggtacacgggggtgaatcagaccccattcctgccttcggggagttcaggggattgtgggaggacacggacctagactccaacagtgacagctctgagtaaagaagtcgccgaagcagtgggacactagacgcggggaaggcttcctggaggaagtgaggcctaaactgagccttgaagaatggttaagagtttgctccaggaatatattgcaaaggcattcttggcggaaggacccgagacgtgaaaaaaacaggcgtattctggtaatttcgaggagaggtcgacagtgtggggagttggagtgacccggctggatgtgacccccaggacagaatggtgctggactcaggggctcaggcgtatgatcaggcaccccccagcccgcctaccagtcccccatccctgcgccataggctgaagccctcagaccgagatgggccaccactgtacccctggtctcagtccctggccttgcccctggctctggcagtccccccagcgctgcagccccagcctgagcagcagccgttctcacagatgctcctgggccaccgtggccacatgcgtcgcagtgagagcacctactctgtaaatagtactggccggcgggggcgtggcaccctgggacggcctccacctggacggggacggaacccaggtgggggcaccctgcggcctgcagcctccctgcctcacattgctaagactcaaagggatgcaggccatattgccagcaagagcccctgcatgttggtggccctgcggccaaccaacatggaccgtgagcgagacaagttcttccagtcccattacacctacaatccacagtttgagtaccaggagcccatgcccacggctgtgctggaaaagtactgcgaggcctctggacagttcatccatcaggcagttggcatcattgaggctgttctggagaagtttggaacctatgaacactttgaggctgccactggggggcagctgctcaccaagtgccagatatggtcgattgtgcgcaaatacatgcagaaggagggctgcgctggggaggttgtggtgcagctgagtgaggacctgctgtcccaggcagtgatgatggtggagaacagccggcccacattggcgatcaacctgaccggagcccgccagtactggttggagggcatgctgcggcatgagataggcacccactacctgcggggcgtgaacaacgcgcgccagccgtggcacaacgcggagggccggctgcggtacgggctgcggccggcgaaccccacggaggagggcctggccagcctgcacagcgtgctgttccgcaagcagccgttcctgtggcgcgctgcactgctctactacaccatccaccgcgccgcgcgcatgtccttccgtcagctcttccaggacctggagcgctacgtgcaggacgccgatgtgcgctgggagtactgcgtgcgcgccaagcgcggccagaccgacacctcgctgccaggttgtttcagcaaggaccaggtgtacctggacggcatcgtgcgcattctgcgacatcgccagaccatcgatttcccgttgctgacctcactgggcaaggtgtcctatgaggatgtggaccacctgcggccccatggggtgctggataatacccgggtgccccacttcatgcaggacttggcacgctaccggcagcagctggagcacatcatggccaccaaccggctggatgaggcggagctgggtcgcctgctacccgactgatgtccgttgagggctgcagtcagaggccctggacagaagctccagataggcccctagaacatgaagcagtttgctctgtgcgtccacggcctaggtgtttcttgggggtgttgggagggcaggagcattccttgaggaggagtggcaacatcaaagtgtttgtgtcccttgccagcctccctggggtctggggacctgcagcagcatgtctggcaaactgagtcgccctcctgcctccagctctctgttgagcagagggaaggcatgggggcaggaagagagctgagcattgatggggatgggggtggtttgggaatagaaacttgttcttgcatgagatggctttggttgtcccagtactccagtctctcccttcccttacctggccccttggtgctccttcagcatttgtgctgtctacctctcactgggtcctggtgggggtcgggctcccttctcctggggtgattgatggcctgagcctggggtcctggtagtagagacccagctggcctggggtctgctttccgacattttgcctctctcactggtcatgtatttattccatatttatatggtctacttcctgtggctgggagcagcagctcctgaaggttccgtgggggtgcggggggttggacaggacactccttcttggaaggcaccaattttcccagccccactcccattacacacacacacacacacacacacacacacacacacacacacacacacacacacacactgattcaggccttgagagtcaagcccaagagctcccttggccctgttccccactccctccactggcctctgctgttcctgtctttgctcacaccctcacagctgctctctggcagaggttggcatagcctaggagcagctgcaattgcacctgagggacaggccctagagtttggtggcccaagtcctgaacccctcttagaccaggtgaggtgcagaggtggttgctgcttccagtttcccttcagacttagctgtgtgaaccccactcctatcctttggccttagttttcccatctgtaaaactcagaaacgcagttggaaagtccttattcatttagtaagcgaatatattataatatgtatagagcgccttttgtgtaagtcactggtcagaatcctcactgagctcccagtccagagagaagccagacaattaaaacagtaatgacaataaag

SEQ ID NO: 458939 - DNA, 1825 bp, Homo sapiens
gggtccccgaacgccccgcccagcgccgcctcccctcgccttccccgcaggcacccactacctgcggggcgtgaacaacgcgcgccagccgtggcacaacgcggagggccggctgcggtacgggctgcggccggcgaaccccacggaggagggcctggccagcctgcacagcgtgctgttccgcaagcagccgttcctgtggcgcgctgcactgctctactacaccatccaccgcgccgcgcgcatgtccttccgtcagctcttccaggacctggagcgctacgtgcaggacgccgatgtgcgctgggagtactgcgtgcgcgccaagcgcggccagaccgacacctcgctgccaggttgtttcagcaaggaccaggtgtacctggacggcatcgtgcgcattctgcgacatcgccagaccatcgatttcccgttgctgacctcactgggcaaggtgtcctatgaggatgtggaccacctgcggccccatggggtgctggataatacccgggtgccccacttcatgcaggacttggcacgctaccggcagcagctggagcacatcatggccaccaaccggctggatgaggcggagctgggtcgcctgctacccgactgatgtccgttgagggctgcagtcagaggccctggacagaagctccagataggcccctagaacatgaagcagtttgctctgtgcgtccacggcctaggtgtttcttgggggtgttgggagggcaggagcattccttgaggaggagtggcaacatcaaagtgtttgtgtcccttgccagcctccctggggtctggggacctgcagcagcatgtctggcaaactgagtcgccctcctgcctccagctctctgttgagcagagggaaggcatgggggcaggaagagagctgagcattgatggggatgggggtggtttgggaatagaaacttgttcttgcatgagatggctttggttgtcccagtactccagtctctcccttcccttacctggccccttggtgctccttcagcatttgtgctgtctacctctcactgggtcctggtgggggtcgggctcccttctcctggggtgattgatggcctgagcctggggtcctggtagtagagacccagctggcctggggtctgctttccgacattttgcctctctcactggtcatgtatttattccatatttatatggtctacttcctgtggctgggagcagcagctcctgaaggttccgtgggggtgcggggggttggacaggacactccttcttggaaggcaccaattttcccagccccactcccattacacacacacacacacacacacacacacacacacacacacacacacacacacacacactgattcaggccttgagagtcaagcccaagagctcccttggccctgttccccactccctccactggcctctgctgttcctgtctttgctcacaccctcacagctgctctctggcagaggttggcatagcctaggagcagctgcaattgcacctgagggacaggccctagagtttggtggcccaagtcctgaacccctcttagaccaggtgaggtgcagaggtggttgctgcttccagtttcccttcagacttagctgtgtgaaccccactcctatcctttggccttagttttcccatctgtaaaactcagaaacgcagttggaaagtccttattcatttagtaagcgaatatattataatatgtatagagcgccttttgtgtaagtcactggtcagaatcctcactgagctcccagtccagagagaagccagacaattaaaacagtaatgacaataaag

SEQ ID NO: 458940 - DNA, 4624 bp, Homo sapiens
ccttcctcttgggtggtatgttctttttggtgggggcaaggaaaacaagtgatgattttttactccctcctcactgggatacttcccttcctttacgaatgaggaaacagaaaccgaaagaatgttttcctcaaggacgcaccgcgaatttgaggcaggtctcgctgggctgtgtcctttgcagctcgccaagcgcccgtctcccagccctggtccatgcctgggaccagaagtgcagagagccgctgttctcgctccctcccgtcaaacacttgccccacaaggtggcgccggagggtctggaccaccgagggccatgcgggccttggccttggtcctgaagccgtagttttgcttggtccagctcctcagtgtctgtcctgcagctggacggggcgccttcaggggccttggctccagtggaagctgcgctggacgagttgcagaggaggatctaccgcttggtgttggaggcgctgcaggcggagctccagcccctgttcgcggatctgccctcgcgccaatggctgtcgagccctgagctcctgcaaagtgtgtgtgaaccggactggggcgcttctgccgggacttctggcgcgtgcggaaccccacggttcagctgctgctggctgaggccgagcgtgccgtggtgctccagtacctgagcgcgctgatgcaaggccgcctggtgtgccgcggagccgacgagaggacccaggcggccgagcgcctgcggcacgatgctgcccagcttcagcagcttttcctcagtttggtgagagcttcttgggcgggcagacgggcgagagtctcagtggctgggtgggagagaggtgctggcgcgagaccctaccccgacgtgctcagggcctggaggagaacgcgcactgcgcgccggtgctgctcgccctgagggagctgctaaacctccgcgaccccgcgctgctgggcctggaggtggctggcctgcggcaacaatttcccgacgtgagcgaggaccacgtctccgccctcttgggcctgcgcggggacttgtcccgggagcagcacctggccgcgctcagctccctgcaggctgcgctgccgccgtcgccccgcgcgagccgccgcgtcctcttcagcctagtgcccgcgcccgcgctcgcgccggcctcctgcctgccctcggggtcctgcgcccgagccctgctgctcgcagaataaaccacggctgccggacgcctgagtctgtgtgtgttggggaaggtgggatggaataaaagtgcccacgagggttgagggaattcttgcagagtgacacgcttaaagtatcctggctcccgtcctggtacacgggctgcgccccgcctatgcaggcatctgccctctgtgcagactgcgttcccgaggccgcgggctacgcccccacgtctccgcgcccaggccgtgagcaagagtctccgccgccctggccgcctggagcccctgaagcccagcaactcgctgtggccttgggaagggggcgggcccaggaccacgaacaccgccccctcaaccctgcctggcttcgctcccagtggcctcgggggcgcgccgccgcggagactgacgcgaagccccacgctttcgtaagagcgtgcgcgcgcccgaggacgtacgtcatcggcgacggctcccgccggctgggcgtccggtggccggtgtagcagagcggggagcggcgggcggcgagcagaggagctaacaggtgggggcacggcacgcggacggacccccccaaaggccgggaggaggcgcgcgacgcgacctttcctgatctcccggagaagcctccactccattgtctcctggccccaccctccattgggcacgcccttcaccttatcccccaccacttattggctgcaggtcacgcccctcctctatttctggttccccattggctcttcaccttgtcctctccggggcttctctccgcacaggccacaccctctcatttgtcactagaccccgccttaatagtggggggctcctcccccatccatccttcattcattatgcacccagtgctgggtgcttggtacacgggggtgaatcagaccccattcctgccttcggggagttcaggggattgtgggaggacacggacctagactccaacagtgacagctctgagtaaagaagtcgccgaagcagtgggacactagacgcggggaaggcttcctggaggaagtgaggcctaaactgagccttgaagaatggttaagagtttgctccaggaatatattgcaaaggcattcttggcggaaggacccgagacgtgaaaaaaacaggcgtattctggtaatttcgaggagaggtcgacagtgtggggagttggagtgacccggctggatgtgacccccaggacagaatggtgctggactcaggggctcaggcgtatgatcaggcaccccccagcccgcctaccagtcccccatccctgcgccataggctgaagccctcagaccgagatgggccaccactgtacccctggtctcagtccctggccttgcccctggctctggcagtccccccagcgctgcagccccagcctgagcagcagccgttctcacagatgctcctgggccaccgtggccacatgcgtcgcagtgagagcacctactctgtaaatagtactggccggcgggggcgtggcaccctgggacggcctccacctggacggggacggaacccaggtgggggcaccctgcggcctgcagcctccctgcctcacattgctaagactcaaagggatgcaggccatattgccagcaagagcccctgcatgttggtggccctgcggccaaccaacatggaccgtgagcgagacaagttcttccagtcccattacacctacaatccacagtttgagtaccaggagcccatgcccacggctgtgctggaaaagtactgcgaggcctctggacagttcatccatcaggcagttggcatcattgaggctgttctggagaagtttggaacctatgaacactttgaggctgccactggggggcagctgctcaccaagtgccagatatggtcgattgtgcgcaaatacatgcagaaggagggctgcgctggggaggttgtggtgcagctgagtgaggacctgctgtcccaggcagtgatgatggtggagaacagccggcccacattggcgatcaacctgaccggagcccgccagtactggttggagggcatgctgcggcatgagataggcacccactacctgcggggcgtgaacaacgcgcgccagccgtggcacaacgcggagggccggctgcggtacgggctgcggccggcgaaccccacggaggagggcctggccagcctgcacagcgtgctgttccgcaagcagccgttcctgtggcgcgctgcactgctctactacaccatccaccgcgccgcgcgcatgtccttccgtcagctcttccaggacctggagcgctacgtgcaggacgccgatgtgcgctgggagtactgcgtgcgcgccaagcgcggccagaccgacacctcgctgccaggttgtttcagcaaggaccaggtgtacctggacggcatcgtgcgcattctgcgacatcgccagaccatcgatttcccgttgctgacctcactgggcaaggtgtcctatgaggatgtggaccacctgcggccccatggggtgctggataatacccgggtgccccacttcatgcaggacttggcacgctaccggcagcagctggagcacatcatggccaccaaccggctggatgaggcggagctgggtcgcctgctacccgactgatgtccgttgagggctgcagtcagaggccctggacagaagctccagataggcccctagaacatgaagcagtttgctctgtgcgtccacggcctaggtgtttcttgggggtgttgggagggcaggagcattccttgaggaggagtggcaacatcaaagtgtttgtgtcccttgccagcctccctggggtctggggacctgcagcagcatgtctggcaaactgagtcgccctcctgcctccagctctctgttgagcagagggaaggcatgggggcaggaagagagctgagcattgatggggatgggggtggtttgggaatagaaacttgttcttgcatgagatggctttggttgtcccagtactccagtctctcccttcccttacctggccccttggtgctccttcagcatttgtgctgtctacctctcactgggtcctggtgggggtcgggctcccttctcctggggtgattgatggcctgagcctggggtcctggtagtagagacccagctggcctggggtctgctttccgacattttgcctctctcactggtcatgtatttattccatatttatatggtctactttgcttccagtttcccttcagacttagctgtgtgaaccccactcctatcctttggccttagttttcccatctgtaaaactcagaaacgcagttggaaagtccttattcatttagtaagcgaatatattataatatgtatagagcgccttttgtgtaagtcactggtcagaatcctcactgagctcccagtccagagagaagccagacaattaaaacagtaatgacaataaag

SEQ ID NO: 458941 - DNA, 1524 bp, Homo sapiens
ctgagaaaaactaacttaggctaggtacgaggctcggtgtttaatcggccgaggggttgtttcagcaaggaccaggtgtacctggacggcatcgtgcgcattctgcgacatcgccagaccatcgatttcccgttgctgacctcactgggcaaggtgtcctatgaggatgtggaccacctgcggccccatggggtgctggataatacccgggtgccccacttcatgcaggacttggcacgctaccggcagcagctggagcacatcatggccaccaaccggctggatgaggcggagctgggtcgcctgctacccgactgatgtccgttgagggctgcagtcagaggccctggacagaagctccagataggcccctagaacatgaagcagtttgctctgtgcgtccacggcctaggtgtttcttgggggtgttgggagggcaggagcattccttgaggaggagtggcaacatcaaagtgtttgtgtcccttgccagcctccctggggtctggggacctgcagcagcatgtctggcaaactgagtcgccctcctgcctccagctctctgttgagcagagggaaggcatgggggcaggaagagagctgagcattgatggggatgggggtggtttgggaatagaaacttgttcttgcatgagatggctttggttgtcccagtactccagtctctcccttcccttacctggccccttggtgctccttcagcatttgtgctgtctacctctcactgggtcctggtgggggtcgggctcccttctcctggggtgattgatggcctgagcctggggtcctggtagtagagacccagctggcctggggtctgctttccgacattttgcctctctcactggtcatgtatttattccatatttatatggtctacttcctgtggctgggagcagcagctcctgaaggttccgtgggggtgcggggggttggacaggacactccttcttggaaggcaccaattttcccagccccactcccattacacacacacacacacacacacacacacacacacacacacacacacacacacacacactgattcaggccttgagagtcaagcccaagagctcccttggccctgttccccactccctccactggcctctgctgttcctgtctttgctcacaccctcacagctgctctctggcagaggttggcatagcctaggagcagctgcaattgcacctgagggacaggccctagagtttggtggcccaagtcctgaacccctcttagaccaggtgaggtgcagaggtggttgctgcttccagtttcccttcagacttagctgtgtgaaccccactcctatcctttggccttagttttcccatctgtaaaactcagaaacgcagttggaaagtccttattcatttagtaagcgaatatattataatatgtatagagcgccttttgtgtaagtcactggtcagaatcctcactgagctcccagtccagagagaagccagacaattaaaacagtaatgacaataaag

SEQ ID NO: 458942 - DNA, 801 bp, Homo sapiens
agcctggaacagtacttaaacaagggagcgtgctgtgtgttccagtaaaactggacttgcagaagtggaggtggaggggctggattggctgagggctatcgtttgccaactcctagcttacagtatcacgtacttattgattttttcatccgttatctctgttgatccctccctgatctgtcttctgtttctcaaagacacccatccaacctgatgctggaccgtctgagtgggaagatcctgcacattgactttggggactgctttgaggttgctatgacccgagagaagtttccagagaagattccatttagactaacaagaatgttgaccaatgctatggaggttacaggcctggatggcaactacagaatcacatgccacacagtgatggaggtgctgcgagagcacaaggacagtgtcatggccgtgctggaagcctttgtctatgaccccttgctgaactggaggctgatggacacaaataccaaaggcaacaagcgatcccgaacgaggacggattcctactctgctggccagtcagtcggggtgcaaaaagaaaatgtgaggtacagtggtcgcctgaagaagcacagaaagcattacagaattgaccataacctgcgtgaaatagtcagagagcaggagactctgccgtggagcctgcgggtgctttcgtgtggagtagggctgtggagattcagaaaaggggacttcactgtgaaccgtagctgcgaagagagcacttgggttggtggcatctaaccatcacttcacctgacaaagggtaatttttctttc

SEQ ID NO: 458943 - DNA, 8491 bp, Homo sapiens
  misc_feature (1567)..(1567): n is a, c, g, or t
ccttccctcgctcccggcttagaggacagcggggaaggcgggcggtggggcacggggcctgaagcggcggtaccggtgctggcggcggcagctgaggccttggccgaagccgcgcgaacctcagggcaagatgcttggaaccggacctgccgccgccaccaccgctgccaccacatctagcaatgtgagcgtcctgcagcagtttgccagtggcctaaagagccggaatgaggaaaccagggccaaagccgccaaggagctccagcactatgtcaccatggaactccgagagatgagtcaagaggagtctactcgcttctatgaccaactgaaccatcacatttttgaattggtttccagctcagatgccaatgagaggaaaggtggcatcttggccatagctagcctcataggagtggaaggtgggaatgccacccgaattggcagatttgccaactatcttcggaacctcctcccctccaatgacccagttgtcatggaaatggcatccaaggccattggccgtcttgccatggcaggggacacttttaccgctgagtacgtggaatttgaggtgaagcgagccctggaatggctgggtgctgaccgcaatgagggccggagacatgcagctgtcctggttctccgtgagctggccatcagcgtccctaccttcttcttccagcaagtgcaacccttctttgacaacatttttgtggccgtgtgggaccccaaacaggccatccgtgagggagctgtagccgcccttcgtgcctgtctgattctcacaacccagcgtgagccgaaggagatgcagaagcctcagtggtacaggcacacatttgaagaagcagagaagggatttgatgagaccttggccaaagagaagggcatgaatcgggatgatcggatccatggagccttgttgatccttaacgagctggtccgaatcagcagcatggagggagagcgtctgagagaagaaatggaagaaatcacacagcagcagctggtacacgacaagtactgcaaagatctcatgggcttcggaacaaaacctcgtcacattacccccttcaccagtttccaggctgtacagccccagcagtcaaatgccttggtggggctgctggggtacagctctcaccaaggcctcatgggatttgggacctcccccagtccagctaagtccaccctggtggagagccggtgttgcagagacttgatggaggagaaatttgatcaggtgtgccagtgggtgctgaaatgcaggaatagcaagaactcgctgatccaaatgacaatccttaatttgttgccccgcttggctgcattccgaccttctgccttcacagatacccagtatctccaagataccatgaaccatgtcctaagctgtgtcaagaaggagaaggaacgtacagcggccttccaagccctggggctactttctgtggctgtgaggtctgagtttaaggtctatttgcctcgcgtgctggacatcatccgagcggccctgcccccaaaggacttcgcccataagaggcagaaggcaatgcaggtggangccacagtcttcacttgcatcagcatgctggctcgagcaatggggccaggcatccagcaggatatcaaggagctgctggagcccatgctggcagtgggactaagccctgccctcactgcagtgctctacgacctgagccgtcagattccacagctaaagaaggacattcaagatgggctactgaaaatgctgtccctggtccttatgcacaaaccccttcgccacccaggcatgcccaagggcctggcccatcagctggcctctcctggcctcacgaccctccctgaggccagcgatgtgggcagcatcactcttgccctccgaacgcttggcagctttgaatttgaaggccactctctgacccaatttgttcgccactgtgcggatcatttcctgaacagtgagcacaaggagatccgcatggaggctgcccgcacctgctcccgcctgctcacaccctccatccacctcatcagtggccatgctcatgtggttagccagaccgcagtgcaagtggtggcagatgtgcttagcaaactgctcgtagttgggataacagatcctgaccctgacattcgctactgtgtcttggcgtccctggacgagcgctttgatgcacacctggcccaggcggagaacttgcaggccttgtttgtggctctgaatgaccaggtgtttgagatccgggagctggccatctgcactgtgggccgactcagtagcatgaaccctgcctttgtcatgcctttcctgcgcaagatgctcatccagattttgacagagttggagcacagtgggattggaagaatcaaagagcagagtgcccgcatgctggggcacctggtctccaatgccccccgactcatccgcccctacatggagcctattctgaaggcattaattttgaaactgaaagatccagaccctgatccaaacccaggtgtgatcaataatgtcctggcaacaataggagaattggcacaggttagtggcctggaaatgaggaaatgggttgatgaactttttattatcatcatggacatgctccaggattcctctttgttggccaaaaggcaggtggctctgtggaccctgggacagttggtggccagcactggctatgtagtagagccctacaggaagtaccctactttgcttgaggtgctactgaattttctgaagactgagcagaaccagggtacacgcagagaggccatccgtgtgttagggcttttaggggctttggatccttacaagcacaaagtgaacattggcatgatagaccagtcccgggatgcctctgctgtcagcctgtcagaatccaagtcaagtcaggattcctctgactatagcactagtgaaatgctggtcaacatgggaaacttgcctctggatgagttctacccagctgtgtccatggtggccctgatgcggatcttccgagaccagtcactctctcatcatcacaccatggttgtccaggccatcaccttcatcttcaagtccctgggactcaaatgtgtgcagttcctgccccaggtcatgcccacgttccttaatgtcattcgagtctgtgatggggccatccgggaatttttgttccagcagctgggaatgttggtgtcctttgtgaagagccacatcagaccttatatggatgaaatagtcaccctcatgagagaattctgggtcatgaacacctcaattcagagcacgatcattcttctcattgagcaaattgtggtagctcttgggggtgaatttaagctctacctgccccagctgatcccacacatgctgcgtgtcttcatgcatgacaacagcccaggccgcattgtctctatcaagttactggctgcaatccagctgtttggcgccaacctggatgactacctgcatttactgctgcctcctattgttaagttgtttgatgcccctgaagctccactgccatctcgaaaggcagcgctagagactgtggaccgcctgacggagtccctggatttcactgactatgcctcccggatcattcaccctattgttcgaacactggaccagagcccagaactgcgctccacagccatggacacgctgtcttcacttgtttttcagctggggaagaagtaccaaattttcattccaatggtgaataaagttctggtgcgacaccgaatcaatcatcagcgctatgatgtgctcatctgcagaattgtcaagggatacacacttgctgatgaagaggaggatcctttgatttaccagcatcggatgcttaggagtggccaaggggatgcattggctagtggaccagtggaaacaggacccatgaagaaactgcacgtcagcaccatcaacctccaaaaggcctggggcgctgccaggagggtctccaaagatgactggctggaatggctgagacggctgagcctggagctgctgaaggactcatcatcgccctccctgcgctcctgctgggccctggcacaggcctacaacccgatggccagggatctcttcaatgctgcatttgtgtcctgctggtctgaactgaatgaagatcaacaggatgagctcatcagaagcatcgagttggccctcacctcacaagacatcgctgaagtcacacagaccctcttaaacttggctgaattcatggaacacagtgacaagggccccctgccactgagagatgacaatggcattgttctgctgggtgagagagctgccaagtgccgagcatatgccaaagcactacactacaaagaactggagttccagaaaggccccacccctgccattctagaatctctcatcagcattaataataagctacagcagccggaggcagcggccggagtgttagaatatgccatgaaacactttggagagctggagatccaggctacctggtatgagaaactgcacgagtgggaggatgcccttgtggcctatgacaagaaaatggacaccaacaaggacgacccagagctgatgctgggccgcatgcgctgcctcgaggccttgggggaatggggtcaactccaccagcagtgctgtgaaaagtggaccctggttaatgatgagacccaagccaagatggcccggatggctgctgcagctgcatggggtttaggtcagtgggacagcatggaagaatacacctgtatgatccctcgggacacccatgatggggcattttatagagctgtgctggcactgcatcaggacctcttctccttggcacaacagtgcattgacaaggccagggacctgctggatgctgaattaactgcaatggcaggagagagttacagtcgggcatatggggccatggtttcttgccacatgctgtccgagctggaggaggttatccagtacaaacttgtccccgagcgacgagagatcatccgccagatctggtgggagagactgcagggctgccagcgtatcgtagaggactggcagaaaatccttatggtgcggtcccttgtggtcagccctcatgaagacatgagaacctggctcaagtatgcaagcctgtgcggcaagagtggcaggctggctcttgctcataaaactttagtgttgctcctgggagttgatccgtctcggcaacttgaccatcctctgccaacagttcaccctcaggtgacctatgcctacatgaaaaacatgtggaagagtgcccgcaagatcgatgccttccagcacatgcagcattttgtccagaccatgcagcaacaggcccagcatgccatcgctactgaggaccagcagcataagcaggaactgcacaagctcatggcccgatgcttcctgaaacttggagagtggcagctgaatctacagggcatcaatgagagcacaatccccaaagtgctgcagtactacagcgccgccacagagcacgaccgcagctggtacaaggcctggcatgcgtgggcagtgatgaacttcgaagctgtgctacactacaaacatcagaaccaagcccgcgatgagaagaagaaactgcgtcatgccagcggggccaacatcaccaacgccaccactgccgccaccacggccgccactgccaccaccactgccagcaccgagggcagcaacagtgagagcgaggccgagagcaccgagaacagccccaccccatcgccgctgcagaagaaggtcactgaggatctgtccaaaaccctcctgatgtacacggtgcctgccgtccagggcttcttccgttccatctccttgtcacgaggcaacaacctccaggatacactcagagttctcaccttatggtttgattatggtcactggccagatgtcaatgaggccttagtggagggggtgaaagccatccagattgatacctggctacaggttatacctcagctcattgcaagaattgatacgcccagacccttggtgggacgtctcattcaccagcttctcacagacattggtcggtaccacccccaggccctcatctacccactgacagtggcttctaagtctaccacgacagcccggcacaatgcagccaacaagattctgaagaacatgtgtgagcacagcaacaccctggtccagcaggccatgatggtgagcgaggagctgatccgagtggccatcctctggcatgagatgtggcatgaaggcctggaagaggcatctcgtttgtactttggggaaaggaacgtgaaaggcatgtttgaggtgctggagcccttgcatgctatgatggaacggggcccccagactctgaaggaaacatcctttaatcaggcctatggtcgagatttaatggaggcccaagagtggtgcaggaagtacatgaaatcagggaatgtcaaggacctcacccaagcctgggacctctattatcatgtgttccgacgaatctcaaagcagctgcctcagctcacatccttagagctgcaatatgtttccccaaaacttctgatgtgccgggaccttgaattggctgtgccaggaacatatgaccccaaccagccaatcattcgcattcagtccatagcaccgtctttgcaagtcatcacatccaagcagaggccccggaaattgacacttatgggcagcaacggacatgagtttgttttccttctaaaaggccatgaagatctgcgccaggatgagcgtgtgatgcagctcttcggcctggttaacacccttctggccaatgacccaacatctcttcggaaaaacctcagcatccagagatacgctgtcatccctttatcgaccaactcgggcctcattggctgggttccccactgtgacacactgcacgccctcatccgggactacagggagaagaagaagatccttctcaacatcgagcatcgcatcatgttgcggatggctccggactatgaccacttgactctgatgcagaaggtggaggtgtttgagcatgccgtcaataatacagctggggacgacctggccaagctgctgtggctgaaaagccccagctccgaggtgtggtttgaccgaagaaccaattatacccgttctttagcggtcatgtcaatggttgggtatattttaggcctgggagatagacacccatccaacctgatgctggaccgtctgagtgggaagatcctgcacattgactttggggactgctttgaggttgctatgacccgagagaagtttccagagaagattccatttagactaacaagaatgttgaccaatgctatggaggttacaggcctggatggcaactacagaatcacatgccacacagtgatggaggtgctgcgagagcacaaggacagtgtcatggccgtgctggaagcctttgtctatgaccccttgctgaactggaggctgatggacacaaataccaaaggcaacaagcgatcccgaacgaggacggattcctactctgctggccagtcagtcgaaattttggacggtgtggaacttggagagccagcccataagaaaacggggaccacagtgccagaatctattcattctttcattggagacggtttggtgaaaccagaggccctaaataagaaagctatccagattattaacagggttcgagataagctcactggtcgggacttctctcatgatgacactttggatgttccaacgcaagttgagctgctcatcaaacaagcgacatcccatgaaaacctctgccagtgctatattggctggtgccctttctggtaactggaggcccagatgtgcccatcacgttttttctgaggcttttgtactttagtaaatgcttccactaaactgaaaccatggtgagaaagtttgactttgttaaatattttgaaatgtaaatgaaaagaactactgtatattaaaagttggtttgaaccaactttctagctgctgttgaagaatatattgtcagaaacacaaggcttgatttggttcccaggacagtgaaacatagtaataccacgtaaatcaagccattcattttggggaacagaagatccataactttagaaatacgggttttgacttaactcacaagagaactcatcataaccagtgatgctgcgactcacacgcttcaattcaagacctgaccgctagtagggaggtttattcagatcgctggcagcctcggctgagcagatgcacagaggggatcactgtgcagtgggaccaccctcactggccttctgcagcagggttctgggatgttttcagtggtcaaaatactctgtttagagcaagggctcagaaaacagaaatactgtcatggaggtgctgaacacagggaaggtctggtacatattggaaattatgagcagaacaaatactcaactaaatgcacaaagtataaagtgtagccatgtctagacaccatgttgtatcagaataatttttgtgccaataaatgacatcagaattttaaacata

SEQ ID NO: 458944 - DNA, 1781 bp, Homo sapiens
agcctggaacagtacttaaacaagggagcgtgctgtgtgttccagtaaaactggacttgcagaagtggaggtggaggggctggattggctgagggctatcgtttgccaactcctagcttacagtatcacgtacttattgattttttcatccgttatctctgttgatccctccctgatctgtcttctgtttctcaaagacacccatccaacctgatgctggaccgtctgagtgggaagatcctgcacattgactttggggactgctttgaggttgctatgacccgagagaagtttccagagaagattccatttagactaacaagaatgttgaccaatgctatggaggttacaggcctggatggcaactacagaatcacatgccacacagtgatggaggtgctgcgagagcacaaggacagtgtcatggccgtgctggaagcctttgtctatgaccccttgctgaactggaggctgatggacacaaataccaaaggcaacaagcgatcccgaacgaggacggattcctactctgctggccagtcagtcgaaattttggacggtgtggaacttggagagccagcccataagaaaacggggaccacagtgccagaatctattcattctttcattggagacggtttggtgaaaccagaggccctaaataagaaagctatccagattattaacagggttcgagataagctcactggtcgggacttctctcatgatgacactttggatgttccaacgcaagttgagctgctcatcaaacaagcgacatcccatgaaaacctctgccagtgctatattggctggtgccctttctggtaactggaggcccagatgtgcccatcacgttttttctgaggcttttgtactttagtaaatgcttccactaaactgaaaccatggtgagaaagtttgactttgttaaatattttgaaatgtaaatgaaaagaactactgtatattaaaagttggtttgaaccaactttctagctgctgttgaagaatatattgtcagaaacacaaggcttgatttggttcccaggacagtgaaacatagtaataccacgtaaatcaagccattcattttggggaacagaagatccataactttagaaatacgggttttgacttaactcacaagagaactcatcataagtacttgctgatggaagaatgacctagttgctcctctcaacatgggtacagcaaactcagcacagccaagaagcctcaggtcgtggagaacatggattaggatcctagactgtaaagacacagaagatgctgacctcacccctgccacctatcccaagacctcactggtctgtggacagcagcagaaatgtttgcaagataggccaaaatgagtacaaaaggtctgtcttccatcagacccagtgatgctgcgactcacacgcttcaattcaagacctgaccgctagtagggaggtttattcagatcgctggcagcctcggctgagcagatgcacagaggggatcactgtgcagtgggaccaccctcactggccttctgcagcagggttctgggatgttttcagtggtcaaaatactctgtttagagcaagggctcagaaaacagaaatactgtcatggaggtgctgaacacagggaaggtctggtacatattggaaattatgagcagaacaaatactcaactaaatgcacaaagtataaagtgtagccatgtctagacaccatgttgtatcagaataatttttgtgccaataaatgacatcagaattttaaacata

SEQ ID NO: 458945 - DNA, 6965 bp, Homo sapiens
  misc_feature (1567)..(1567): n is a, c, g, or t
ccttccctcgctcccggcttagaggacagcggggaaggcgggcggtggggcacggggcctgaagcggcggtaccggtgctggcggcggcagctgaggccttggccgaagccgcgcgaacctcagggcaagatgcttggaaccggacctgccgccgccaccaccgctgccaccacatctagcaatgtgagcgtcctgcagcagtttgccagtggcctaaagagccggaatgaggaaaccagggccaaagccgccaaggagctccagcactatgtcaccatggaactccgagagatgagtcaagaggagtctactcgcttctatgaccaactgaaccatcacatttttgaattggtttccagctcagatgccaatgagaggaaaggtggcatcttggccatagctagcctcataggagtggaaggtgggaatgccacccgaattggcagatttgccaactatcttcggaacctcctcccctccaatgacccagttgtcatggaaatggcatccaaggccattggccgtcttgccatggcaggggacacttttaccgctgagtacgtggaatttgaggtgaagcgagccctggaatggctgggtgctgaccgcaatgagggccggagacatgcagctgtcctggttctccgtgagctggccatcagcgtccctaccttcttcttccagcaagtgcaacccttctttgacaacatttttgtggccgtgtgggaccccaaacaggccatccgtgagggagctgtagccgcccttcgtgcctgtctgattctcacaacccagcgtgagccgaaggagatgcagaagcctcagtggtacaggcacacatttgaagaagcagagaagggatttgatgagaccttggccaaagagaagggcatgaatcgggatgatcggatccatggagccttgttgatccttaacgagctggtccgaatcagcagcatggagggagagcgtctgagagaagaaatggaagaaatcacacagcagcagctggtacacgacaagtactgcaaagatctcatgggcttcggaacaaaacctcgtcacattacccccttcaccagtttccaggctgtacagccccagcagtcaaatgccttggtggggctgctggggtacagctctcaccaaggcctcatgggatttgggacctcccccagtccagctaagtccaccctggtggagagccggtgttgcagagacttgatggaggagaaatttgatcaggtgtgccagtgggtgctgaaatgcaggaatagcaagaactcgctgatccaaatgacaatccttaatttgttgccccgcttggctgcattccgaccttctgccttcacagatacccagtatctccaagataccatgaaccatgtcctaagctgtgtcaagaaggagaaggaacgtacagcggccttccaagccctggggctactttctgtggctgtgaggtctgagtttaaggtctatttgcctcgcgtgctggacatcatccgagcggccctgcccccaaaggacttcgcccataagaggcagaaggcaatgcaggtggangccacagtcttcacttgcatcagcatgctggctcgagcaatggggccaggcatccagcaggatatcaaggagctgctggagcccatgctggcagtgggactaagccctgccctcactgcagtgctctacgacctgagccgtcagattccacagctaaagaaggacattcaagatgggctactgaaaatgctgtccctggtccttatgcacaaaccccttcgccacccaggcatgcccaagggcctggcccatcagctggcctctcctggcctcacgaccctccctgaggccagcgatgtgggcagcatcactcttgccctccgaacgcttggcagctttgaatttgaaggccactctctgacccaatttgttcgccactgtgcggatcatttcctgaacagtgagcacaaggagatccgcatggaggctgcccgcacctgctcccgcctgctcacaccctccatccacctcatcagtggccatgctcatgtggttagccagaccgcagtgcaagtggtggcagatgtgcttagcaaactgctcgtagttgggataacagatcctgaccctgacattcgctactgtgtcttggcgtccctggacgagcgctttgatgcacacctggcccaggcggagaacttgcaggccttgtttgtggctctgaatgaccaggtgtttgagatccgggagctggccatctgcactgtgggccgactcagtagcatgaaccctgcctttgtcatgcctttcctgcgcaagatgctcatccagattttgacagagttggagcacagtgggattggaagaatcaaagagcagagtgcccgcatgctggggcacctggtctccaatgccccccgactcatccgcccctacatggagcctattctgaaggcattaattttgaaactgaaagatccagaccctgatccaaacccaggtgtgatcaataatgtcctggcaacaataggagaattggcacaggttagtggcctggaaatgaggaaatgggttgatgaactttttattatcatcatggacatgctccaggattcctctttgttggccaaaaggcaggtggctctgtggaccctgggacagttggtggccagcactggctatgtagtagagccctacaggaagtaccctactttgcttgaggtgctactgaattttctgaagactgagcagaaccagggtacacgcagagaggccatccgtgtgttagggcttttaggggctttggatccttacaagcacaaagtgaacattggcatgatagaccagtcccgggatgcctctgctgtcagcctgtcagaatccaagtcaagtcaggattcctctgactatagcactagtgaaatgctggtcaacatgggaaacttgcctctggatgagttctacccagctgtgtccatggtggccctgatgcggatcttccgagaccagtcactctctcatcatcacaccatggttgtccaggccatcaccttcatcttcaagtccctgggactcaaatgtgtgcagttcctgccccaggtcatgcccacgttccttaatgtcattcgagtctgtgatggggccatccgggaatttttgttccagcagctgggaatgttggtgtcctttgtgaagagccacatcagaccttatatggatgaaatagtcaccctcatgagagaattctgggtcatgaacacctcaattcagagcacgatcattcttctcattgagcaaattgtggtagctcttgggggtgaatttaagctctacctgccccagctgatcccacacatgctgcgtgtcttcatgcatgacaacagcccaggccgcattgtctctatcaagttactggctgcaatccagctgtttggcgccaacctggatgactacctgcatttactgctgcctcctattgttaagttgtttgatgcccctgaagctccactgccatctcgaaaggcagcgctagagactgtggaccgcctgacggagtccctggatttcactgactatgcctcccggatcattcaccctattgttcgaacactggaccagagcccagaactgcgctccacagccatggacacgctgtcttcacttgtttttcagctggggaagaagtaccaaattttcattccaatggtgaataaagttctggtgcgacaccgaatcaatcatcagcgctatgatgtgctcatctgcagaattgtcaagggatacacacttgctgatgaagaggaggatcctttgatttaccagcatcggatgcttaggagtggccaaggggatgcattggctagtggaccagtggaaacaggacccatgaagaaactgcacgtcagcaccatcaacctccaaaaggcctggggcgctgccaggagggtctccaaagatgactggctggaatggctgagacggctgagcctggagctgctgaaggactcatcatcgccctccctgcgctcctgctgggccctggcacaggcctacaacccgatggccagggatctcttcaatgctgcatttgtgtcctgctggtctgaactgaatgaagatcaacaggatgagctcatcagaagcatcgagttggccctcacctcacaagacatcgctgaagtcacacagaccctcttaaacttggctgaattcatggaacacagtgacaagggccccctgccactgagagatgacaatggcattgttctgctgggtgagagagctgccaagtgccgagcatatgccaaagcactacactacaaagaactggagttccagaaaggccccacccctgccattctagaatctctcatcagcattaataataagctacagcagccggaggcagcggccggagtgttagaatatgccatgaaacactttggagagctggagatccaggctacctggtatgagaaactgcacgagtgggaggatgcccttgtggcctatgacaagaaaatggacaccaacaaggacgacccagagctgatgctgggccgcatgcgctgcctcgaggccttgggggaatggggtcaactccaccagcagtgctgtgaaaagtggaccctggttaatgatgagacccaagccaagatggcccggatggctgctgcagctgcatggggtttaggtcagtgggacagcatggaagaatacacctgtatgatccctcgggacacccatgatggggcattttatagagctgtgctggcactgcatcaggacctcttctccttggcacaacagtgcattgacaaggccagggacctgctggatgctgaattaactgcaatggcaggagagagttacagtcgggcatatggggccatggtttcttgccacatgctgtccgagctggaggaggttatccagtacaaacttgtccccgagcgacgagagatcatccgccagatctggtgggagagactgcagggctgccagcgtatcgtagaggactggcagaaaatccttatggtgcggtcccttgtggtcagccctcatgaagacatgagaacctggctcaagtatgcaagcctgtgcggcaagagtggcaggctggctcttgctcataaaactttagtgttgctcctgggagttgatccgtctcggcaacttgaccatcctctgccaacagttcaccctcaggtgacctatgcctacatgaaaaacatgtggaagagtgcccgcaagatcgatgccttccagcacatgcagcattttgtccagaccatgcagcaacaggcccagcatgccatcgctactgaggaccagcagcataagcaggaactgcacaagctcatggcccgatgcttcctgaaacttggagagtggcagctgaatctacagggcatcaatgagagcacaatccccaaagtgctgcagtactacagcgccgccacagagcacgaccgcagctggtacaaggcctggcatgcgtgggcagtgatgaacttcgaagctgtgctacactacaaacatcagaaccaagcccgcgatgagaagaagaaactgcgtcatgccagcggggccaacatcaccaacgccaccactgccgccaccacggccgccactgccaccaccactgccagcaccgagggcagcaacagtgagagcgaggccgagagcaccgagaacagccccaccccatcgccgctgcagaagaaggtcactgaggatctgtccaaaaccctcctgatgtacacggtgcctgccgtccagggcttcttccgttccatctccttgtcacgaggcaacaacctccaggatacactcagagttctcaccttatggtttgattatggtcactggccagatgtcaatgaggccttagtggagggggtgaaagccatccagattgatacctggctacaggttatacctcagctcattgcaagaattgatacgcccagacccttggtgggacgtctcattcaccagcttctcacagacattggtcggtaccacccccaggccctcatctacccactgacagtggcttctaagtctaccacgacagcccggcacaatgcagccaacaagattctgaagaacatgtgtgagcacagcaacaccctggtccagcaggccatgatggtgagcgaggagctgatccgagtggccatcctctggcatgagatgtggcatgaaggcctggaagaggcatctcgtttgtactttggggaaaggaacgtgaaaggcatgtttgaggtgctggagcccttgcatgctatgatggaacggggcccccagactctgaaggaaacatcctttaatcaggcctatggtcgagatttaatggaggcccaagagtggtgcaggaagtacatgaaatcagggaatgtcaaggacctcacccaagcctgggacctctattatcatgtgttccgacgaatctcaaagcagctgcctcagctcacatccttagagctgcaatatgtttccccaaaacttctgatgtgccgggaccttgaattggctgtgccaggaacatatgaccccaaccagccaatcattcgcattcagtccatagcaccgtctttgcaagtcatcacatccaagcagaggccccggaaattgacacttatgggcagcaacggacatgagtttgttttccttctaaaaggccatgaagatctgcgccaggatgagcgtgtgatgcagctcttcggcctggttaacacccttctggccaatgacccaacatctcttcggaaaaacctcagcatccagagatacgctgtcatccctttatcgaccaactcgggcctcattggctggttggggtatatgttcctggcacagccaattcaaggtcccggcacatcagaagttttggggaaacatattgcagctctaagatgtgagctgaggcagctgctttgagattcgtcgacac

SEQ ID NO: 458946 - DNA, 5995 bp, Homo sapiens
  misc_feature (1567)..(1567): n is a, c, g, or t
ccttccctcgctcccggcttagaggacagcggggaaggcgggcggtggggcacggggcctgaagcggcggtaccggtgctggcggcggcagctgaggccttggccgaagccgcgcgaacctcagggcaagatgcttggaaccggacctgccgccgccaccaccgctgccaccacatctagcaatgtgagcgtcctgcagcagtttgccagtggcctaaagagccggaatgaggaaaccagggccaaagccgccaaggagctccagcactatgtcaccatggaactccgagagatgagtcaagaggagtctactcgcttctatgaccaactgaaccatcacatttttgaattggtttccagctcagatgccaatgagaggaaaggtggcatcttggccatagctagcctcataggagtggaaggtgggaatgccacccgaattggcagatttgccaactatcttcggaacctcctcccctccaatgacccagttgtcatggaaatggcatccaaggccattggccgtcttgccatggcaggggacacttttaccgctgagtacgtggaatttgaggtgaagcgagccctggaatggctgggtgctgaccgcaatgagggccggagacatgcagctgtcctggttctccgtgagctggccatcagcgtccctaccttcttcttccagcaagtgcaacccttctttgacaacatttttgtggccgtgtgggaccccaaacaggccatccgtgagggagctgtagccgcccttcgtgcctgtctgattctcacaacccagcgtgagccgaaggagatgcagaagcctcagtggtacaggcacacatttgaagaagcagagaagggatttgatgagaccttggccaaagagaagggcatgaatcgggatgatcggatccatggagccttgttgatccttaacgagctggtccgaatcagcagcatggagggagagcgtctgagagaagaaatggaagaaatcacacagcagcagctggtacacgacaagtactgcaaagatctcatgggcttcggaacaaaacctcgtcacattacccccttcaccagtttccaggctgtacagccccagcagtcaaatgccttggtggggctgctggggtacagctctcaccaaggcctcatgggatttgggacctcccccagtccagctaagtccaccctggtggagagccggtgttgcagagacttgatggaggagaaatttgatcaggtgtgccagtgggtgctgaaatgcaggaatagcaagaactcgctgatccaaatgacaatccttaatttgttgccccgcttggctgcattccgaccttctgccttcacagatacccagtatctccaagataccatgaaccatgtcctaagctgtgtcaagaaggagaaggaacgtacagcggccttccaagccctggggctactttctgtggctgtgaggtctgagtttaaggtctatttgcctcgcgtgctggacatcatccgagcggccctgcccccaaaggacttcgcccataagaggcagaaggcaatgcaggtggangccacagtcttcacttgcatcagcatgctggctcgagcaatggggccaggcatccagcaggatatcaaggagctgctggagcccatgctggcagtgggactaagccctgccctcactgcagtgctctacgacctgagccgtcagattccacagctaaagaaggacattcaagatgggctactgaaaatgctgtccctggtccttatgcacaaaccccttcgccacccaggcatgcccaagggcctggcccatcagctggcctctcctggcctcacgaccctccctgaggccagcgatgtgggcagcatcactcttgccctccgaacgcttggcagctttgaatttgaaggccactctctgacccaatttgttcgccactgtgcggatcatttcctgaacagtgagcacaaggagatccgcatggaggctgcccgcacctgctcccgcctgctcacaccctccatccacctcatcagtggccatgctcatgtggttagccagaccgcagtgcaagtggtggcagatgtgcttagcaaactgctcgtagttgggataacagatcctgaccctgacattcgctactgtgtcttggcgtccctggacgagcgctttgatgcacacctggcccaggcggagaacttgcaggccttgtttgtggctctgaatgaccaggtgtttgagatccgggagctggccatctgcactgtgggccgactcagtagcatgaaccctgcctttgtcatgcctttcctgcgcaagatgctcatccagattttgacagagttggagcacagtgggattggaagaatcaaagagcagagtgcccgcatgctggggcacctggtctccaatgccccccgactcatccgcccctacatggagcctattctgaaggcattaattttgaaactgaaagatccagaccctgatccaaacccaggtgtgatcaataatgtcctggcaacaataggagaattggcacaggttagtggcctggaaatgaggaaatgggttgatgaactttttattatcatcatggacatgctccaggattcctctttgttggccaaaaggcaggtggctctgtggaccctgggacagttggtggccagcactggctatgtagtagagccctacaggaagtaccctactttgcttgaggtgctactgaattttctgaagactgagcagaaccagggtacacgcagagaggccatccgtgtgttagggcttttaggggctttggatccttacaagcacaaagtgaacattggcatgatagaccagtcccgggatgcctctgctgtcagcctgtcagaatccaagtcaagtcaggattcctctgactatagcactagtgaaatgctggtcaacatgggaaacttgcctctggatgagttctacccagctgtgtccatggtggccctgatgcggatcttccgagaccagtcactctctcatcatcacaccatggttgtccaggccatcaccttcatcttcaagtccctgggactcaaatgtgtgcagttcctgccccaggtcatgcccacgttccttaatgtcattcgagtctgtgatggggccatccgggaatttttgttccagcagctgggaatgttggtgtcctttgtgaagagccacatcagaccttatatggatgaaatagtcaccctcatgagagaattctgggtcatgaacacctcaattcagagcacgatcattcttctcattgagcaaattgtggtagctcttgggggtgaatttaagctctacctgccccagctgatcccacacatgctgcgtgtcttcatgcatgacaacagcccaggccgcattgtctctatcaagttactggctgcaatccagctgtttggcgccaacctggatgactacctgcatttactgctgcctcctattgttaagttgtttgatgcccctgaagctccactgccatctcgaaaggcagcgctagagactgtggaccgcctgacggagtccctggatttcactgactatgcctcccggatcattcaccctattgttcgaacactggaccagagcccagaactgcgctccacagccatggacacgctgtcttcacttgtttttcagctggggaagaagtaccaaattttcattccaatggtgaataaagttctggtgcgacaccgaatcaatcatcagcgctatgatgtgctcatctgcagaattgtcaagggatacacacttgctgatgaagaggaggatcctttgatttaccagcatcggatgcttaggagtggccaaggggatgcattggctagtggaccagtggaaacaggacccatgaagaaactgcacgtcagcaccatcaacctccaaaaggcctggggcgctgccaggagggtctccaaagatgactggctggaatggctgagacggctgagcctggagctgctgaaggactcatcatcgccctccctgcgctcctgctgggccctggcacaggcctacaacccgatggccagggatctcttcaatgctgcatttgtgtcctgctggtctgaactgaatgaagatcaacaggatgagctcatcagaagcatcgagttggccctcacctcacaagacatcgctgaagtcacacagaccctcttaaacttggctgaattcatggaacacagtgacaagggccccctgccactgagagatgacaatggcattgttctgctgggtgagagagctgccaagtgccgagcatatgccaaagcactacactacaaagaactggagttccagaaaggccccacccctgccattctagaatctctcatcagcattaataataagctacagcagccggaggcagcggccggagtgttagaatatgccatgaaacactttggagagctggagatccaggctacctggtatgagaaactgcacgagtgggaggatgcccttgtggcctatgacaagaaaatggacaccaacaaggacgacccagagctgatgctgggccgcatgcgctgcctcgaggccttgggggaatggggtcaactccaccagcagtgctgtgaaaagtggaccctggttaatgatgagacccaagccaagatggcccggatggctgctgcagctgcatggggtttaggtcagtgggacagcatggaagaatacacctgtatgatccctcgggacacccatgatggggcattttatagagctgtgctggcactgcatcaggacctcttctccttggcacaacagtgcattgacaaggccagggacctgctggatgctgaattaactgcaatggcaggagagagttacagtcgggcatatggggccatggtttcttgccacatgctgtccgagctggaggaggttatccagtacaaacttgtccccgagcgacgagagatcatccgccagatctggtgggagagactgcagggctgccagcgtatcgtagaggactggcagaaaatccttatggtgcggtcccttgtggtcagccctcatgaagacatgagaacctggctcaagtatgcaagcctgtgcggcaagagtggcaggctggctcttgctcataaaactttagtgttgctcctgggagttgatccgtctcggcaacttgaccatcctctgccaacagttcaccctcaggtgacctatgcctacatgaaaaacatgtggaagagtgcccgcaagatcgatgccttccagcacatgcagcattttgtccagaccatgcagcaacaggcccagcatgccatcgctactgaggaccagcagcataagcaggaactgcacaagctcatggcccgatgcttcctgaaacttggagagtggcagctgaatctacagggcatcaatgagagcacaatccccaaagtgctgcagtactacagcgccgccacagagcacgaccgcagctggtacaaggcctggcatgcgtgggcagtgatgaacttcgaagctgtgctacactacaaacatcagaaccaagcccgcgatgagaagaagaaactgcgtcatgccagcggggccaacatcaccaacgccaccactgccgccaccacggccgccactgccaccaccactgccagcaccgagggcagcaacagtgagagcgaggccgagagcaccgagaacagccccaccccatcgccgctgcagaagaaggtcactgaggatctgtccaaaaccctcctgatgtacacggtgcctgccgtccagggcttcttccgttccatctccttgtcacgaggcaacaacctccaggatacactcagagttctcaccttatggtttgattatggtcactggccagatgtcaatgaggccttagtggagggggtgaaagccatccagattgatacctggctacaggttatacatcagctcattgcaagaattgatgtcctgtgaatggggatcctctag

SEQ ID NO: 458947 - DNA, 5314 bp, Homo sapiens
  misc_feature (1567)..(1567): n is a, c, g, or t
ccttccctcgctcccggcttagaggacagcggggaaggcgggcggtggggcacggggcctgaagcggcggtaccggtgctggcggcggcagctgaggccttggccgaagccgcgcgaacctcagggcaagatgcttggaaccggacctgccgccgccaccaccgctgccaccacatctagcaatgtgagcgtcctgcagcagtttgccagtggcctaaagagccggaatgaggaaaccagggccaaagccgccaaggagctccagcactatgtcaccatggaactccgagagatgagtcaagaggagtctactcgcttctatgaccaactgaaccatcacatttttgaattggtttccagctcagatgccaatgagaggaaaggtggcatcttggccatagctagcctcataggagtggaaggtgggaatgccacccgaattggcagatttgccaactatcttcggaacctcctcccctccaatgacccagttgtcatggaaatggcatccaaggccattggccgtcttgccatggcaggggacacttttaccgctgagtacgtggaatttgaggtgaagcgagccctggaatggctgggtgctgaccgcaatgagggccggagacatgcagctgtcctggttctccgtgagctggccatcagcgtccctaccttcttcttccagcaagtgcaacccttctttgacaacatttttgtggccgtgtgggaccccaaacaggccatccgtgagggagctgtagccgcccttcgtgcctgtctgattctcacaacccagcgtgagccgaaggagatgcagaagcctcagtggtacaggcacacatttgaagaagcagagaagggatttgatgagaccttggccaaagagaagggcatgaatcgggatgatcggatccatggagccttgttgatccttaacgagctggtccgaatcagcagcatggagggagagcgtctgagagaagaaatggaagaaatcacacagcagcagctggtacacgacaagtactgcaaagatctcatgggcttcggaacaaaacctcgtcacattacccccttcaccagtttccaggctgtacagccccagcagtcaaatgccttggtggggctgctggggtacagctctcaccaaggcctcatgggatttgggacctcccccagtccagctaagtccaccctggtggagagccggtgttgcagagacttgatggaggagaaatttgatcaggtgtgccagtgggtgctgaaatgcaggaatagcaagaactcgctgatccaaatgacaatccttaatttgttgccccgcttggctgcattccgaccttctgccttcacagatacccagtatctccaagataccatgaaccatgtcctaagctgtgtcaagaaggagaaggaacgtacagcggccttccaagccctggggctactttctgtggctgtgaggtctgagtttaaggtctatttgcctcgcgtgctggacatcatccgagcggccctgcccccaaaggacttcgcccataagaggcagaaggcaatgcaggtggangccacagtcttcacttgcatcagcatgctggctcgagcaatggggccaggcatccagcaggatatcaaggagctgctggagcccatgctggcagtgggactaagccctgccctcactgcagtgctctacgacctgagccgtcagattccacagctaaagaaggacattcaagatgggctactgaaaatgctgtccctggtccttatgcacaaaccccttcgccacccaggcatgcccaagggcctggcccatcagctggcctctcctggcctcacgaccctccctgaggccagcgatgtgggcagcatcactcttgccctccgaacgcttggcagctttgaatttgaaggccactctctgacccaatttgttcgccactgtgcggatcatttcctgaacagtgagcacaaggagatccgcatggaggctgcccgcacctgctcccgcctgctcacaccctccatccacctcatcagtggccatgctcatgtggttagccagaccgcagtgcaagtggtggcagatgtgcttagcaaactgctcgtagttgggataacagatcctgaccctgacattcgctactgtgtcttggcgtccctggacgagcgctttgatgcacacctggcccaggcggagaacttgcaggccttgtttgtggctctgaatgaccaggtgtttgagatccgggagctggccatctgcactgtgggccgactcagtagcatgaaccctgcctttgtcatgcctttcctgcgcaagatgctcatccagattttgacagagttggagcacagtgggattggaagaatcaaagagcagagtgcccgcatgctggggcacctggtctccaatgccccccgactcatccgcccctacatggagcctattctgaaggcattaattttgaaactgaaagatccagaccctgatccaaacccaggtgtgatcaataatgtcctggcaacaataggagaattggcacaggttagtggcctggaaatgaggaaatgggttgatgaactttttattatcatcatggacatgctccaggattcctctttgttggccaaaaggcaggtggctctgtggaccctgggacagttggtggccagcactggctatgtagtagagccctacaggaagtaccctactttgcttgaggtgctactgaattttctgaagactgagcagaaccagggtacacgcagagaggccatccgtgtgttagggcttttaggggctttggatccttacaagcacaaagtgaacattggcatgatagaccagtcccgggatgcctctgctgtcagcctgtcagaatccaagtcaagtcaggattcctctgactatagcactagtgaaatgctggtcaacatgggaaacttgcctctggatgagttctacccagctgtgtccatggtggccctgatgcggatcttccgagaccagtcactctctcatcatcacaccatggttgtccaggccatcaccttcatcttcaagtccctgggactcaaatgtgtgcagttcctgccccaggtcatgcccacgttccttaatgtcattcgagtctgtgatggggccatccgggaatttttgttccagcagctgggaatgttggtgtcctttgtgaagagccacatcagaccttatatggatgaaatagtcaccctcatgagagaattctgggtcatgaacacctcaattcagagcacgatcattcttctcattgagcaaattgtggtagctcttgggggtgaatttaagctctacctgccccagctgatcccacacatgctgcgtgtcttcatgcatgacaacagcccaggccgcattgtctctatcaagttactggctgcaatccagctgtttggcgccaacctggatgactacctgcatttactgctgcctcctattgttaagttgtttgatgcccctgaagctccactgccatctcgaaaggcagcgctagagactgtggaccgcctgacggagtccctggatttcactgactatgcctcccggatcattcaccctattgttcgaacactggaccagagcccagaactgcgctccacagccatggacacgctgtcttcacttgtttttcagctggggaagaagtaccaaattttcattccaatggtgaataaagttctggtgcgacaccgaatcaatcatcagcgctatgatgtgctcatctgcagaattgtcaagggatacacacttgctgatgaagaggaggatcctttgatttaccagcatcggatgcttaggagtggccaaggggatgcattggctagtggaccagtggaaacaggacccatgaagaaactgcacgtcagcaccatcaacctccaaaaggcctggggcgctgccaggagggtctccaaagatgactggctggaatggctgagacggctgagcctggagctgctgaaggactcatcatcgccctccctgcgctcctgctgggccctggcacaggcctacaacccgatggccagggatctcttcaatgctgcatttgtgtcctgctggtctgaactgaatgaagatcaacaggatgagctcatcagaagcatcgagttggccctcacctcacaagacatcgctgaagtcacacagaccctcttaaacttggctgaattcatggaacacagtgacaagggccccctgccactgagagatgacaatggcattgttctgctgggtgagagagctgccaagtgccgagcatatgccaaagcactacactacaaagaactggagttccagaaaggccccacccctgccattctagaatctctcatcagcattaataataagctacagcagccggaggcagcggccggagtgttagaatatgccatgaaacactttggagagctggagatccaggctacctggtatgagaaactgcacgagtgggaggatgcccttgtggcctatgacaagaaaatggacaccaacaaggacgacccagagctgatgctgggccgcatgcgctgcctcgaggccttgggggaatggggtcaactccaccagcagtgctgtgaaaagtggaccctggttaatgatgagacccaagccaagatggcccggatggctgctgcagctgcatggggtttaggtcagtgggacagcatggaagaatacacctgtatgatccctcgggacacccatgatggggcattttatagagctgtgctggcactgcatcaggacctcttctccttggcacaacagtgcattgacaaggccagggacctgctggatgctgaattaactgcaatggcaggagagagttacagtcgggcatatggggccatggtttcttgccacatgctgtccgagctggaggaggttatccagtacaaacttgtccccgagcgacgagagatcatccgccagatctggtgggagagactgcagggctgccagcgtatcgtagaggactggcagaaaatccttatggtgcggtcccttgtggtcagccctcatgaagacatgagaacctggctcaagtatgcaagcctgtgcggcaagagtggcaggctgggctcagaaaacagaaatactgtcatggaggtgctgaacacagggaaggtctggtacatattggaaattatgagcagaacaaatactcaactaaatgcacaaagtataaagtgtagccatgtctagacaccatgttgtatcagaataatttttgtgccaataaatgacatcagaattttaaacata

SEQ ID NO: 458948 - DNA, 353 bp, Homo sapiens
cattaataataagctacagcagccggaggcagcggccggagtgttagaatatgccatgaaacactttggagagctggtaagcacctcattctttttggaaaagcaggaggtagagacttggctagggagttattggccctgaccttcagaaagttactttccttttctgttttttctccaattcataacagtctgatgctgacttaccagtcttcaggatgaaagagataaactgtgtctgtagggactctatttctttcttttttttttttaattatactttaagttctagggtacatgtgcacaacgtgcaggtttgttacatatgtacacatgtgccatgttggtgtgct

SEQ ID NO: 458949 - DNA, 8730 bp, Homo sapiens
  misc_feature (1567)..(1567): n is a, c, g, or t
ccttccctcgctcccggcttagaggacagcggggaaggcgggcggtggggcacggggcctgaagcggcggtaccggtgctggcggcggcagctgaggccttggccgaagccgcgcgaacctcagggcaagatgcttggaaccggacctgccgccgccaccaccgctgccaccacatctagcaatgtgagcgtcctgcagcagtttgccagtggcctaaagagccggaatgaggaaaccagggccaaagccgccaaggagctccagcactatgtcaccatggaactccgagagatgagtcaagaggagtctactcgcttctatgaccaactgaaccatcacatttttgaattggtttccagctcagatgccaatgagaggaaaggtggcatcttggccatagctagcctcataggagtggaaggtgggaatgccacccgaattggcagatttgccaactatcttcggaacctcctcccctccaatgacccagttgtcatggaaatggcatccaaggccattggccgtcttgccatggcaggggacacttttaccgctgagtacgtggaatttgaggtgaagcgagccctggaatggctgggtgctgaccgcaatgagggccggagacatgcagctgtcctggttctccgtgagctggccatcagcgtccctaccttcttcttccagcaagtgcaacccttctttgacaacatttttgtggccgtgtgggaccccaaacaggccatccgtgagggagctgtagccgcccttcgtgcctgtctgattctcacaacccagcgtgagccgaaggagatgcagaagcctcagtggtacaggcacacatttgaagaagcagagaagggatttgatgagaccttggccaaagagaagggcatgaatcgggatgatcggatccatggagccttgttgatccttaacgagctggtccgaatcagcagcatggagggagagcgtctgagagaagaaatggaagaaatcacacagcagcagctggtacacgacaagtactgcaaagatctcatgggcttcggaacaaaacctcgtcacattacccccttcaccagtttccaggctgtacagccccagcagtcaaatgccttggtggggctgctggggtacagctctcaccaaggcctcatgggatttgggacctcccccagtccagctaagtccaccctggtggagagccggtgttgcagagacttgatggaggagaaatttgatcaggtgtgccagtgggtgctgaaatgcaggaatagcaagaactcgctgatccaaatgacaatccttaatttgttgccccgcttggctgcattccgaccttctgccttcacagatacccagtatctccaagataccatgaaccatgtcctaagctgtgtcaagaaggagaaggaacgtacagcggccttccaagccctggggctactttctgtggctgtgaggtctgagtttaaggtctatttgcctcgcgtgctggacatcatccgagcggccctgcccccaaaggacttcgcccataagaggcagaaggcaatgcaggtggangccacagtcttcacttgcatcagcatgctggctcgagcaatggggccaggcatccagcaggatatcaaggagctgctggagcccatgctggcagtgggactaagccctgccctcactgcagtgctctacgacctgagccgtcagattccacagctaaagaaggacattcaagatgggctactgaaaatgctgtccctggtccttatgcacaaaccccttcgccacccaggcatgcccaagggcctggcccatcagctggcctctcctggcctcacgaccctccctgaggccagcgatgtgggcagcatcactcttgccctccgaacgcttggcagctttgaatttgaaggccactctctgacccaatttgttcgccactgtgcggatcatttcctgaacagtgagcacaaggagatccgcatggaggctgcccgcacctgctcccgcctgctcacaccctccatccacctcatcagtggccatgctcatgtggttagccagaccgcagtgcaagtggtggcagatgtgcttagcaaactgctcgtagttgggataacagatcctgaccctgacattcgctactgtgtcttggcgtccctggacgagcgctttgatgcacacctggcccaggcggagaacttgcaggccttgtttgtggctctgaatgaccaggtgtttgagatccgggagctggccatctgcactgtgggccgactcagtagcatgaaccctgcctttgtcatgcctttcctgcgcaagatgctcatccagattttgacagagttggagcacagtgggattggaagaatcaaagagcagagtgcccgcatgctggggcacctggtctccaatgccccccgactcatccgcccctacatggagcctattctgaaggcattaattttgaaactgaaagatccagaccctgatccaaacccaggtgtgatcaataatgtcctggcaacaataggagaattggcacaggttagtggcctggaaatgaggaaatgggttgatgaactttttattatcatcatggacatgctccaggattcctctttgttggccaaaaggcaggtggctctgtggaccctgggacagttggtggccagcactggctatgtagtagagccctacaggaagtaccctactttgcttgaggtgctactgaattttctgaagactgagcagaaccagggtacacgcagagaggccatccgtgtgttagggcttttaggggctttggatccttacaagcacaaagtgaacattggcatgatagaccagtcccgggatgcctctgctgtcagcctgtcagaatccaagtcaagtcaggattcctctgactatagcactagtgaaatgctggtcaacatgggaaacttgcctctggatgagttctacccagctgtgtccatggtggccctgatgcggatcttccgagaccagtcactctctcatcatcacaccatggttgtccaggccatcaccttcatcttcaagtccctgggactcaaatgtgtgcagttcctgccccaggtcatgcccacgttccttaatgtcattcgagtctgtgatggggccatccgggaatttttgttccagcagctgggaatgttggtgtcctttgtgaagagccacatcagaccttatatggatgaaatagtcaccctcatgagagaattctgggtcatgaacacctcaattcagagcacgatcattcttctcattgagcaaattgtggtagctcttgggggtgaatttaagctctacctgccccagctgatcccacacatgctgcgtgtcttcatgcatgacaacagcccaggccgcattgtctctatcaagttactggctgcaatccagctgtttggcgccaacctggatgactacctgcatttactgctgcctcctattgttaagttgtttgatgcccctgaagctccactgccatctcgaaaggcagcgctagagactgtggaccgcctgacggagtccctggatttcactgactatgcctcccggatcattcaccctattgttcgaacactggaccagagcccagaactgcgctccacagccatggacacgctgtcttcacttgtttttcagctggggaagaagtaccaaattttcattccaatggtgaataaagttctggtgcgacaccgaatcaatcatcagcgctatgatgtgctcatctgcagaattgtcaagggatacacacttgctgatgaagaggaggatcctttgatttaccagcatcggatgcttaggagtggccaaggggatgcattggctagtggaccagtggaaacaggacccatgaagaaactgcacgtcagcaccatcaacctccaaaaggcctggggcgctgccaggagggtctccaaagatgactggctggaatggctgagacggctgagcctggagctgctgaaggactcatcatcgccctccctgcgctcctgctgggccctggcacaggcctacaacccgatggccagggatctcttcaatgctgcatttgtgtcctgctggtctgaactgaatgaagatcaacaggatgagctcatcagaagcatcgagttggccctcacctcacaagacatcgctgaagtcacacagaccctcttaaacttggctgaattcatggaacacagtgacaagggccccctgccactgagagatgacaatggcattgttctgctgggtgagagagctgccaagtgccgagcatatgccaaagcactacactacaaagaactggagttccagaaaggccccacccctgccattctagaatctctcatcagcattaataataagctacagcagccggaggcagcggccggagtgttagaatatgccatgaaacactttggagagctggagatccaggctacctggtatgagaaactgcacgagtgggaggatgcccttgtggcctatgacaagaaaatggacaccaacaaggacgacccagagctgatgctgggccgcatgcgctgcctcgaggccttgggggaatggggtcaactccaccagcagtgctgtgaaaagtggaccctggttaatgatgagacccaagccaagatggcccggatggctgctgcagctgcatggggtttaggtcagtgggacagcatggaagaatacacctgtatgatccctcgggacacccatgatggggcattttatagagctgtgctggcactgcatcaggacctcttctccttggcacaacagtgcattgacaaggccagggacctgctggatgctgaattaactgcaatggcaggagagagttacagtcgggcatatggggccatggtttcttgccacatgctgtccgagctggaggaggttatccagtacaaacttgtccccgagcgacgagagatcatccgccagatctggtgggagagactgcagggctgccagcgtatcgtagaggactggcagaaaatccttatggtgcggtcccttgtggtcagccctcatgaagacatgagaacctggctcaagtatgcaagcctgtgcggcaagagtggcaggctggctcttgctcataaaactttagtgttgctcctgggagttgatccgtctcggcaacttgaccatcctctgccaacagttcaccctcaggtgacctatgcctacatgaaaaacatgtggaagagtgcccgcaagatcgatgccttccagcacatgcagcattttgtccagaccatgcagcaacaggcccagcatgccatcgctactgaggaccagcagcataagcaggaactgcacaagctcatggcccgatgcttcctgaaacttggagagtggcagctgaatctacagggcatcaatgagagcacaatccccaaagtgctgcagtactacagcgccgccacagagcacgaccgcagctggtacaaggcctggcatgcgtgggcagtgatgaacttcgaagctgtgctacactacaaacatcagaaccaagcccgcgatgagaagaagaaactgcgtcatgccagcggggccaacatcaccaacgccaccactgccgccaccacggccgccactgccaccaccactgccagcaccgagggcagcaacagtgagagcgaggccgagagcaccgagaacagccccaccccatcgccgctgcagaagaaggtcactgaggatctgtccaaaaccctcctgatgtacacggtgcctgccgtccagggcttcttccgttccatctccttgtcacgaggcaacaacctccaggatacactcagagttctcaccttatggtttgattatggtcactggccagatgtcaatgaggccttagtggagggggtgaaagccatccagattgatacctggctacaggttatacctcagctcattgcaagaattgatacgcccagacccttggtgggacgtctcattcaccagcttctcacagacattggtcggtaccacccccaggccctcatctacccactgacagtggcttctaagtctaccacgacagcccggcacaatgcagccaacaagattctgaagaacatgtgtgagcacagcaacaccctggtccagcaggccatgatggtgagcgaggagctgatccgagtggccatcctctggcatgagatgtggcatgaaggcctggaagaggcatctcgtttgtactttggggaaaggaacgtgaaaggcatgtttgaggtgctggagcccttgcatgctatgatggaacggggcccccagactctgaaggaaacatcctttaatcaggcctatggtcgagatttaatggaggcccaagagtggtgcaggaagtacatgaaatcagggaatgtcaaggacctcacccaagcctgggacctctattatcatgtgttccgacgaatctcaaagcagctgcctcagctcacatccttagagctgcaatatgtttccccaaaacttctgatgtgccgggaccttgaattggctgtgccaggaacatatgaccccaaccagccaatcattcgcattcagtccatagcaccgtctttgcaagtcatcacatccaagcagaggccccggaaattgacacttatgggcagcaacggacatgagtttgttttccttctaaaaggccatgaagatctgcgccaggatgagcgtgtgatgcagctcttcggcctggttaacacccttctggccaatgacccaacatctcttcggaaaaacctcagcatccagagatacgctgtcatccctttatcgaccaactcgggcctcattggctgggttccccactgtgacacactgcacgccctcatccgggactacagggagaagaagaagatccttctcaacatcgagcatcgcatcatgttgcggatggctccggactatgaccacttgactctgatgcagaaggtggaggtgtttgagcatgccgtcaataatacagctggggacgacctggccaagctgctgtggctgaaaagccccagctccgaggtgtggtttgaccgaagaaccaattatacccgttctttagcggtcatgtcaatggttgggtatattttaggcctgggagatagacacccatccaacctgatgctggaccgtctgagtgggaagatcctgcacattgactttggggactgctttgaggttgctatgacccgagagaagtttccagagaagattccatttagactaacaagaatgttgaccaatgctatggaggttacaggcctggatggcaactacagaatcacatgccacacagtgatggaggtgctgcgagagcacaaggacagtgtcatggccgtgctggaagcctttgtctatgaccccttgctgaactggaggctgatggacacaaataccaaaggcaacaagcgatcccgaacgaggacggattcctactctgctggccagtcagtcgaaattttggacggtgtggaacttggagagccagcccataagaaaacggggaccacagtgccagaatctattcattctttcattggagacggtttggtgaaaccagaggccctaaataagaaagctatccagattattaacagggttcgagataagctcactggtcgggacttctctcatgatgacactttggatgttccaacgcaagttgagctgctcatcaaacaagcgacatcccatgaaaacctctgccagtgctatattggctggtgccctttctggtaactggaggcccagatgtgcccatcacgttttttctgaggcttttgtactttagtaaatgcttccactaaactgaaaccatggtgagaaagtttgactttgttaaatattttgaaatgtaaatgaaaagaactactgtatattaaaagttggtttgaaccaactttctagctgctgttgaagaatatattgtcagaaacacaaggcttgatttggttcccaggacagtgaaacatagtaataccacgtaaatcaagccattcattttggggaacagaagatccataactttagaaatacgggttttgacttaactcacaagagaactcatcataagtacttgctgatggaagaatgacctagttgctcctctcaacatgggtacagcaaactcagcacagccaagaagcctcaggtcgtggagaacatggattaggatcctagactgtaaagacacagaagatgctgacctcacccctgccacctatcccaagacctcactggtctgtggacagcagcagaaatgtttgcaagataggccaaaatgagtacaaaaggtctgtcttccatcagacccagtgatgctgcgactcacacgcttcaattcaagacctgaccgctagtagggaggtttattcagatcgctggcagcctcggctgagcagatgcacagaggggatcactgtgcagtgggaccaccctcactggccttctgcagcagggttctgggatgttttcagtggtcaaaatactctgtttagagcaagggctcagaaaacagaaatactgtcatggaggtgctgaacacagggaaggtctggtacatattggaaattatgagcagaacaaatactcaactaaatgcacaaagtataaagtgtagccatgtctagacaccatgttgtatcagaataatttttgtgccaataaatgacatcagaattttaaacata

SEQ ID NO: 458950 - DNA, 3635 bp, Homo sapiens
tccagacctaccccaaatccctcttcttgacaaagctttccaaatgcctgtccttgctactcccattgtgccttgcagagtacctaggtcttcaggtttgtgcgtgagctcccctaggaggccgggagatcccttgaggcaagagctctctcctgctcctcttgctgtgcccttctcgcagtgcactcatagtacgttatatagttagtgctccacaaagtgagtggatcatgttgaatttagtaaaacagccatttctgagtgtctccttgaagtgtttgctttatggacacacagaacaggcaggagcagctgttcctcagcatcgaccttgcgctcctctgagccctgctgttggtcacagctccagtgtctgtccttgcctttctccccaaccaggcctggcatgcgtgggcagtgatgaacttcgaagctgtgctacactacaaacatcagaaccaagcccgcgatgagaagaagaaactgcgtcatgccagcggggccaacatcaccaacgccaccactgccgccaccacggccgccactgccaccaccactgccagcaccgagggcagcaacagtgagagcgaggccgagagcaccgagaacagccccaccccatcgccgctgcagaagaaggtcactgaggatctgtccaaaaccctcctgatgtacacggtgcctgccgtccagggcttcttccgttccatctccttgtcacgaggcaacaacctccaggatacactcagagttctcaccttatggtttgattatggtcactggccagatgtcaatgaggccttagtggagggggtgaaagccatccagattgatacctggctacaggttatacctcagctcattgcaagaattgatacgcccagacccttggtgggacgtctcattcaccagcttctcacagacattggtcggtaccacccccaggccctcatctacccactgacagtggcttctaagtctaccacgacagcccggcacaatgcagccaacaagattctgaagaacatgtgtgagcacagcaacaccctggtccagcaggccatgatggtgagcgaggagctgatccgagtggccatcctctggcatgagatgtggcatgaaggcctggaagaggcatctcgtttgtactttggggaaaggaacgtgaaaggcatgtttgaggtgctggagcccttgcatgctatgatggaacggggcccccagactctgaaggaaacatcctttaatcaggcctatggtcgagatttaatggaggcccaagagtggtgcaggaagtacatgaaatcagggaatgtcaaggacctcacccaagcctgggacctctattatcatgtgttccgacgaatctcaaagcagctgcctcagctcacatccttagagctgcaatatgtttccccaaaacttctgatgtgccgggaccttgaattggctgtgccaggaacatatgaccccaaccagccaatcattcgcattcagtccatagcaccgtctttgcaagtcatcacatccaagcagaggccccggaaattgacacttatgggcagcaacggacatgagtttgttttccttctaaaaggccatgaagatctgcgccaggatgagcgtgtgatgcagctcttcggcctggttaacacccttctggccaatgacccaacatctcttcggaaaaacctcagcatccagagatacgctgtcatccctttatcgaccaactcgggcctcattggctgggttccccactgtgacacactgcacgccctcatccgggactacagggagaagaagaagatccttctcaacatcgagcatcgcatcatgttgcggatggctccggactatgaccacttgactctgatgcagaaggtggaggtgtttgagcatgccgtcaataatacagctggggacgacctggccaagctgctgtggctgaaaagccccagctccgaggtgtggtttgaccgaagaaccaattatacccgttctttagcggtcatgtcaatggttgggtatattttaggcctgggagatagacacccatccaacctgatgctggaccgtctgagtgggaagatcctgcacattgactttggggactgctttgaggttgctatgacccgagagaagtttccagagaagattccatttagactaacaagaatgttgaccaatgctatggaggttacaggcctggatggcaactacagaatcacatgccacacagtgatggaggtgctgcgagagcacaaggacagtgtcatggccgtgctggaagcctttgtctatgaccccttgctgaactggaggctgatggacacaaataccaaaggcaacaagcgatcccgaacgaggacggattcctactctgctggccagtcagtcgaaattttggacggtgtggaacttggagagccagcccataagaaaacggggaccacagtgccagaatctattcattctttcattggagacggtttggtgaaaccagaggccctaaataagaaagctatccagattattaacagggttcgagataagctcactggtcgggacttctctcatgatgacactttggatgttccaacgcaagttgagctgctcatcaaacaagcgacatcccatgaaaacctctgccagtgctatattggctggtgccctttctggtaactggaggcccagatgtgcccatcacgttttttctgaggcttttgtactttagtaaatgcttccactaaactgaaaccatggtgagaaagtttgactttgttaaatattttgaaatgtaaatgaaaagaactactgtatattaaaagttggtttgaaccaactttctagctgctgttgaagaatatattgtcagaaacacaaggcttgatttggttcccaggacagtgaaacatagtaataccacgtaaatcaagccattcattttggggaacagaagatccataactttagaaatacgggttttgacttaactcacaagagaactcatcataagtacttgctgatggaagaatgacctagttgctcctctcaacatgggtacagcaaactcagcacagccaagaagcctcaggtcgtggagaacatggattaggatcctagactgtaaagacacagaagatgctgacctcacccctgccacctatcccaagacctcactggtctgtggacagcagcagaaatgtttgcaagataggccaaaatgagtacaaaaggtctgtcttccatcagacccagtgatgctgcgactcacacgcttcaattcaagacctgaccgctagtagggaggtttattcagatcgctggcagcctcggctgagcagatgcacagaggggatcactgtgcagtgggaccaccctcactggccttctgcagcagggttctgggatgttttcagtggtcaaaatactctgtttagagcaagggctcagaaaacagaaatactgtcatggaggtgctgaacacagggaaggtctggtacatattggaaattatgagcagaacaaatactcaactaaatgcacaaagtataaagtgtagccatgtctagacaccatgttgtatcagaataatttttgtgccaataaatgacatcagaattttaaacata

SEQ ID NO: 458951 - DNA, 1562 bp, Homo sapiens
cattctcaccctgatacgtcaacatggcctgtgtctgcttcctaagtgagggtaacagaccccctcggcttgctttgggtggagagttagtaactcctgtggtgagtggctctgtcccatttctaggttacaggcctggatggcaactacagaatcacatgccacacagtgatggaggtgctgcgagagcacaaggacagtgtcatggccgtgctggaagcctttgtctatgaccccttgctgaactggaggctgatggacacaaataccaaaggcaacaagcgatcccgaacgaggacggattcctactctgctggccagtcagtcgaaattttggacggtgtggaacttggagagccagcccataagaaaacggggaccacagtgccagaatctattcattctttcattggagacggtttggtgaaaccagaggccctaaataagaaagctatccagattattaacagggttcgagataagctcactggtcgggacttctctcatgatgacactttggatgttccaacgcaagttgagctgctcatcaaacaagcgacatcccatgaaaacctctgccagtgctatattggctggtgccctttctggtaactggaggcccagatgtgcccatcacgttttttctgaggcttttgtactttagtaaatgcttccactaaactgaaaccatggtgagaaagtttgactttgttaaatattttgaaatgtaaatgaaaagaactactgtatattaaaagttggtttgaaccaactttctagctgctgttgaagaatatattgtcagaaacacaaggcttgatttggttcccaggacagtgaaacatagtaataccacgtaaatcaagccattcattttggggaacagaagatccataactttagaaatacgggttttgacttaactcacaagagaactcatcataagtacttgctgatggaagaatgacctagttgctcctctcaacatgggtacagcaaactcagcacagccaagaagcctcaggtcgtggagaacatggattaggatcctagactgtaaagacacagaagatgctgacctcacccctgccacctatcccaagacctcactggtctgtggacagcagcagaaatgtttgcaagataggccaaaatgagtacaaaaggtctgtcttccatcagacccagtgatgctgcgactcacacgcttcaattcaagacctgaccgctagtagggaggtttattcagatcgctggcagcctcggctgagcagatgcacagaggggatcactgtgcagtgggaccaccctcactggccttctgcagcagggttctgggatgttttcagtggtcaaaatactctgtttagagcaagggctcagaaaacagaaatactgtcatggaggtgctgaacacagggaaggtctggtacatattggaaattatgagcagaacaaatactcaactaaatgcacaaagtataaagtgtagccatgtctagacaccatgttgtatcagaataatttttgtgccaataaatgacatcagaattttaaacata

SEQ ID NO: 458952 - DNA, 5973 bp, Homo sapiens
  misc_feature (1567)..(1567): n is a, c, g, or t
ccttccctcgctcccggcttagaggacagcggggaaggcgggcggtggggcacggggcctgaagcggcggtaccggtgctggcggcggcagctgaggccttggccgaagccgcgcgaacctcagggcaagatgcttggaaccggacctgccgccgccaccaccgctgccaccacatctagcaatgtgagcgtcctgcagcagtttgccagtggcctaaagagccggaatgaggaaaccagggccaaagccgccaaggagctccagcactatgtcaccatggaactccgagagatgagtcaagaggagtctactcgcttctatgaccaactgaaccatcacatttttgaattggtttccagctcagatgccaatgagaggaaaggtggcatcttggccatagctagcctcataggagtggaaggtgggaatgccacccgaattggcagatttgccaactatcttcggaacctcctcccctccaatgacccagttgtcatggaaatggcatccaaggccattggccgtcttgccatggcaggggacacttttaccgctgagtacgtggaatttgaggtgaagcgagccctggaatggctgggtgctgaccgcaatgagggccggagacatgcagctgtcctggttctccgtgagctggccatcagcgtccctaccttcttcttccagcaagtgcaacccttctttgacaacatttttgtggccgtgtgggaccccaaacaggccatccgtgagggagctgtagccgcccttcgtgcctgtctgattctcacaacccagcgtgagccgaaggagatgcagaagcctcagtggtacaggcacacatttgaagaagcagagaagggatttgatgagaccttggccaaagagaagggcatgaatcgggatgatcggatccatggagccttgttgatccttaacgagctggtccgaatcagcagcatggagggagagcgtctgagagaagaaatggaagaaatcacacagcagcagctggtacacgacaagtactgcaaagatctcatgggcttcggaacaaaacctcgtcacattacccccttcaccagtttccaggctgtacagccccagcagtcaaatgccttggtggggctgctggggtacagctctcaccaaggcctcatgggatttgggacctcccccagtccagctaagtccaccctggtggagagccggtgttgcagagacttgatggaggagaaatttgatcaggtgtgccagtgggtgctgaaatgcaggaatagcaagaactcgctgatccaaatgacaatccttaatttgttgccccgcttggctgcattccgaccttctgccttcacagatacccagtatctccaagataccatgaaccatgtcctaagctgtgtcaagaaggagaaggaacgtacagcggccttccaagccctggggctactttctgtggctgtgaggtctgagtttaaggtctatttgcctcgcgtgctggacatcatccgagcggccctgcccccaaaggacttcgcccataagaggcagaaggcaatgcaggtggangccacagtcttcacttgcatcagcatgctggctcgagcaatggggccaggcatccagcaggatatcaaggagctgctggagcccatgctggcagtgggactaagccctgccctcactgcagtgctctacgacctgagccgtcagattccacagctaaagaaggacattcaagatgggctactgaaaatgctgtccctggtccttatgcacaaaccccttcgccacccaggcatgcccaagggcctggcccatcagctggcctctcctggcctcacgaccctccctgaggccagcgatgtgggcagcatcactcttgccctccgaacgcttggcagctttgaatttgaaggccactctctgacccaatttgttcgccactgtgcggatcatttcctgaacagtgagcacaaggagatccgcatggaggctgcccgcacctgctcccgcctgctcacaccctccatccacctcatcagtggccatgctcatgtggttagccagaccgcagtgcaagtggtggcagatgtgcttagcaaactgctcgtagttgggataacagatcctgaccctgacattcgctactgtgtcttggcgtccctggacgagcgctttgatgcacacctggcccaggcggagaacttgcaggccttgtttgtggctctgaatgaccaggtgtttgagatccgggagctggccatctgcactgtgggccgactcagtagcatgaaccctgcctttgtcatgcctttcctgcgcaagatgctcatccagattttgacagagttggagcacagtgggattggaagaatcaaagagcagagtgcccgcatgctggggcacctggtctccaatgccccccgactcatccgcccctacatggagcctattctgaaggcattaattttgaaactgaaagatccagaccctgatccaaacccaggtgtgatcaataatgtcctggcaacaataggagaattggcacaggttagtggcctggaaatgaggaaatgggttgatgaactttttattatcatcatggacatgctccaggattcctctttgttggccaaaaggcaggtggctctgtggaccctgggacagttggtggccagcactggctatgtagtagagccctacaggaagtaccctactttgcttgaggtgctactgaattttctgaagactgagcagaaccagggtacacgcagagaggccatccgtgtgttagggcttttaggggctttggatccttacaagcacaaagtgaacattggcatgatagaccagtcccgggatgcctctgctgtcagcctgtcagaatccaagtcaagtcaggattcctctgactatagcactagtgaaatgctggtcaacatgggaaacttgcctctggatgagttctacccagctgtgtccatggtggccctgatgcggatcttccgagaccagtcactctctcatcatcacaccatggttgtccaggccatcaccttcatcttcaagtccctgggactcaaatgtgtgcagttcctgccccaggtcatgcccacgttccttaatgtcattcgagtctgtgatggggccatccgggaatttttgttccagcagctgggaatgttggtgtcctttgtgaagagccacatcagaccttatatggatgaaatagtcaccctcatgagagaattctgggtcatgaacacctcaattcagagcacgatcattcttctcattgagcaaattgtggtagctcttgggggtgaatttaagctctacctgccccagctgatcccacacatgctgcgtgtcttcatgcatgacaacagcccaggccgcattgtctctatcaagttactggctgcaatccagctgtttggcgccaacctggatgactacctgcatttactgctgcctcctattgttaagttgtttgatgcccctgaagctccactgccatctcgaaaggcagcgctagagactgtggaccgcctgacggagtccctggatttcactgactatgcctcccggatcattcaccctattgttcgaacactggaccagagcccagaactgcgctccacagccatggacacgctgtcttcacttgtttttcagctggggaagaagtaccaaattttcattccaatggtgaataaagttctggtgcgacaccgaatcaatcatcagcgctatgatgtgctcatctgcagaattgtcaagggatacacacttgctgatgaagaggaggatcctttgatttaccagcatcggatgcttaggagtggccaaggggatgcattggctagtggaccagtggaaacaggacccatgaagaaactgcacgtcagcaccatcaacctccaaaaggcctggggcgctgccaggagggtctccaaagatgactggctggaatggctgagacggctgagcctggagctgctgaaggactcatcatcgccctccctgcgctcctgctgggccctggcacaggcctacaacccgatggccagggatctcttcaatgctgcatttgtgtcctgctggtctgaactgaatgaagatcaacaggatgagctcatcagaagcatcgagttggccctcacctcacaagacatcgctgaagtcacacagaccctcttaaacttggctgaattcatggaacacagtgacaagggccccctgccactgagagatgacaatggcattgttctgctgggtgagagagctgccaagtgccgagcatatgccaaagcactacactacaaagaactggagttccagaaaggccccacccctgccattctagaatctctcatcagcattaataataagctacagcagccggaggcagcggccggagtgttagaatatgccatgaaacactttggagagctggagatccaggctacctggtatgagaaactgcacgagtgggaggatgcccttgtggcctatgacaagaaaatggacaccaacaaggacgacccagagctgatgctgggccgcatgcgctgcctcgaggccttgggggaatggggtcaactccaccagcagtgctgtgaaaagtggaccctggttaatgatgagacccaagccaagatggcccggatggctgctgcagctgcatggggtttaggtcagtgggacagcatggaagaatacacctgtatgatccctcgggacacccatgatggggcattttatagagctgtgctggcactgcatcaggacctcttctccttggcacaacagtgcattgacaaggccagggacctgctggatgctgaattaactgcaatggcaggagagagttacagtcgggcatatggggccatggtttcttgccacatgctgtccgagctggaggaggttatccagtacaaacttgtccccgagcgacgagagatcatccgccagatctggtgggagagactgcagggctgccagcgtatcgtagaggactggcagaaaatccttatggtgcggtcccttgtggtcagccctcatgaagacatgagaacctggctcaagtatgcaagcctgtgcggcaagagtggcaggctggctcttgctcataaaactttagtgttgctcctgggagttgatccgtctcggcaacttgaccatcctctgccaacagttcaccctcaggtgacctatgcctacatgaaaaacatgtggaagagtgcccgcaagatcgatgccttccagcacatgcagcattttgtccagaccatgcagcaacaggcccagcatgccatcgctactgaggaccagcagcataagcaggaactgcacaagctcatggcccgatgcttcctgaaacttggagagtggcagctgaatctacagggcatcaatgagagcacaatccccaaagtgctgcagtactacagcgccgccacagagcacgaccgcagctggtacaaggcctggcatgcgtgggcagtgatgaacttcgaagctgtgctacactacaaacatcagaaccaagcccgcgatgagaagaagaaactgcgtcatgccagcggggccaacatcaccaacgccaccactgccgccaccacggccgccactgccaccaccactgccagcaccgagggcagcaacagtgagagcgaggccgagagcaccgagaacagccccaccccatcgccgctgcagaagaaggtcactgaggatctgtccaaaaccctcctgatgtacacggtgcctgccgtccagggcttcttccgttccatctccttgtcacgaggcaacaacctccaggatacactcagagttctcaccttatggtttgattatggtcactggccagatgtcaatgaggccttagtggagggggtgaaagccatccagattgatacctggctacaggtgaggatacttggttacaggtgaaggtggct

SEQ ID NO: 458953 - DNA, 445 bp, Homo sapiens
aaagccaaaaaccgtttactccttgatggtgagaggctattcattggttcctaatagaccttgaactcccaacagtgttagaacatactaggaagaaagatatgaatgctaatgtctgttaggaggttgtttgttactaaccatgctctgcctgaagtcacgtcatgccatgtgtagctctaacactctctgttgttttgtcctagctgactatagcactagtgaaatgctggtcaacatgggaaacttgcctctggatgagttctacccagctgtgtccatggtggccctgatgcggatcttccgagaccagtcactctctcatcatcacaccatggttgtccaggccatcaccttcatcttcaagtccctgggactcaaatgtgtgcagttcctgccccaggtcatgcccacgttccttaatgtcattcgagtctgtgatggg

SEQ ID NO: 458954 - DNA, 1518 bp, Homo sapiens
cgccgtccttctcgcgcctcgcttctggccctgcaggttgtgtttccgcctctaccccgcctccattccgttgctctctcagtctcagacccgggctctcggtccgccgcttcaggtcttggcgcagcctcagagagttggcgcggctctgtgttgaccaaacctagtggatgcagttagcgccggagcccggccccgcccgtcaccagggttattcccgccttctaggtttgccaggactgccggccctgcagctgccttctgccccaggtttttggctactgatgttacaaacaataaaatattggagcatagagttgaagaacagactcaaaccaggtttttatttaattagttaaaaatatggatcctgagacaaggggacaagagattatcaaagtgacacctcttcaacaaatgcttgcctcatgtactggagctatactgacatcagtaatagtgacacccctggatgttgttaaaattagactccaagcccaaaacaacccactccccaaaggaaaatgttttgtatatagtaatggactcatggatcatctatgtgtctgtgaagagggaggcaacaaactatggtataagaagccaggaaatttccagggaacattggatgcattttttaaaatcattcgaaatgagggcattaaatctctatggagtggccttcctcctaccctagtgatggcagttcctgccacagttatttattttacctgctatgatcaattaagtgctcttctgagatctaagttaggagaaaatgaaacctgcataccaattgttgctggaattgtagccagatttggtgcagtaactgtgataagtccactagaattgattagaaccaagatgcagtccaagaagttttcttacgtggaactgcatcgatttgtcagcaagaaagtatctgaagatggttggatttccctttggaggggctgggctcctactgttcttagagatgtacctttctcagcaatgtactggtataactatgaaattttaaagaagtggttatgtgagaaatctggtttatatgagccaacatttatgatcaactttacttcaggggcattgtctggttcttttgctgctgttgcaactttaccatttgatgtagtaaaaacacaaaagcagacacaactttggacatatgaaagtcataaaatttctatgcctttgcatatgtcaacctggattataatgaagaacattgttgctaaaaatggattttccggattattttcaggcctaattcctcgcttaattaaaattgctcctgcttgtgccattatgatcagtacatatgaatttggaaaggcttttttccagaaacaaaatgttcgaaggcagcaatactagtgatgctgtttcaacttgaaacaacaactatagccaaagaagatggagactcttaggcaagaatgtttttcaccattattctctcacaatgattttatgtctttctttcctataatttaaataaataatttcagctct

SEQ ID NO: 458955 - DNA, 441 bp, Homo sapiens
aaattaatcaattttactttctgatagtttgctgctgttgcaactttaccatttgatgtagtaaaaacacaaaagcagacacaactttggacatatgaaagtcataaaatttctatgcctttgcatatgtcaacctggattataatgaagaacattgttgctaaaaatggattttccggattattttcaggcctaattcctcgcttaattaaaattgctcctgcttgtgccattatgatcagtacatatgaatttggaaaggcttttttccagaaacaaaatgttcgaaggcagcaatactagtgatgctgtttcaacttgaaacaacaactatagccaaagaagatggagactcttaggcaagaatgtttttcaccattattctctcacaatgattttatgtctttctttcctataatttaaataaataatttcagctct

SEQ ID NO: 458956 - DNA, 4177 bp, Homo sapiens
  misc_feature (3393)..(3393): n is a, c, g, or t
cgccgtccttctcgcgcctcgcttctggccctgcaggttgtgtttccgcctctaccccgcctccattccgttgctctctcagtctcagacccgggctctcggtccgccgcttcaggtcttggcgcagcctcagagagttggcgcggctctgtgttgaccaaacctagtggatgcagttagcgccggagcccggccccgcccgtcaccagggttattcccgccttctaggtttgccaggactgccggccctgcagctgccttctgccccaggtttttggctactgatgttacaaacaataaaatattggagcatagagttgaagaacagactcaaaccaggtttttatttaattagttaaaaatatggatcctgagacaaggggacaagagattatcaaagtgacacctcttcaacaaatgcttgcctcatgtactggagctatactgacatcagtaatagtgacacccctggatgttgttaaaattagactccaagcccaaaacaacccactccccaaaggaaaatgttttgtatatagtaatggactcatggatcatctatgtgtctgtgaagagggaggcaacaaactatggtataagaagccaggaaatttccagggaacattggatgcattttttaaaatcattcgaaatgagggcattaaatctctatggagtggccttcctcctaccctagtgatggcagttcctgccacagttatttattttacctgctatgatcaattaagtgctcttctgagatctaagttaggagaaaatgaaacctgcataccaattgttgctggaattgtagccagatttggtgcagtaactgtgataagtccactagaattgattagaaccaagatgcagtccaagaagttttcttacgtggaactgcatcgatttgtcagcaagaaagtatctgaagatggttggatttccctttggaggggctgggctcctactgttcttagagatgtacctttctcagcaatgtactggtataactatgaaattttaaagaagtggttatgtgagaaatctggtttatatgagccaacatttatgatcaactttacttcaggggcattgtctggttctgaataatagaacacaaaggagcgtgagaaattgtgaatgctggtagtggagtcagagaggcttggttggaattgtggctctgcaactagtagctgtgtgacctcaggaaatttgctgctgttgcaactttaccatttgatgtagtaaaaacacaaaagcagacacaactttggacatatgaaagtcataaaatttctatgcctttgcatatgtcaacctggattataatgaagaacattgttgctaaaaatggattttccggattattttcaggcctaattcctcgcttaattaaaattgctcctgcttgtgccattatgatcagtacatatgaatttggaaaggcttttttccagaaacaaaatgttcgaaggcagcaatactagtgatgctgtttcaacttgaaacaacaactatagccaaagaagatggagactcttaggcaagaatgtttttcaccattattctctcacaatgattttatgtctttctttcctataatttaaataaataatttcagctctacctctaaatcataattttaaaataaattttatcttatttttggtgatattgaaaaagatattctagaaatcaccaccattgagcattcttgtaaaaatagattactccttagcatcaaaagcagtctcttgaaagtttaatattatatgtttcagtgtaacataatcttactgggagtgtgttgaatacaccagaactttttgaattgtgtgctgaatgatgtacatagtctagaagaaaaaagcccaagtcttgtgcacatttaaatcgtgtacataagtatttccgtatttcagtaaagtagataaagcactcgttaaatagcattgtttacatcgaccaaatattgcctgtttcctttaattcaaatgcattaggttcccgcctccctctccttccccgccatgttgctgttttaaggcttcatatgtattaacatttctctgatcaaaattgtggctgttttccttatgaaccataatataatcatttgtgtgatgtacattgtgccatttttgatgactaaatgtctatatttctgccattcctgtaagagagggagttttttactgatagtagcaaatgttcacttcagtcaaacttgggtgttcagtggtaaaccatatagtatttagactggtaaaaatagtttgcacacaggaatagcctctgatttttagctctcttgtaatccaagtatcattgttcatggaattctctaggtcatttttattgtgttgttctaacaagacagattattgctacaacaatagttacaagatatttctaaaatatcctttgatttttactctaagtatggtagagtaagaggctaaacaagaagctgtttccttgaagacattgctttcagtcaccatacatgtctaaataatttagcttatcattcattctatgtaggaatgagataagaaaggatatgatggcaggaaaagaaatgctattcattttttatactttagttttattttcttaggatctatatcctatatatatatattttttaaagcactaatttattgcagtctttattttagaaaaatgtgaagcatttttttctcccctaaaatgaatatatttagatgacaagtctttagtgctggtagaggaactaattgattttgtactatagtaggaaagtgtttatatgtttcaccagaaataaaatatgtagggtttgtatgtaatcttctgtgtttatcctatgttgatttaccttaaatttgcaacatacatatccacataaatattcatgactttcttatatttcattaaaatgttttatggcttcttaaaatcatcactgtgcttctaaatatttttacgtaaaatcattgtataatgctatactgtgatatacatgaaagtttatcttgaacagtgctctttaacaatattaaatttaaatttatcttggttttgctatgcttatgggtaattcatagaaaacagaaaaaatactgttcccaaaaggcagttatatatttcagtttaatatcacctataagtatgagaaaggtttccatgtctcctacccctcactgcacttaggaaaattcttatttatgaataaagtaagataagtaaatctaattgcctagtcgtttttttaacacatatacatgcaatgtatctggatgaatagaaggctgaattgaagctttctttatatttaagaggtaaaaagaaatattaatacttttaaaatatactaacaaccaaaaagtgttcagaattttgctatantaataatttgtattaaaatagtacctagaaaaattcagtctatggaataggtaaaattttaaaattttaatttgctctcagagttctgtctgataaaataattgaactataattggcatgatgaatattcccaggttttacttcagtatataaatttaactctcagccacatgggctttccagacttttcaatacatatgatgttgcaggaattgcaatatttgcaaacatgtgccacaacagtgttcttggtgatgtttctaaaacagtttttattctattaatgttaaattttctaacataaacatttaattgattaatgtaaaattttaggaaggaacatctttaattttcaatatgagatggttgcaacctttaaagtagtacatatttgattttttttaaaaggcaatatttttttttctaggaaaactattcattatggttatttaactgcatatgttttttaaatttttccctcttggaacaacatgtactggggcctatcaaagggtggagggtgggaggagggagaggaacaggaaaaataactaatgggtactaggcttaatacctgggtgatgaaataatctgtataataaatccccatgacacaaaagtttacctgtgtaacaaacctgcatatgtacccctaaacttaaattcttccctctttttgtcttgggcacaagtttttgggatatggaaaagtttattgtatcccttttgaattttcttctaagatgaactttttaaataaaagatattactgcttttatattta

SEQ ID NO: 458957 - DNA, 3122 bp, Homo sapiens
cgccgtccttctcgcgcctcgcttctggccctgcaggttgtgtttccgcctctaccccgcctccattccgttgctctctcagtctcagacccgggctctcggtccgccgcttcaggtcttggcgcagcctcagagagttggcgcggctctgtgttgaccaaacctagtggatgcagttagcgccggagcccggccccgcccgtcaccagggttattcccgccttctaggtttgccaggactgccggccctgcagctgccttctgccccaggtttttggctactgatgttacaaacaataaaatattggagcatagagttgaagaacagactcaaaccaggtttttatttaattagttaaaaatatggatcctgagacaaggggacaagagattatcaaagtgacacctcttcaacaaatgcttgcctcatgtactggagctatactgacatcagtaatagtgacacccctggatgttgttaaaattagactccaagcccaaaacaacccactccccaaaggaaaatgttttgtatatagtaatggactcatggatcatctatgtgtctgtgaagagggaggcaacaaactatggtataagaagccaggaaatttccagggaacattggatgcattttttaaaatcattcgaaatgagggcattaaatctctatggagtggccttcctcctaccctagtgatggcagttcctgccacagttatttattttacctgctatgatcaattaagtgctcttctgagatctaagttaggagaaaatgaaacctgcataccaattgttgctggaattgtagccagatttggtgcagtaactgtgataagtccactagaattgattagaaccaagatgcagtccaagaagttttcttacgtggaactgcatcgatttgtcagcaagaaagtatctgaagatggttggatttccctttggaggggctgggctcctactgttcttagagatgtacctttctcagcaatgtactggtataactatgaaattttaaagaagtggttatgtgagaaatctggtttatatgagccaacatttatgatcaactttacttcaggggcattgtctggttcttttgctgctgttgcaactttaccatttgatgtagtaaaaacacaaaagcagacacaactttggacatatgaaagtcataaaatttctatgcctttgcatatgtcaacctggattataatgaagaacattgttgctaaaaatggattttccggattattttcaggcctaattcctcgcttaattaaaattgctcctgcttgtgccattatgatcagtacatatgaatttggaaaggcttttttccagaaacaaaatgttcgaaggcagcaatactagtgatgctgtttcaacttgaaacaacaactatagccaaagaagatggagactcttaggcaagaatgtttttcaccattattctctcacaatgattttatgtctttctttcctataatttaaataaataatttcagctctacctctaaatcataattttaaaataaattttatcttatttttggtgatattgaaaaagatattctagaaatcaccaccattgagcattcttgtaaaaatagattactccttagcatcaaaagcagtctcttgaaagtttaatattatatgtttcagtgtaacataatcttactgggagtgtgttgaatacaccagaactttttgaattgtgtgctgaatgatgtacatagtctagaagaaaaaagcccaagtcttgtgcacatttaaatcgtgtacataagtatttccgtatttcagtaaagtagataaagcactcgttaaatagcattgtttacatcgaccaaatattgcctgtttcctttaattcaaatgcattaggttcccgcctccctctccttccccgccatgttgctgttttaaggcttcatatgtattaacatttctctgatcaaaattgtggctgttttccttatgaaccataatataatcatttgtgtgatgtacattgtgccatttttgatgactaaatgtctatatttctgccattcctgtaagagagggagttttttactgatagtagcaaatgttcacttcagtcaaacttgggtgttcagtggtaaaccatatagtatttagactggtaaaaatagtttgcacacaggaatagcctctgatttttagctctcttgtaatccaagtatcattgttcatggaattctctaggtcatttttattgtgttgttctaacaagacagattattgctacaacaatagttacaagatatttctaaaatatcctttgatttttactctaagtatggtagagtaagaggctaaacaagaagctgtttccttgaagacattgctttcagtcaccatacatgtctaaataatttagcttatcattcattctatgtaggaatgagataagaaaggatatgatggcaggaaaagaaatgctattcattttttatactttagttttattttcttaggatctatatcctatatatatatattttttaaagcactaatttattgcagtctttattttagaaaaatgtgaagcatttttttctcccctaaaatgaatatatttagatgacaagtctttagtgctggtagaggaactaattgattttgtactatagtaggaaagtgtttatatgtttcaccagaaataaaatatgtagggtttgtatgtaatcttctgtgtttatcctatgttgatttaccttaaatttgcaacatacatatccacataaatattcatgactttcttatatttcattaaaatgttttatggcttcttaaaatcatcactgtgcttctaaatatttttacgtaaaatcattgtataatgctatactgtgatatacatgaaagtttatcttgaacagtgctctttaacaatattaaatttaaatttatcttggttttgctatgcttatgggtaattcatagaaaacagaaaaaatactgttcccaaaaggcagttatatatttcagtttaatatcacctataagtatgagaaaggtttccatgtctcctacccctcactgcacttaggaaaattcttatttatgaataaagtaagataagt

SEQ ID NO: 458958 - DNA, 1878 bp, Homo sapiens
  misc_feature (1847)..(1847): n is a, c, g, or t
  misc_feature (1849)..(1849): n is a, c, g, or t
  misc_feature (1854)..(1855): n is a, c, g, or t
  misc_feature (1861)..(1861): n is a, c, g, or t
  misc_feature (1873)..(1873): n is a, c, g, or t
cgccgtccttctcgcgcctcgcttctggccctgcaggttgtgtttccgcctctaccccgcctccattccgttgctctctcagtctcagacccgggctctcggtccgccgcttcaggtcttggcgcagcctcagagagttggcgcggctctgtgttgaccaaacctagtggatgcagttagcgccggagcccggccccgcccgtcaccagggttattcccgccttctaggtttgccaggactgccggccctgcagctgccttctgccccaggtttttggctactgatgttacaaacaataaaatattggagcatagagttgaagaacagactcaaaccaggtttttatttaattagttaaaaatatggatcctgagacaaggggacaagagattatcaaagtgacacctcttcaacaaatgcttgcctcatgtactggagctatactgacatcagtaatagtgacacccctggatgttgttaaaattagactccaagcccaaaacaacccactccccaaaggaaaatgttttgtatatagtaatggactcatggatcatctatgtgtctgtgaagagggaggcaacaaactatggtataagaagccaggaaatttccagggaacattggatgcattttttaaaatcattcgaaatgagggcattaaatctctatggagtggccttcctcctaccctagtgatggcagttcctgccacagttatttattttacctgctatgatcaattaagtgctcttctgagatctaagttaggagaaaatgaaacctgcataccaattgttgctggaattgtagccagatttggtgcagtaactgtgataagtccactagaattgattagaaccaagatgcagtccaagaagttttcttacgtggaactgcatcgatttgtcagcaagaaagtatctgaagatggttggatttccctttggaggggctgggctcctactgttcttagagatgtacctttctcagcaatgtactggtataactatgaaattttaaagaagtggttatgtgagaaatctggtttatatgagccaacatttatgatcaactttacttcaggggcattgtctggttcttttgctgctgttgcaactttaccatttgatgtagtaaaaacacaaaagcagacacaactttggacatatgaaagtcataaaatttctatgcctttgcatatgtcaacctggattataatgaagaacattgttgctaaaaatggattttccggattattttcaggcctaattcctcgcttaattaaaattgctcctgcttgtgccattatgatcagtacatatgaatttggaaaggcttttttccagaaacaaaatgttcgaaggcagcaatactagtgatgctgtttcaacttgaaacaacaactatagccaaagaagatggagactcttaggcaagaatgtttttcaccattattctctcacaatgattttatgtctttctttcctataatttaaataaataatttcagctctacctctaaatcataattttaaaataaattttatcttatttttggtgatattgaaaaagatattctagaaatcaccaccattgagcattcttgtaaaaatagattactccttagcatcaaaagcagtctcttgaaagtttaatattatatgtttcagtgtaacataatcttactgggagtgtgttgaatacaccagaactttttgaattgtgtgctgaatgatgtacatagtctagaagaaaaaagcccaagtcttgtgcacatttaaatcgtgtacataagtatttccgtatttcagtaaagtagataccacaggcccaagatgagggnancgagnncgactnacgtaatcgggntcaaa

SEQ ID NO: 458959 - DNA, 1456 bp, Homo sapiens
cgccgtccttctcgcgcctcgcttctggccctgcaggttgtgtttccgcctctaccccgcctccattccgttgctctctcagtctcagacccgggctctcggtccgccgcttcaggtcttggcgcagcctcagagagttggcgcggctctgtgttgaccaaacctagtggatgcagttagcgccggagcccggccccgcccgtcaccagggttattcccgccttctaggtttgccaggactgccggccctgcagctgccttctgccccaggtttttggctactgatgttacaaacaataaaatattggagcatagagttgaagaacagactcaaaccaggtttttatttaattagttaaaaatatggatcctgagacaaggggacaagagattatcaaagtgacacctcttcaacaaatgcttgcctcatgtactggagctatactgacatcagtaatagtgacacccctggatgttgttaaaattagactccaagcccaaaacaacccactccccaaaggaaaatgttttgtatatagtaatggactcatggatcatctatgtgtctgtgaagagggaggcaacaaactatggtataagaagccaggaaatttccagggaacattggatgcattttttaaaatcattcgaaatgagggcattaaatctctatggagtggccttcctcctaccctagtgatggcagttcctgccacagttatttattttacctgctatgatcaattaagtgctcttctgagatctaagttaggagaaaatgaaacctgcataccaattgttgctggaattgtagccagatttttcttacgtggaactgcatcgatttgtcagcaagaaagtatctgaagatggttggatttccctttggaggggctgggctcctactgttcttagagatgtacctttctcagcaatgtactggtataactatgaaattttaaagaagtggttatgtgagaaatctggtttatatgagccaacatttatgatcaactttacttcaggggcattgtctggttcttttgctgctgttgcaactttaccatttgatgtagtaaaaacacaaaagcagacacaactttggacatatgaaagtcataaaatttctatgcctttgcatatgtcaacctggattataatgaagaacattgttgctaaaaatggattttccggattattttcaggcctaattcctcgcttaattaaaattgctcctgcttgtgccattatgatcagtacatatgaatttggaaaggcttttttccagaaacaaaatgttcgaaggcagcaatactagtgatgctgtttcaacttgaaacaacaactatagccaaagaagatggagactcttaggcaagaatgtttttcaccattattctctcacaatgattttatgtctttctttcctataatttaaataaataatttcagctct

SEQ ID NO: 458960 - DNA, 760 bp, Homo sapiens
aaataagcgagatgttattattagctaaaataaaccctttgaaggagacagcactggtctaatttatttcaagaatagcgtatccattcagaaaggtagtaataactcaggacactgctagggagaatgagctgttttcctcagaaactccttttagaaaaaaaaagttttaaaactatttacaataaaatgtgaatgaaaaaatggttgtgaggacttttctttggcattggataccccatgaaggtttctatacactttttaagagataggggtctcacttaagagttcaagaccaggctggtcttgaactcttaagctcaagagatcgatcttcccacctcagcctcccaagtagctgtcttttaaaaatttcattatgaaaaatttttaagacctagaaaaagtttaaaaaataactaccatcaagtttaagaaacaagcattatcaagtcaggagaaaccttcagtacattcctccttaattgcatccagtcctatacatctttaaacatacagcctttttctgtttattatttttaatgaatctaactattaaaaataaaacttaaagtagctttttaggtaaacaaacctcttcttatggtaaagaaatgatatatccgcaagggccatggacactatgttatctgtagtaggaattattaaattgttatttataatagcattatttctttattttaacatttagtttctatgcctttgcatatgtcaacctggattataatgaagaacattg

SEQ ID NO: 458961 - DNA, 225 bp, Homo sapiens
gaaggatgttatcatttttgaaagatcagaggatgtgctctaattttatgttttctttttaacaggtttttatttaattagttaaaaatatggatcctgagacaaggggacaagagattatcaaagtgacacctcttcaacaaatgcttgcctcatgtactggagctatactgacatcagtaataggtaaaattatgttactgatgtagattatgtaactttgaa

SEQ ID NO: 458962 - DNA, 4067 bp, Homo sapiens
  misc_feature (3283)..(3283): n is a, c, g, or t
cgccgtccttctcgcgcctcgcttctggccctgcaggttgtgtttccgcctctaccccgcctccattccgttgctctctcagtctcagacccgggctctcggtccgccgcttcaggtcttggcgcagcctcagagagttggcgcggctctgtgttgaccaaacctagtggatgcagttagcgccggagcccggccccgcccgtcaccagggttattcccgccttctaggtttgccaggactgccggccctgcagctgccttctgccccaggtttttggctactgatgttacaaacaataaaatattggagcatagagttgaagaacagactcaaaccaggtttttatttaattagttaaaaatatggatcctgagacaaggggacaagagattatcaaagtgacacctcttcaacaaatgcttgcctcatgtactggagctatactgacatcagtaatagtgacacccctggatgttgttaaaattagactccaagcccaaaacaacccactccccaaaggaaaatgttttgtatatagtaatggactcatggatcatctatgtgtctgtgaagagggaggcaacaaactatggtataagaagccaggaaatttccagggaacattggatgcattttttaaaatcattcgaaatgagggcattaaatctctatggagtggccttcctcctaccctagtgatggcagttcctgccacagttatttattttacctgctatgatcaattaagtgctcttctgagatctaagttaggagaaaatgaaacctgcataccaattgttgctggaattgtagccagatttggtgcagtaactgtgataagtccactagaattgattagaaccaagatgcagtccaagaagttttcttacgtggaactgcatcgatttgtcagcaagaaagtatctgaagatggttggatttccctttggaggggctgggctcctactgttcttagagatgtacctttctcagcaatgtactggtataactatgaaattttaaagaagtggttatgtgagaaatctggtttatatgagccaacatttatgatcaactttacttcaggggcattgtctggttcttttgctgctgttgcaactttaccatttgatgtagtaaaaacacaaaagcagacacaactttggacatatgaaagtcataaaatttctatgcctttgcatatgtcaacctggattataatgaagaacattgttgctaaaaatggattttccggattattttcaggcctaattcctcgcttaattaaaattgctcctgcttgtgccattatgatcagtacatatgaatttggaaaggcttttttccagaaacaaaatgttcgaaggcagcaatactagtgatgctgtttcaacttgaaacaacaactatagccaaagaagatggagactcttaggcaagaatgtttttcaccattattctctcacaatgattttatgtctttctttcctataatttaaataaataatttcagctctacctctaaatcataattttaaaataaattttatcttatttttggtgatattgaaaaagatattctagaaatcaccaccattgagcattcttgtaaaaatagattactccttagcatcaaaagcagtctcttgaaagtttaatattatatgtttcagtgtaacataatcttactgggagtgtgttgaatacaccagaactttttgaattgtgtgctgaatgatgtacatagtctagaagaaaaaagcccaagtcttgtgcacatttaaatcgtgtacataagtatttccgtatttcagtaaagtagataaagcactcgttaaatagcattgtttacatcgaccaaatattgcctgtttcctttaattcaaatgcattaggttcccgcctccctctccttccccgccatgttgctgttttaaggcttcatatgtattaacatttctctgatcaaaattgtggctgttttccttatgaaccataatataatcatttgtgtgatgtacattgtgccatttttgatgactaaatgtctatatttctgccattcctgtaagagagggagttttttactgatagtagcaaatgttcacttcagtcaaacttgggtgttcagtggtaaaccatatagtatttagactggtaaaaatagtttgcacacaggaatagcctctgatttttagctctcttgtaatccaagtatcattgttcatggaattctctaggtcatttttattgtgttgttctaacaagacagattattgctacaacaatagttacaagatatttctaaaatatcctttgatttttactctaagtatggtagagtaagaggctaaacaagaagctgtttccttgaagacattgctttcagtcaccatacatgtctaaataatttagcttatcattcattctatgtaggaatgagataagaaaggatatgatggcaggaaaagaaatgctattcattttttatactttagttttattttcttaggatctatatcctatatatatatattttttaaagcactaatttattgcagtctttattttagaaaaatgtgaagcatttttttctcccctaaaatgaatatatttagatgacaagtctttagtgctggtagaggaactaattgattttgtactatagtaggaaagtgtttatatgtttcaccagaaataaaatatgtagggtttgtatgtaatcttctgtgtttatcctatgttgatttaccttaaatttgcaacatacatatccacataaatattcatgactttcttatatttcattaaaatgttttatggcttcttaaaatcatcactgtgcttctaaatatttttacgtaaaatcattgtataatgctatactgtgatatacatgaaagtttatcttgaacagtgctctttaacaatattaaatttaaatttatcttggttttgctatgcttatgggtaattcatagaaaacagaaaaaatactgttcccaaaaggcagttatatatttcagtttaatatcacctataagtatgagaaaggtttccatgtctcctacccctcactgcacttaggaaaattcttatttatgaataaagtaagataagtaaatctaattgcctagtcgtttttttaacacatatacatgcaatgtatctggatgaatagaaggctgaattgaagctttctttatatttaagaggtaaaaagaaatattaatacttttaaaatatactaacaaccaaaaagtgttcagaattttgctatantaataatttgtattaaaatagtacctagaaaaattcagtctatggaataggtaaaattttaaaattttaatttgctctcagagttctgtctgataaaataattgaactataattggcatgatgaatattcccaggttttacttcagtatataaatttaactctcagccacatgggctttccagacttttcaatacatatgatgttgcaggaattgcaatatttgcaaacatgtgccacaacagtgttcttggtgatgtttctaaaacagtttttattctattaatgttaaattttctaacataaacatttaattgattaatgtaaaattttaggaaggaacatctttaattttcaatatgagatggttgcaacctttaaagtagtacatatttgattttttttaaaaggcaatatttttttttctaggaaaactattcattatggttatttaactgcatatgttttttaaatttttccctcttggaacaacatgtactggggcctatcaaagggtggagggtgggaggagggagaggaacaggaaaaataactaatgggtactaggcttaatacctgggtgatgaaataatctgtataataaatccccatgacacaaaagtttacctgtgtaacaaacctgcatatgtacccctaaacttaaattcttccctctttttgtcttgggcacaagtttttgggatatggaaaagtttattgtatcccttttgaattttcttctaagatgaactttttaaataaaagatattactgcttttatattta

SEQ ID NO: 458963 - DNA, 4022 bp, Homo sapiens
  misc_feature (3238)..(3238): n is a, c, g, or t
cgccgtccttctcgcgcctcgcttctggccctgcaggttgtgtttccgcctctaccccgcctccattccgttgctctctcagtctcagacccgggctctcggtccgccgcttcaggtcttggcgcagcctcagagagttggcgcggctctgtgttgaccaaacctagtggatgcagttagcgccggagcccggccccgcccgtcaccagggttattcccgccttctaggtttgccaggactgccggccctgcagctgccttctgccccaggtttttggctactgatgttacaaacaataaaatattggagcatagagttgaagaacagactcaaaccaggtttttatttaattagttaaaaatatggatcctgagacaaggggacaagagattatcaaagtgacacctcttcaacaaatgcttgcctcatgtactggagctatactgacatcagtaatagtgacacccctggatgttgttaaaattagactccaagcccaaaacaacccactccccaaaggaaaatgttttgtatatagtaatggactcatggatcatctatgtgtctgtgaagagggaggcaacaaactatggtataagaagccaggaaatttccagggaacattggatgcattttttaaaatcattcgaaatgagggcattaaatctctatggagtggccttcctcctaccctagtgatggcagttcctgccacagttatttattttacctgctatgatcaattaagtgctcttctgagatctaagttaggagttggtgcagtaactgtgataagtccactagaattgattagaaccaagatgcagtccaagaagttttcttacgtggaactgcatcgatttgtcagcaagaaagtatctgaagatggttggatttccctttggaggggctgggctcctactgttcttagagatgtacctttctcagcaatgtactggtataactatgaaattttaaagaagtggttatgtgagaaatctggtttatatgagccaacatttatgatcaactttacttcaggggcattgtctggttcttttgctgctgttgcaactttaccatttgatgtagtaaaaacacaaaagcagacacaactttggacatatgaaagtcataaaatttctatgcctttgcatatgtcaacctggattataatgaagaacattgttgctaaaaatggattttccggattattttcaggcctaattcctcgcttaattaaaattgctcctgcttgtgccattatgatcagtacatatgaatttggaaaggcttttttccagaaacaaaatgttcgaaggcagcaatactagtgatgctgtttcaacttgaaacaacaactatagccaaagaagatggagactcttaggcaagaatgtttttcaccattattctctcacaatgattttatgtctttctttcctataatttaaataaataatttcagctctacctctaaatcataattttaaaataaattttatcttatttttggtgatattgaaaaagatattctagaaatcaccaccattgagcattcttgtaaaaatagattactccttagcatcaaaagcagtctcttgaaagtttaatattatatgtttcagtgtaacataatcttactgggagtgtgttgaatacaccagaactttttgaattgtgtgctgaatgatgtacatagtctagaagaaaaaagcccaagtcttgtgcacatttaaatcgtgtacataagtatttccgtatttcagtaaagtagataaagcactcgttaaatagcattgtttacatcgaccaaatattgcctgtttcctttaattcaaatgcattaggttcccgcctccctctccttccccgccatgttgctgttttaaggcttcatatgtattaacatttctctgatcaaaattgtggctgttttccttatgaaccataatataatcatttgtgtgatgtacattgtgccatttttgatgactaaatgtctatatttctgccattcctgtaagagagggagttttttactgatagtagcaaatgttcacttcagtcaaacttgggtgttcagtggtaaaccatatagtatttagactggtaaaaatagtttgcacacaggaatagcctctgatttttagctctcttgtaatccaagtatcattgttcatggaattctctaggtcatttttattgtgttgttctaacaagacagattattgctacaacaatagttacaagatatttctaaaatatcctttgatttttactctaagtatggtagagtaagaggctaaacaagaagctgtttccttgaagacattgctttcagtcaccatacatgtctaaataatttagcttatcattcattctatgtaggaatgagataagaaaggatatgatggcaggaaaagaaatgctattcattttttatactttagttttattttcttaggatctatatcctatatatatatattttttaaagcactaatttattgcagtctttattttagaaaaatgtgaagcatttttttctcccctaaaatgaatatatttagatgacaagtctttagtgctggtagaggaactaattgattttgtactatagtaggaaagtgtttatatgtttcaccagaaataaaatatgtagggtttgtatgtaatcttctgtgtttatcctatgttgatttaccttaaatttgcaacatacatatccacataaatattcatgactttcttatatttcattaaaatgttttatggcttcttaaaatcatcactgtgcttctaaatatttttacgtaaaatcattgtataatgctatactgtgatatacatgaaagtttatcttgaacagtgctctttaacaatattaaatttaaatttatcttggttttgctatgcttatgggtaattcatagaaaacagaaaaaatactgttcccaaaaggcagttatatatttcagtttaatatcacctataagtatgagaaaggtttccatgtctcctacccctcactgcacttaggaaaattcttatttatgaataaagtaagataagtaaatctaattgcctagtcgtttttttaacacatatacatgcaatgtatctggatgaatagaaggctgaattgaagctttctttatatttaagaggtaaaaagaaatattaatacttttaaaatatactaacaaccaaaaagtgttcagaattttgctatantaataatttgtattaaaatagtacctagaaaaattcagtctatggaataggtaaaattttaaaattttaatttgctctcagagttctgtctgataaaataattgaactataattggcatgatgaatattcccaggttttacttcagtatataaatttaactctcagccacatgggctttccagacttttcaatacatatgatgttgcaggaattgcaatatttgcaaacatgtgccacaacagtgttcttggtgatgtttctaaaacagtttttattctattaatgttaaattttctaacataaacatttaattgattaatgtaaaattttaggaaggaacatctttaattttcaatatgagatggttgcaacctttaaagtagtacatatttgattttttttaaaaggcaatatttttttttctaggaaaactattcattatggttatttaactgcatatgttttttaaatttttccctcttggaacaacatgtactggggcctatcaaagggtggagggtgggaggagggagaggaacaggaaaaataactaatgggtactaggcttaatacctgggtgatgaaataatctgtataataaatccccatgacacaaaagtttacctgtgtaacaaacctgcatatgtacccctaaacttaaattcttccctctttttgtcttgggcacaagtttttgggatatggaaaagtttattgtatcccttttgaattttcttctaagatgaactttttaaataaaagatattactgcttttatattta

SEQ ID NO: 458964 - DNA, 3502 bp, Homo sapiens
ggaagacgtggcaccagtcggaggggcggggctgggaggggctcctccctaccgcccccaattccgccctgcccccgccgcggcggcgctagccgccactgagggaccgaccctataaaggccgctccgcgaggggtgcgcagcattcggcagagggcgcttcgacgggctgggctgtgcgcctgcgcagtgtgggtcgctcccgattccctgccccggccggccccgcctcggctccgcaccctcgccccgctctcagccgccgctctgccccgcagcagccagccccgtgtccggcagtatgttcagctgggtcagcaaggatgcccgccgcaagaaggagccggagctcttccagacggtggccgaggggctgcggcagctgtacgcgcagaagctgctacccctggaggagcactaccgcttccacgagttccactcgcccgcgctggaggacgctgacttcgacaacaagcctatggtgctcctcgtggggcagtacagcacgggcaagaccaccttcatccgacacctgatcgagcaggacttcccggggatgcgcatcgggcccgagcccaccaccgactccttcatcgccgtcatgcacggccccactgagggcgtggtgccgggcaacgcgctcgtggtggacccgcggcgccccttccgcaagctcaacgcgtttggcaacgctttcctcaacaggttcatgtgtgcccagctgcccaaccccgtcctggacagcatcagcatcatcgacacccccgggatcctgtctggagagaagcagcggatcagcagaggctatgactttgcagccgtcctggagtggttcgcggagcgtgtggaccgcatcatcctgctcttcgacgcccacaagctggacatctccgatgagttctcggaagtgatcaaggctctgaagaaccatgaggacaagatccgcgtggtgctgaacaaggcagaccagatcgagacgcagcagctgatgcgggtgtacggggccctcatgtggtccctgggcaagatcatcaacacccccgaggtggtcagggtctacatcggctccttctggtcccacccgctcctcatccccgacaaccgcaagctctttgaggccgaggagcaggacctcttcaaggacatccagtcactgccccgaaacgccgccctcaggaagctcaatgacctgatcaagcgggcacggctggccaaggttcacgcctacatcatcagctccctcaagaaagagatgcccaatgtctttggtaaagagagcaaaaagaaagagctggtgaacaacctgggagagatctaccagaagattgagcgcgagcaccagatctcccctggggacttcccgagcctccgcaagatgcaggaactcctgcagacccaggacttcagcaagttccaggcgctgaagcccaagctgctggacacggtggatgacatgctggccaacgacatcgcgcggctgatggtgatggtgcggcaggaggagtccctgatgccttcccaggtggtcaagggcggcgcctttgacggcaccatgaacgggccgttcgggcacggctacggcgagggggccggcgagggcatcgacgacgtggagtgggtggtgggcaaggacaagcccacctacgacgagatcttctacacgctgtcccctgtcaacggcaagatcacgggcgccaacgccaagaaggagatggtgaagtccaagctccccaacaccgtgctagggaagatctggaagctggccgacgtggacaaggacgggctgctggacgacgaggagttcgcgctggccaaccacctcatcaaggtcaagctggagggccacgagctgcccgccgacctgcccccgcacctggtgccgccctccaagcgcagacatgagtgatggcgcccggccccgcacctgccatttgcacgcccggccgggaggcagagacggggggaggggaagcctcaccatttctcaaggtccataaagactgagcggatgtttcctcgcctctcgaaaaggaaaaccaccatctttcttttaaggctgttcctgggcctggcgggggaggcaggggtgagaggatggaattgtgtgcacaagaactgtggctattttaatatataacgttagaggctgcgttctttgtcgccgcctcccctgtgtgccagccctgtgtgcacggcctctgccccccggcctttgctgtggctggagctggacagtgcagtgactgcgaccgtgggggagccaggtcgcccttttggcagctgctaggctgaggctgcatggacaggaacaccaggcaccctccgtgtgcttctgagctgaggttgcttcacgggaccgtggcttccttcctcacctggctctgcctcccccgtgctctcgggcgaagtgggttcttgtgccttcccctcccgggcccaggctccccgtgcgcgggccctgccctttcctcccgcgccccaccggctccgacgcgcaaccccgctcagcagtcacagaagcagggcccagccaccttggtctttttttgggagttcaggggagtaggagaatgtcttccagaaaaatacataagctagtttctgttctgtaaagtgatatctttcatacttgaccaaagttcccaataacttcccaaccactgttcaaaagctgtgatttttgtctccccttcccaccctccagccaaggagcagccctgcccagggggcattaggtgtgggtacccggggagcaccccgttcctggaccccagtgttgcatttcctggctgaggaagggtggtcatcccagctcctgccctaccctctcacttaactggagctttgggacgcaccctccacagtgggaggtggtggtgggtggcggtggcggggcctcacgacagcttggtgctggtaagaggaagcccgtggttctggctaggctctcatgtccagacagcggggaccaggggaaaacccagccccttctgtaatcccccttcatttcctaccttccttcctcctctgtttagcaaaggagggcagctcacttggatgtccttacaacgcccctggccccaggttgagcaataagaaaccagaaccttgcggcccagtggcccgggccagttcaggccgcctccccctcctctgcctggggccattgagcccagcctccagggcccgggtgcgtttgcaggccagtggccactgtccgggctgtgatggcaccaaggcaggtggagcaccaggtaccacacagctgggcttcccaccaggctttcccgcgggggtctcagggagcttctccccagcgctgctcggagtctgcaggaactggccttgttctccttagcccgtcactccatacagtattaggtgaggatggatgcgggcgctgtccttgccgggaagtcactgttgaagttgcagtggcttgttcacacctgtgggaagagaagtgaagactttctccttgcattaaaaagtctgaactgtg

SEQ ID NO: 458965 - DNA, 2241 bp, Homo sapiens
ggaagacgtggcaccagtcggaggggcggggctgggaggggctcctccctaccgcccccaattccgccctgcccccgccgcggcggcgctagccgccactgagggaccgaccctataaaggccgctccgcgaggggtgcgcagcattcggcagagggcgcttcgacgggctgggctgtgcgcctgcgcagtgtgggtcgctcccgattccctgccccggccggccccgcctcggctccgcaccctcgccccgctctcagccgccgctctgccccgcagcagccagccccgtgtccggcagtatgttcagctgggtcagcaaggatgcccgccgcaagaaggagccggagctcttccagacggtggccgaggggctgcggcagctgtacgcgcagaagctgctacccctggaggagcactaccgcttccacgagttccactcgcccgcgctggaggacgctgacttcgacaacaagcctatggtgctcctcgtggggcagtacagcacgggcaagaccaccttcatccgacacctgatcgagcaggacttcccggggatgcgcatcgggcccgagcccaccaccgactccttcatcgccgtcatgcacggccccactgagggcgtggtgccgggcaacgcgctcgtggtggacccgcggcgccccttccgcaagctcaacgcgtttggcaacgctttcctcaacaggttcatgtgtgcccagctgcccaaccccgtcctggacagcatcagcatcatcgacacccccgggatcctgtctggagagaagcagcggatcagcagaggctatgactttgcagccgtcctggagtggttcgcggagcgtgtggaccgcatcatcctgctcttcgacgcccacaagctggacatctccgatgagttctcggaagtgatcaaggctctgaagaaccatgaggacaagatccgcgtggtgctgaacaaggcagaccagatcgagacgcagcagctgatgcgggtgtacggggccctcatgtggtccctgggcaagatcatcaacacccccgaggtggtcagggtctacatcggctccttctggtcccacccgctcctcatccccgacaaccgcaagctctttgaggccgaggagcaggacctcttcaaggacatccagtcactgccccgaaacgccgccctcaggaagctcaatgacctgatcaagcgggcacggctggccaaggttcacgcctacatcatcagctccctcaagaaagagatgcccaatgtctttggtaaagagagcaaaaagaaagagctggtgaacaacctgggagagatctaccagaagattgagcgcgagcaccagatctcccctggggacttcccgagcctccgcaagatgcaggaactcctgcagacccaggacttcagcaagttccaggcgctgaagcccaagctgctggacacggtggatgacatgctggccaacgacatcgcgcggctgatggtgatggtgcggcaggaggagtccctgatgccttcccaggtggtcaagggcggcgcctttgacggcaccatgaacgggccgttcgggcacggctacggcgagggggccggcgagggcatcgacgacgtggagtgggtggtgggcaaggacaagcccacctacgacgagatcttctacacgctgtcccctgtcaacggcaagatcacgggcgccaacgccaagaaggagatggtgaagtccaagctccccaacaccgtgctagggaagatctggaagctggccgacgtggacaaggacgggctgctggacgacgaggagttcgcgctggccaaccacctcatcaaggtcaagctggagggccacgagctgcccgccgacctgcccccgcacctggtgccgcccccctcctctgcctggggccattgagcccagcctccagggcccgggtgcgtttgcaggccagtggccactgtccgggctgtgatggcaccaaggcaggtggagcaccaggtaccacacagctgggcttcccaccaggctttcccgcgggggtctcagggagcttctccccagcgctgctcggagtctgcaggaactggccttgttctccttagcccgtcactccatacagtattaggtgaggatggatgcgggcgctgtccttgccgggaagtcactgttgaagttgcagtggcttgttcacacctgtgggaagagaagtgaagactttctccttgcattaaaaagtctgaactgtg

SEQ ID NO: 458966 - DNA, 614 bp, Homo sapiens
gtcgtgaggaagccgtggttctggctaggctcccctggtccccgctgtctggacatgagagcctagccagacagcggggaccaggggaaaacccagccccttctgtaatcccccttcatttcctaccttccttcctcctctgtttagcaaaggagggcagctcacttggatgtccttacaacgcccctggccccaggttgagcaataagaaaccagaaccttgcggcccagtggcccgggccagttcaggccgcctccccctcctctgcctggggccattgagcccagcctccagggcccgggtgcgtttgcaggccagtggccactgtccgggctgtgatggcaccaaggcaggtggagcaccaggtaccacacagctgggcttcccaccaggctttcccgcgggggtctcagggagcttctccccagcgctgctcggagtctgcaggaactggccttgttctccttagcccgtcactccatacagtattaggtgaggatggatgcgggcgctgtccttgccgggaagtcactgttgaagttgcagtggcttgttcacacctgtgggaagagaagtgaagactttctccttgcattaaaaagtctgaactgtg

SEQ ID NO: 458967 - DNA, 324 bp, Homo sapiens
acaggttagagagccaagggccagatggttttgccgagtcgcccctgctagtgtgggggagcagcactttatgcttgtgaagccctgactggaaccacttggcctggagtctgggaggggcctcccttcccagcccttgtccttcctcccccgcccacagactggccttgttctccttagcccgtcactccatacagtattaggtgaggatggatgcgggcgctgtccttgccgggaagtcactgttgaagttgcagtggcttgttcacacctgtgggaagagaagtgaagactttctccttgcattaaaaagtctgaactgtg

SEQ ID NO: 458968 - DNA, 621 bp, Homo sapiens
gtagcttgtgtgctttactatgatgaaaagaatcaaatcaaagcactaaggggcgtaagattgcaggcagggttggaattacttatccgctctccaatggttagggagcaagaggggagggcaagggaactatctattccctcggaagggatcttacaagcggtaggcgaacaaacctcccatcgtgtcctctctagattccaccagactcagttcccctgagatatcccccgttctcagatttgagttcctgcctcttcctcttagcctaccagcccaagttatcccctgatacaggcccctagccctccaggcttccacatctcccagaagcgaggaagttggacctgaggctttcaaagtcgcaggttcaattcagatctctttaagagcccccagggtcctgctaccacaggttggtgtcttgatactggttacataacaatcagtccccaaagctctgacatcacccactgaagattctcaccagcctggacagccaaaggggtctgtgtgtggccggggaggatggcgggggagtgagccccatggaacagccaggaactggtaaggggaggtagggcacagatcccagtaaatgatggtaaatggtggtgaccc

SEQ ID NO: 458969 - DNA, 3463 bp, Homo sapiens
ggaagacgtggcaccagtcggaggggcggggctgggaggggctcctccctaccgcccccaattccgccctgcccccgccgcggcggcgctagccgccactgagggaccgaccctataaaggccgctccgcgaggggtgcgcagcattcggcagagggcgcttcgacgggctgggctgtgcgcctgcgcagtgtgggtcgctcccgattccctgccccggccggccccgcctcggctccgcaccctcgccccgctctcagccgccgctctgccccgcagcagccagccccgtgtccggcagtatgttcagctgggtcagcaaggatgcccgccgcaagaaggagccggagctcttccagacggtggccgaggggctgcggcagctgtacgcgcagaagctgctacccctggaggagcactaccgcttccacgagttccactcgcccgcgctggaggacgctgacttcgacaacaagcctatggtgctcctcgtggggcagtacagcacgggcaagaccaccttcatccgacacctgatcgagcaggacttcccggggatgcgcatcgggcccgagcccaccaccgactccttcatcgccgtcatgcacggccccactgagggcgtggtgccgggcaacgcgctcgtggtggacccgcggcgccccttccgcaagctcaacgcgtttggcaacgctttcctcaacaggttcatgtgtgcccagctgcccaaccccgtcctggacagcatcagcatcatcgacacccccgggatcctgtctggagagaagcagcggatcagcagaggctatgactttgcagccgtcctggagtggttcgcggagcgtgtggaccgcatcatcctgctcttcgacgcccacaagctggacatctccgatgagttctcggaagtgatcaaggctctgaagaaccatgaggacaagatccgcgtggtgctgaacaaggcagaccagatcgagacgcagcagctgatgcgggtgtacggggccctcatgtggtccctgggcaagatcatcaacacccccgaggtggtcagggtctacatcggctccttctggtcccacccgctcctcatccccgacaaccgcaagctctttgaggccgaggagcaggacctcttcaaggacatccagtcactgccccgaaacgccgccctcaggaagctcaatgacctgatcaagcgggcacggctggccaaggttcacgcctacatcatcagctccctcaagaaagagatgcccaatgtctttggtaaagagagcaaaaagaaagagctggtgaacaacctgggagagatctaccagaagattgagcgcgagcaccagatctcccctggggacttcccgagcctccgcaagatgcaggaactcctgcagacccaggacttcagcaagttccaggcgctgaagcccaagctgctggacacggtggatgacatgctggccaacgacatcgcgcggctgatggtgatggtgcggcaggaggagtccctgatgccttcccaggtggtcaagggcggcgcctttgacggcaccatgaacgggccgttcgggcacggctacggcgagggggccggcgagggcatcgacgacgtggagtgggtggtgggcaaggacaagcccacctacgacgagatcttctacacgctgtcccctgtcaacggcaagatcacgggcgccaacgccaagaaggagatggtgaagtccaagctccccaacaccgtgctagggaagatctggaagctggccgacgtggacaaggacgggctgctggacgacgaggagttcgcgctggccaaccacctcatcaaggtcaagctggagggccacgagctgcccgccgacctgcccccgcacctggtgccgccctccaagcgcagacatgagtgatggcgcccggccccgcacctgccatttgcacgcccggccgggaggcagagacggggggaggggaagcctcaccatttctcgaaaaggaaaaccaccatctttcttttaaggctgttcctgggcctggcgggggaggcaggggtgagaggatggaattgtgtgcacaagaactgtggctattttaatatataacgttagaggctgcgttctttgtcgccgcctcccctgtgtgccagccctgtgtgcacggcctctgccccccggcctttgctgtggctggagctggacagtgcagtgactgcgaccgtgggggagccaggtcgcccttttggcagctgctaggctgaggctgcatggacaggaacaccaggcaccctccgtgtgcttctgagctgaggttgcttcacgggaccgtggcttccttcctcacctggctctgcctcccccgtgctctcgggcgaagtgggttcttgtgccttcccctcccgggcccaggctccccgtgcgcgggccctgccctttcctcccgcgccccaccggctccgacgcgcaaccccgctcagcagtcacagaagcagggcccagccaccttggtctttttttgggagttcaggggagtaggagaatgtcttccagaaaaatacataagctagtttctgttctgtaaagtgatatctttcatacttgaccaaagttcccaataacttcccaaccactgttcaaaagctgtgatttttgtctccccttcccaccctccagccaaggagcagccctgcccagggggcattaggtgtgggtacccggggagcaccccgttcctggaccccagtgttgcatttcctggctgaggaagggtggtcatcccagctcctgccctaccctctcacttaactggagctttgggacgcaccctccacagtgggaggtggtggtgggtggcggtggcggggcctcacgacagcttggtgctggtaagaggaagcccgtggttctggctaggctctcatgtccagacagcggggaccaggggaaaacccagccccttctgtaatcccccttcatttcctaccttccttcctcctctgtttagcaaaggagggcagctcacttggatgtccttacaacgcccctggccccaggttgagcaataagaaaccagaaccttgcggcccagtggcccgggccagttcaggccgcctccccctcctctgcctggggccattgagcccagcctccagggcccgggtgcgtttgcaggccagtggccactgtccgggctgtgatggcaccaaggcaggtggagcaccaggtaccacacagctgggcttcccaccaggctttcccgcgggggtctcagggagcttctccccagcgctgctcggagtctgcaggaactggccttgttctccttagcccgtcactccatacagtattaggtgaggatggatgcgggcgctgtccttgccgggaagtcactgttgaagttgcagtggcttgttcacacctgtgggaagagaagtgaagactttctccttgcattaaaaagtctgaactgtg

SEQ ID NO: 458970 - DNA, 3030 bp, Homo sapiens
ggaagacgtggcaccagtcggaggggcggggctgggaggggctcctccctaccgcccccaattccgccctgcccccgccgcggcggcgctagccgccactgagggaccgaccctataaaggccgctccgcgaggggtgcgcagcattcggcagagggcgcttcgacgggctgggctgtgcgcctgcgcagtgtgggtcgctcccgattccctgccccggccggccccgcctcggctccgcaccctcgccccgctctcagccgccgctctgccccgcagcagccagccccgtgtccggcagtatgttcagctgggtcagcaaggatgcccgccgcaagaaggagccggagctcttccagacggtggccgaggggctgcggcagctgtacgcgcagaagctgctacccctggaggagcactaccgcttccacgagttccactcgcccgcgctggaggacgctgacttcgacaacaagcctatggtgctcctcgtggggcagtacagcacgggcaagaccaccttcatccgacacctgatcgagcaggacttcccggggatgcgcatcgggcccgagcccaccaccgactccttcatcgccgtcatgcacggccccactgagggcgtggtgccgggcaacgcgctcgtggtggacccgcggcgccccttccgcaagctcaacgcgtttggcaacgctttcctcaacaggttcatgtgtgcccagctgcccaaccccgtcctggacagcatcagcatcatcgacacccccgggatcctgtctggagagaagcagcggatcagcagaggctatgactttgcagccgtcctggagtggttcgcggagcgtgtggaccgcatcatcctgctcttcgacgcccacaagctggacatctccgatgagttctcggaagtgatcaaggctctgaagaaccatgaggacaagatccgcgtggtgctgaacaaggcagaccagatcgagacgcagcagctgatgcgggtgtacggggccctcatgtggtccctgggcaagatcatcaacacccccgaggtggtcagggtctacatcggctccttctggtcccacccgctcctcatccccgacaaccgcaagctctttgaggccgaggagcaggacctcttcaaggacatccagtcactgccccgaaacgccgccctcaggaagctcaatgacctgatcaagcgggcacggctggccaaggttcacgcctacatcatcagctccctcaagaaagagatgcccaatgtctttggtaaagagagcaaaaagaaagagctggtgaacaacctgggagagatctaccagaagattgagcgcgagcaccagatctcccctggggacttcccgagcctccgcaagatgcaggaactcctgcagacccaggacttcagcaagttccaggcgctgaagcccaagctgctggacacggtggatgacatgctggccaacgcccggccgggaggcagagacggggggaggggaagcctcaccatttctcaaggtccataaagactgagcggatgtttcctcgcctctcgaaaaggaaaaccaccatctttcttttaaggctgttcctgggcctggcgggggaggcaggggtgagaggatggaattgtgtgcacaagaactgtggctattttaatatataacgttagaggctgcgttctttgtcgccgcctcccctgtgtgccagccctgtgtgcacggcctctgccccccggcctttgctgtggctggagctggacagtgcagtgactgcgaccgtgggggagccaggtcgcccttttggcagctgctaggctgaggctgcatggacaggaacaccaggcaccctccgtgtgcttctgagctgaggttgcttcacgggaccgtggcttccttcctcacctggctctgcctcccccgtgctctcgggcgaagtgggttcttgtgccttcccctcccgggcccaggctccccgtgcgcgggccctgccctttcctcccgcgccccaccggctccgacgcgcaaccccgctcagcagtcacagaagcagggcccagccaccttggtctttttttgggagttcaggggagtaggagaatgtcttccagaaaaatacataagctagtttctgttctgtaaagtgatatctttcatacttgaccaaagttcccaataacttcccaaccactgttcaaaagctgtgatttttgtctccccttcccaccctccagccaaggagcagccctgcccagggggcattaggtgtgggtacccggggagcaccccgttcctggaccccagtgttgcatttcctggctgaggaagggtggtcatcccagctcctgccctaccctctcacttaactggagctttgggacgcaccctccacagtgggaggtggtggtgggtggcggtggcggggcctcacgacagcttggtgctggtaagaggaagcccgtggttctggctaggctctcatgtccagacagcggggaccaggggaaaacccagccccttctgtaatcccccttcatttcctaccttccttcctcctctgtttagcaaaggagggcagctcacttggatgtccttacaacgcccctggccccaggttgagcaataagaaaccagaaccttgcggcccagtggcccgggccagttcaggccgcctccccctcctctgcctggggccattgagcccagcctccagggcccgggtgcgtttgcaggccagtggccactgtccgggctgtgatggcaccaaggcaggtggagcaccaggtaccacacagctgggcttcccaccaggctttcccgcgggggtctcagggagcttctccccagcgctgctcggagtctgcaggaactggccttgttctccttagcccgtcactccatacagtattaggtgaggatggatgcgggcgctgtccttgccgggaagtcactgttgaagttgcagtggcttgttcacacctgtgggaagagaagtgaagactttctccttgcattaaaaagtctgaactgtg

SEQ ID NO: 458971 - DNA, 4040 bp, Homo sapiens
ggaagacgtggcaccagtcggaggggcggggctgggaggggctcctccctaccgcccccaattccgccctgcccccgccgcggcggcgctagccgccactgagggaccgaccctataaaggccgctccgcgaggggtgcgcagcattcggcagagggcgcttcgacgggctgggctgtgcgcctgcgcagtgtgggtcgctcccgattccctgccccggccggccccgcctcggctccgcaccctcgccccgctctcagccgccgctctgccccgcagcagccagccccgtgtccggcagtatgttcagctgggtcagcaaggatgcccgccgcaagaaggagccggagctcttccagacggtggccgaggggctgcggcagctgtacgcgcagaagctgctacccctggaggagcactaccgcttccacgagttccactcgcccgcgctggaggacgctgacttcgacaacaagcctatggtgctcctcgtggggcagtacagcacgggcaagaccaccttcatccgacacctgatcgagcaggacttcccggggatgcgcatcgggcccgagcccaccaccgactccttcatcgccgtcatgcacggccccactgagggcgtggtgccgggcaacgcgctcgtggtggacccgcggcgccccttccgcaagctcaacgcgtttggcaacgctttcctcaacaggttcatgtgtgcccagctgcccaaccccgtcctggacagcatcagcatcatcgacacccccgggatcctgtctggagagaagcagcggatcagcagaggctatgactttgcagccgtcctggagtggttcgcggagcgtgtggaccgcatcatcctgctcttcgacgcccacaagctggacatctccgatgagttctcggaagtgatcaaggctctgaagaaccatgaggacaagatccgcgtggtgctgaacaaggcagaccagatcgagacgcagcagctgatgcgggtgtacggggccctcatgtggtccctgggcaagatcatcaacacccccgaggtggtcagggtctacatcggctccttctggtcccacccgctcctcatccccgacaaccgcaagctctttgaggccgaggagcaggacctcttcaaggacatccagtcactgccccgaaacgccgccctcaggaagctcaatgacctgatcaagcgggcacggctggccaaggttcacgcctacatcatcagctccctcaagaaagagatgcccaatgtctttggtaaagagagcaaaaagaaagagctggtgaacaacctgggagagatctaccagaagattgagcgcgagcaccagatctcccctggggacttcccgagcctccgcaagatgcaggaactcctgcagacccaggacttcagcaagttccaggcgctgaagcccaagctgctggacacggtggatgacatgctggccaacgacatcgcgcggctgatggtgatggtgcggcaggaggagtccctgatgccttcccaggtggtcaagggcggcgcctttgacggcaccatgaacgggccgttcgggcacggctacggcgagggggccggcgagggcatcgacgacgtggagtgggtggtgggcaaggacaagcccacctacgacgagatcttctacacgctgtcccctgtcaacggcaagatcacgggcgccaacgccaagaaggagatggtgaagtccaagctccccaacaccgtgctagggaagatctggaagctggccgacgtggacaaggacgggctgctggacgacgaggagttcgcgctggccaaccacctcatcaaggtcaagctggagggccacgagctgcccgccgacctgcccccgcacctggtgccgccctccaagcgcagacatgagtgatggcgcccggccccgcacctgccatttgcacgcccggccgggaggcagagacggggggaggggaagcctcaccatttctcaaggtccataaagactgagcggatgtttcctcgcctctcgaaaaggaaaaccaccatctttcttttaaggctgttcctgggcctggcgggggaggcaggggtgagaggatggaattgtgtgcacaagaactgtggctattttaatatataacgttagaggctgcgttctttgtcgccgcctcccctgtgtgccagccctgtgtgcacggcctctgccccccggcctttgctgtggctggagctggacagtgcagtgactgcgaccgtgggggagccaggtcgcccttttggcagctgctaggctgaggctgcatggacaggaacaccaggcaccctccgtgtgcttctgagctgaggttgcttcacgggaccgtggcttccttcctcacctggctctgcctcccccgtgctctcgggcgaagtgggttcttgtgccttcccctcccgggcccaggctccccgtgcgcgggccctgccctttcctcccgcgccccaccggctccgacgcgcaaccccgctcagcagtcacagaagcagggcccagccaccttggtctttttttgggagttcaggggagtaggagaatgtcttccagaaaaatacataagctagtttctgttctgtaaagtgatatctttcatacttgaccaaagttcccaataacttcccaaccactgttcaaaagctgtgatttttgtctccccttcccaccctccagccaaggagcagccctgcccagggggcattaggtgtgggtacccggggagcaccccgttcctggaccccagtgttgcatttcctggctgaggaagggtggtcatcccagctcctgccctaccctctcacttaactggagctttgggacgcaccctccacagtgggaggtggtggtgggtggcggtggcggggcctcacgacagcttggtgctggtaagaggaagcccgtggttctggctaggctctcatgtccagacagcggggaccaggggaaaacccagccccttctgtaatcccccttcatttcctaccttccttcctcctctgtttagcaaaggagggcagctcacttggatgtccttacaacgcccctggccccaggttgagcaataagaaaccagaaccttgcggcccagtggcccgggccagttcaggccgcctccccctcctctgcctggggccattgagcccagcctccagggcccgggtgcgtttgcaggccagtggccactgtccgggctgtgatggcaccaaggcaggtggagcaccaggtaccacacagctgggcttcccaccaggctttcccgcgggggtctcagggagcttctccccagcgctgctcggagtctgcaggaactggccttgttctccttagcccgtcactccatacagtattaggtgaggatggatgcgggcgctgtccttgccgggaagtcactgttgaagttgcagtggcttgttcacacctgtgggaagagaagtgaagactttctccttgcattaaaaagtctgaactgtgaaaaaaaaaaaaaaataacatacaaaacaaattttgggggaaagaatttaaggccatacagaaaaaggtattagaaaccacatttagtgaattgggcgacgacgaggcccaatggaggtacattataaaattaggagacaataaggaggtaacacaaagagagaatattgggcaataaaaataatgaggtatgagattcacacgagtaaaaaagaactctccgggtgaaaccagaggtgtttctgagacagactccagaaggagtgttcgagaagcaatacctggagactaataacgaggggtcacaggggagaccagaacaaacaaaaataacgcccgccctgggggagcaagacaaaaagcaagcaagaacacaaaaacgagcagaacaaaataaacaaagacaaaacagcgaaaaaaaagaaagaaaaaaatatagaatcaacataaaaacacaaaaaacagctaactcacaaacataattataataataaaaaacataaataaaagaataatataaactacaaaaaagaacagc

SEQ ID NO: 458972 - DNA, 3740 bp, Homo sapiens
  misc_feature (3732)..(3732): n is a, c, g, or t
ggaagacgtggcaccagtcggaggggcggggctgggaggggctcctccctaccgcccccaattccgccctgcccccgccgcggcggcgctagccgccactgagggaccgaccctataaaggccgctccgcgaggggtgcgcagcattcggcagagggcgcttcgacgggctgggctgtgcgcctgcgcagtgtgggtcgctcccgattccctgccccggccggccccgcctcggctccgcaccctcgccccgctctcagccgccgctctgccccgcagcagccagccccgtgtccggcagtatgttcagctgggtcagcaaggatgcccgccgcaagaaggagccggagctcttccagacggtggccgaggggctgcggcagctgtacgcgcagaagctgctacccctggaggagcactaccgcttccacgagttccactcgcccgcgctggaggacgctgacttcgacaacaagcctatggtgctcctcgtggggcagtacagcacgggcaagaccaccttcatccgacacctgatcgagcaggacttcccggggatgcgcatcgggcccgagcccaccaccgactccttcatcgccgtcatgcacggccccactgagggcgtggtgccgggcaacgcgctcgtggtggacccgcggcgccccttccgcaagctcaacgcgtttggcaacgctttcctcaacaggttcatgtgtgcccagctgcccaaccccgtcctggacagcatcagcatcatcgacacccccgggatcctgtctggagagaagcagcggatcagcagaggctatgactttgcagccgtcctggagtggttcgcggagcgtgtggaccgcatcatcctgctcttcgacgcccacaagctggacatctccgatgagttctcggaagtgatcaaggctctgaagaaccatgaggacaagatccgcgtggtgctgaacaaggcagaccagatcgagacgcagcagctgatgcgggtgtacggggccctcatgtggtccctgggcaagatcatcaacacccccgaggtggtcagggtctacatcggctccttctggtcccacccgctcctcatccccgacaaccgcaagctctttgaggccgaggagcaggacctcttcaaggacatccagtcactgccccgaaacgccgccctcaggaagctcaatgacctgatcaagcgggcacggctggccaaggttcacgcctacatcatcagctccctcaagaaagagatgcccaatgtctttggtaaagagagcaaaaagaaagagctggtgaacaacctgggagagatctaccagaagattgagcgcgagcaccagatctcccctggggacttcccgagcctccgcaagatgcaggaactcctgcagacccaggacttcagcaagttccaggcgctgaagcccaagctgctggacacggtggatgacatgctggccaacgacatcgcgcggctgatggtgatggtgcggcaggaggagtccctgatgccttcccaggtggtcaagggcggcgcctttgacggcaccatgaacgggccgttcgggcacggctacggcgagggggccggcgagggcatcgacgacgtggagtgggtggtgggcaaggacaagcccacctacgacgagatcttctacacgctgtcccctgtcaacggcaagatcacgggcgccaacgccaagaaggagatggtgaagtccaagctccccaacaccgtgctagggaagatctggaagctggccgacgtggacaaggacgggctgctggacgacgaggagttcgcgctggccaaccacctcatcaaggtcaagctggagggccacgagctgcccgccgacctgcccccgcacctggtgccgccctccaagcgcagacatgagtgatggcgcccggccccgcacctgccatttgcacgcccggccgggaggcagagacggggggaggggaagcctcaccatttctcaaggtccataaagactgagcggatgtttcctcgcctctcgaaaaggaaaaccaccatctttcttttaaggctgttcctgggcctggcgggggaggcaggggtgagaggatggaattgtgtgcacaagaactgtggctattttaatatataacgttagaggctgcgttctttgtcgccgcctcccctgtgtgccagccctgtgtgcacggcctctgccccccggcctttgctgtggctggagctggacagtgcagtgactgcgaccgtgggggagccaggtcgcccttttggcagctgctaggctgaggctgcatggacaggaacaccaggcaccctccgtgtgcttctgagctgaggttgcttcacgggaccgtggcttccttcctcacctggctctgcctcccccgtgctctcgggcgaagtgggttcttgtgccttcccctcccgggcccaggctccccgtgcgcgggccctgccctttcctcccgcgccccaccggctccgacgcgcaaccccgctcagcagtcacagaagcagggcccagccaccttggtctttttttgggagttcaggggagtaggagaatgtcttccagaaaaatacataagctagtttctgttctgtaaagtgatatctttcatacttgaccaaagttcccaataacttcccaaccactgttcaaaagctgtgatttttgtctccccttcccaccctccagccaaggagcagccctgcccagggggcattaggtgtgggtacccggggagcaccccgttcctggaccccagtgttgcatttcctggctgaggaagggtggtcatcccagctcctgccctaccctctcacttaactggagctttgggacgcaccctccacagtgggaggtggtggtgggtggcggtggcggggcctcacgacagcttggtgctggtaagaggaagcccgtggttctggctaggctctcatgtccagacagcggggaccaggggaaaacccagccccttctgtaatcccccttcatttcctaccttccttcctcctctgtttagcaaaggagggcagctcacttggatgtccttacaacgcccctggccccaggttgagcaataagaaaccagaaccttgcggcccagtggcccgggccagttcaggccgcctccccctcctctgcctggggccattgagcccagcctccagggcccgggtgcgtttgcaggccagtggccactgtccgggctgtgatggcaccaaggcaggtggagcaccaggtaccacacagctgggcttcccaccaggctttcccgcgggggtctcagggagcttctccccagcgctgctcggagtctgcaggaactggccttgttctccttagcccgtcactccatacagtattaggtgaggatggatgcgggcgctgtccttgccgggaagtcactgttgaagttgcagtggcttgttcacacctgtgggaagagaagtgaagactttctccttgcattaaaaagtctgaactgtgaaaaaaaaaaaaaaaaaaaaaaactccggagggaatttatattgttggggggcggagaaaaagagagggtatgagaaggggcaaggggctcattagttggttccctggaccaaggttttttggtacaagggggaaaatttggccgggtccccccaattaggggaagtcgatattaaatttcgagatataagccacaggttaaccttgggttatatggaattcggaaaacnctgaaaag

SEQ ID NO: 458973 - DNA, 2423 bp, Homo sapiens
tcctgcctcttcctgccagtcggtaccctgtctcagtacacatcgactcactcctctggctcctcccatcctcactgccccgaaacgccgccctcaggaagctcaatgacctgatcaagcgggcacggctggccaaggttcacgcctacatcatcagctccctcaagaaagagatgcccaatgtctttggtaaagagagcaaaaagaaagagctggtgaacaacctgggagagatctaccagaagattgagcgcgagcaccagatctcccctggggacttcccgagcctccgcaagatgcaggaactcctgcagacccaggacttcagcaagttccaggcgctgaagcccaagctgctggacacggtggatgacatgctggccaacgacatcgcgcggctgatggtgatggtgcggcaggaggagtccctgatgccttcccaggtggtcaagggcggcgcctttgacggcaccatgaacgggccgttcgggcacggctacggcgagggggccggcgagggcatcgacgacgtggagtgggtggtgggcaaggacaagcccacctacgacgagatcttctacacgctgtcccctgtcaacggcaagatcacgggcgccaacgccaagaaggagatggtgaagtccaagctccccaacaccgtgctagggaagatctggaagctggccgacgtggacaaggacgggctgctggacgacgaggagttcgcgctggccaaccacctcatcaaggtcaagctggagggccacgagctgcccgccgacctgcccccgcacctggtgccgccctccaagcgcagacatgagtgatggcgcccggccccgcacctgccatttgcacgcccggccgggaggcagagacggggggaggggaagcctcaccatttctcaaggtccataaagactgagcggatgtttcctcgcctctcgaaaaggaaaaccaccatctttcttttaaggctgttcctgggcctggcgggggaggcaggggtgagaggatggaattgtgtgcacaagaactgtggctattttaatatataacgttagaggctgcgttctttgtcgccgcctcccctgtgtgccagccctgtgtgcacggcctctgccccccggcctttgctgtggctggagctggacagtgcagtgactgcgaccgtgggggagccaggtcgcccttttggcagctgctaggctgaggctgcatggacaggaacaccaggcaccctccgtgtgcttctgagctgaggttgcttcacgggaccgtggcttccttcctcacctggctctgcctcccccgtgctctcgggcgaagtgggttcttgtgccttcccctcccgggcccaggctccccgtgcgcgggccctgccctttcctcccgcgccccaccggctccgacgcgcaaccccgctcagcagtcacagaagcagggcccagccaccttggtctttttttgggagttcaggggagtaggagaatgtcttccagaaaaatacataagctagtttctgttctgtaaagtgatatctttcatacttgaccaaagttcccaataacttcccaaccactgttcaaaagctgtgatttttgtctccccttcccaccctccagccaaggagcagccctgcccagggggcattaggtgtgggtacccggggagcaccccgttcctggaccccagtgttgcatttcctggctgaggaagggtggtcatcccagctcctgccctaccctctcacttaactggagctttgggacgcaccctccacagtgggaggtggtggtgggtggcggtggcggggcctcacgacagcttggtgctggtaagaggaagcccgtggttctggctaggctctcatgtccagacagcggggaccaggggaaaacccagccccttctgtaatcccccttcatttcctaccttccttcctcctctgtttagcaaaggagggcagctcacttggatgtccttacaacgcccctggccccaggttgagcaataagaaaccagaaccttgcggcccagtggcccgggccagttcaggccgcctccccctcctctgcctggggccattgagcccagcctccagggcccgggtgcgtttgcaggccagtggccactgtccgggctgtgatggcaccaaggcaggtggagcaccaggtaccacacagctgggcttcccaccaggctttcccgcgggggtctcagggagcttctccccagcgctgctcggagtctgcaggaactggccttgttctccttagcccgtcactccatacagtattaggtgaggatggatgcgggcgctgtccttgccgggaagtcactgttgaagttgcagtggcttgttcacacctgtgggaagagaagtgaagactttctccttgcattaaaaagtctgaactgtg

SEQ ID NO: 458974 - DNA, 3376 bp, Homo sapiens
ggaagacgtggcaccagtcggaggggcggggctgggaggggctcctccctaccgcccccaattccgccctgcccccgccgcggcggcgctagccgccactgagggaccgaccctataaaggccgctccgcgaggggtgcgcagcattcggcagagggcgcttcgacgggctgggctgtgcgcctgcgcagtgtgggtcgctcccgattccctgccccggccggccccgcctcggctccgcaccctcgccccgctctcagccgccgctctgccccgcagcagccagccccgtgtccggcagtatgttcagctgggtcagcaaggatgcccgccgcaagaaggagccggagctcttccagacggtggccgaggggctgcggcagctgtacgcgcagaagctgctacccctggaggagcactaccgcttccacgagttccactcgcccgcgctggaggacgctgacttcgacaacaagcctatggtgctcctcgtggggcagtacagcacgggcaagaccaccttcatccgacacctgatcgagcaggacttcccggggatgcgcatcgggcccgagcccaccaccgactccttcatcgccgtcatgcacggccccactgagggcgtggtgccgggcaacgcgctcgtggtggacccgcggcgccccttccgcaagctcaacgcgtttggcaacgctttcctcaacaggttcatgtgtgcccagctgcccaaccccgtcctggacagcatcagcatcatcgacacccccgggatcctgtctggagagaagcagcggatcagcagaggctatgactttgcagccgtcctggagtggttcgcggagcgtgtggaccgcatcatcctgctcttcgacgcccacaagctggacatctccgatgagttctcggaagtgatcaaggctctgaagaaccatgaggacaagatccgcgtggtgctgaacaaggcagaccagatcgagacgcagcagctgatgcgggtgtacggggccctcatgtggtccctgggcaagatcatcaacacccccgaggtggtcagggtctacatcggctccttctggtcccacccgctcctcatccccgacaaccgcaagctctttgaggccgaggagcaggacctcttcaaggacatccagtcactgccccgaaacgccgccctcaggaagctcaatgacctgatcaagcgggcacggctggccaaggttcacgcctacatcatcagctccctcaagaaagagatgcccaatgtctttggtaaagagagcaaaaagaaagagctggtgaacaacctgggagagatctaccagaagattgagcgcgagcaccagatctcccctggggacttcccgagcctccgcaagatgcaggaactcctgcagacccaggacttcagcaagttccaggcgctgaagcccaagctgctggacacggtggatgacatgctggccaacgacatcgcgcggctgatggtgatggtgcggcaggaggagtccctgatgccttcccaggtggtcaagggcggcgcctttgacggcaccatgaacgggccgttcgggcacggctacggcgagggggccggcgagggcatcgacgacgtggagtgggtggtgggcaaggacaagcccacctacgacgagatcttctacacgctgtcccctgtcaacggcaagatcacgggcgccaacgccaagaaggagatggtgaagtccaagctccccaacaccgtgctagggaagatctggaagctggccgacgtggacaaggacgggctgctggacgacgaggagttcgcgctggccaaccacctcatcaaggtcaagctggagggccacgagctgcccgccgacctgcccccgcacctggtgccgccctccaagcgcagacatgagtgatggcgcccggccccgcacctgccatttgcacgcccggccgggaggcagagacggggggaggggaagcctcaccatttctcaaggtccataaagactgagcggatgtttcctcgcctctcgaaaaggaaaaccaccatctttcttttaaggctgttcctgggcctggcgggggaggcaggggtgagaggatggaattgtgtgcacaagaactgtggctattttaatatataacgttagaggctgcgttctttgtcgccgcctcccctgtgtgccagccctgtgtgcacggcctctgccccccggcctttgctgtggctggagctggacagtgcagtgactgcgaccgtgggggagccaggtcgcccttttggcagctgctaggctgaggctgcatggacaggaacaccaggcaccctccgtgtgcttctgagctgaggttgcttcacgggaccgtggcttccttcctcacctggctctgcctcccccgtgctctcgggcgaagtgggttcttgtgccttcccctcccgggcccaggctccccgtgcgcgggccctgccctttcctcccgcgccccaccggctccgacgcgcaaccccgctcagcagtcacagaagcagggcccagccaccttggtctttttttgggagttcaggggagtaggagaatgtcttccagaaaaatacataagctagtttctgttctgtaaagtgatatctttcatacttgaccaaagttcccaataacttcccaaccactgttcaaaagctgtgatttttgtctccccttcccaccctccagccaaggagcagccctgcccagggggcattaggtgtgggtacccggggagcaccccgttcctggaccccagtgttgcatttcctggctgaggaagggtggtcatcccagctcctgccctaccctctcacttaactggagctttgggacgcaccctccacagtgggaggtggtggtgggtggcggtggcggggcctcacgacagcttggtgctggtaagaggaagcccgtggttctggctaggctctcatgtccaggttgagcaataagaaaccagaaccttgcggcccagtggcccgggccagttcaggccgcctccccctcctctgcctggggccattgagcccagcctccagggcccgggtgcgtttgcaggccagtggccactgtccgggctgtgatggcaccaaggcaggtggagcaccaggtaccacacagctgggcttcccaccaggctttcccgcgggggtctcagggagcttctccccagcgctgctcggagtctgcaggaactggccttgttctccttagcccgtcactccatacagtattaggtgaggatggatgcgggcgctgtccttgccgggaagtcactgttgaagttgcagtggcttgttcacacctgtgggaagagaagtgaagactttctccttgcattaaaaagtctgaactgtg

SEQ ID NO: 458975 - DNA, 3347 bp, Homo sapiens
ggaagacgtggcaccagtcggaggggcggggctgggaggggctcctccctaccgcccccaattccgccctgcccccgccgcggcggcgctagccgccactgagggaccgaccctataaaggccgctccgcgaggggtgcgcagcattcggcagagggcgcttcgacgggctgggctgtgcgcctgcgcagtgtgggtcgctcccgattccctgccccggccggccccgcctcggctccgcaccctcgccccgctctcagccgccgctctgccccgcagcagccagccccgtgtccggcagtatgttcagctgggtcagcaaggatgcccgccgcaagaaggagccggagctcttccagacggtggccgaggggctgcggcagctgtacgcgcagaagctgctacccctggaggagcactaccgcttccacgagttccactcgcccgcgctggaggacgctgacttcgacaacaagcctatggtgctcctcgtggggcagtacagcacgggcaagaccaccttcatccgacacctgatcgagcaggacttcccggggatgcgcatcgggcccgagcccaccaccgactccttcatcgccgtcatgcacggccccactgagggcgtggtgccgggcaacgcgctcgtggtggacccgcggcgccccttccgcaagctcaacgcgtttggcaacgctttcctcaacaggttcatgtgtgcccagctgcccaaccccgtcctggacagcatcagcatcatcgacacccccgggatcctgtctggagagaagcagcggatcagcagaggctatgactttgcagccgtcctggagtggttcgcggagcgtgtggaccgcatcatcctgctcttcgacgcccacaagctggacatctccgatgagttctcggaagtgatcaaggctctgaagaaccatgaggacaagatccgcgtggtgctgaacaaggcagaccagatcgagacgcagcagctgatgcgggtgtacggggccctcatgtggtccctgggcaagatcatcaacacccccgaggtggtcagggtctacatcggctccttctggtcccacccgctcctcatccccgacaaccgcaagctctttgaggccgaggagcaggacctcttcaaggacatccagtcactgccccgaaacgccgccctcaggaagctcaatgacctgatcaagcgggcacggctggccaaggttcacgcctacatcatcagctccctcaagaaagagatgcccaatgtctttggtaaagagagcaaaaagaaagagctggtgaacaacctgggagagatctaccagaagattgagcgcgagcaccagatctcccctggggacttcccgagcctccgcaagatgcaggaactcctgcagacccaggacttcagcaagttccaggcgctgaagcccaagctgctggacacggtggatgacatgctggccaacgacatcgcgcggctgatggtgatggtgcggcaggaggagtccctgatgccttcccaggtggtcaagggcggcgcctttgacggcaccatgaacgggccgttcgggcacggctacggcgagggggccggcgagggcatcgacgacgtggagtgggtggtgggcaaggacaagcccacctacgacgagatcttctacacgctgtcccctgtcaacggcaagatcacgggcgccaacgccaagaaggagatggtgaagtccaagctccccaacaccgtgctagggaagatctggaagctggccgacgtggacaaggacgggctgctggacgacgaggagttcgcgctggccaaccacctcatcaaggtcaagctggagggccacgagctgcccgccgacctgcccccgcacctggtgccgccctccaagcgcagacatgagtgatggcgcccggccccgcacctgccatttgcacgcccggccgggaggcagagacggggggaggggaagcctcaccatttctcaaggtccataaagactgagcggatgtttcctcgcctctcgaaaaggaaaaccaccatctttcttttaaggctgttcctgggcctggcgggggaggcaggggtgagaggatggaattgtgtgcacaagaactgtggctattttaatatataacgttagaggctgcgttctttgtcgccgcctcccctgtgtgccagccctgtgtgcacggcctctgccccccggcctttgctgtggctggagctggacagtgcagtgactgcgaccgtgggggagccaggtcgcccttttggcagctgctaggctgaggctgcatggacaggaacaccaggcaccctccgtgtgcttctgagctgaggttgcttcacgggaccgtggcttccttcctcacctggctctgcctcccccgtgctctcgggcgaagtgggttcttgtgccttcccctcccgggcccaggctccccgtgcgcgggccctgccctttcctcccgcgccccaccggctccgacgcgcaaccccgctcagcagtcacagaagcagggcccagccaccttggtctttttttgggagttcaggggagtaggagaatgtcttccagaaaaatacataagctagtttctgttctgtaaagtgatatctttcatacttgaccaaagttcccaataacttcccaaccactgttcaaaagctgtgatttttgtctccccttcccaccctccagccaaggagcagccctgcccagggggcattaggtgtgggtacccggggagcaccccgttcctggaccccagtgttgcatttcctggctgaggaagggtggtcatcccagctcctgccctaccctctcacttaactggagctttgggacgcaccctccacagtgggaggtggtggtgggtggcggtggcggggcctcacgacagcttggtgctggtaagaggaagcccgtggttctggctaggctctcatgtccagacagcggggaccaggggaaaacccagccccttctgtaatcccccttcatttcctaccttccttcctcctctgtttagcaaaggagggcagctcacttggattgtccgggctgtgatggcaccaaggcaggtggagcaccaggtaccacacagctgggcttcccaccaggctttcccgcgggggtctcagggagcttctccccagcgctgctcggagtctgcaggaactggccttgttctccttagcccgtcactccatacagtattaggtgaggatggatgcgggcgctgtccttgccgggaagtcactgttgaagttgcagtggcttgttcacacctgtgggaagagaagtgaagactttctccttgcattaaaaagtctgaactgtg

SEQ ID NO: 458976 - DNA, 2611 bp, Homo sapiens
ggaagacgtggcaccagtcggaggggcggggctgggaggggctcctccctaccgcccccaattccgccctgcccccgccgcggcggcgctagccgccactgagggaccgaccctataaaggccgctccgcgaggggtgcgcagcattcggcagagggcgcttcgacgggctgggctgtgcgcctgcgcagtgtgggtcgctcccgattccctgccccggccggccccgcctcggctccgcaccctcgccccgctctcagccgccgctctgccccgcagcagccagccccgtgtccggcagtatgttcagctgggtcagcaaggatgcccgccgcaagaaggagccggagctcttccagacggtggccgaggggctgcggcagctgtacgcgcagaagctgctacccctggaggagcactaccgcttccacgagttccactcgcccgcgctggaggacgctgacttcgacaacaagcctatggtgctcctcgtggggcagtacagcacgggcaagaccaccttcatccgacacctgatcgagcaggacttcccggggatgcgcatcgggcccgagcccaccaccgactccttcatcgccgtcatgcacggccccactgagggcgtggtgccgggcaacgcgctcgtggtggacccgcggcgccccttccgcaagctcaacgcgtttggcaacgctttcctcaacaggttcatgtgtgcccagctgcccaaccccgtcctggacagcatcagcatcatcgacacccccgggatcctgtctggagagaagcagcggatcagcagaggctatgactttgcagccgtcctggagtggttcgcggagcgtgtggaccgcatcatcctgctcttcgacgcccacaagctggacatctccgatgagttctcggaagtgatcaaggctctgaagaaccatgaggacaagatccgcgtggtgctgaacaaggcagaccagatcgagacgcagcagctgatgcgggtgtacggggccctcatgtggtccctgggcaagatcatcaacacccccgaggtggtcagggtctacatcggctccttctggtcccacccgctcctcatccccgacaaccgcaagctctttgaggccgaggagcaggacctcttcaaggacatccagtcactgccccgaaacgccgccctcaggaagctcaatgacctgatcaagcgggcacggctggccaaggttcacgcctacatcatcagctccctcaagaaagagatgcccaatgtctttggtaaagagagcaaaaagaaagagctggtgaacaacctgggagagatctaccagaagattgagcgcgagcaccagatctcccctggggacttcccgagcctccgcaagatgcaggaactcctgcagacccaggacttcagcaagttccaggcgctgaagcccaagctgctggacacggtggatgacatgctggccaacgacatcgcgcggctgatggtgatggtgcggcaggaggagtccctgatgccttcccaggtggtcaagggcggcgcctttgacggcaccatgaacgggccgttcgggcacggctacggcgagggggccggcgagggcatcgacgacgtggagtgggtggtgggcaaggacaagcccacctacgacgagatcttctacacgctgtcccctgtcaacggcaagatcacgggcgccaacgccaagaaggagatggtgaagtccaagctccccaacaccgtgctagggaagatctggaagctggccgacgtggacaaggacgggctgctggacgacgaggagttcgcgctggccaaccacctcatcaaggtcaagctggagggccacgagctgcccgccgacctgcccccgcacctggtgccgccctccaagcgcagacatgagtgatggcgcccggccccgcacctgccatttgcacgcccggccgggaggcagagacggggggaggggaagcctcaccatttctcaaggtccataaagactgagcggatgtttcctcgcctctcgaaaaggaaaaccaccatctttcttttaaggctgttcctgggcctggcgggggaggcaggggtgagaggatggaattgtgtgcacaagaactgtggctattttaatatataacgttagaggctgcgttctttgtcgccgcctcccctgtgtgccagccctgtgtgcacggcctctgccccccggcctttgctgtggctggagctggacagtgcagtgactgcgaccgtgggggagccaggtcgcccttttggcagctgctaggctgaggctgcatggacaggaacaccaggcaccctccgtgtgcttctgagctgaggttgcttcacgggaccgtggcttccttcctcacctggctctgcctcccccgtgctctcgggcgaagtgggttcttgtgccttcccctcccgggcccaggctccccgtgcgcgggccctgccctttcctcccgcgccccaccggctccgacgcgcaaccccgctcagcagtcacagaagcagggcccagccaccttggtctttttttgggagttcaggggagtaggagaatgtcttccagaaaaatacataagctagtttctgttctgta

SEQ ID NO: 458977 - DNA, 1616 bp, Homo sapiens
ggaagacgtggcaccagtcggaggggcggggctgggaggggctcctccctaccgcccccaattccgccctgcccccgccgcggcggcgctagccgccactgagggaccgaccctataaaggccgctccgcgaggggtgcgcagcattcggcagagggcgcttcgacgggctgggctgtgcgcctgcgcagtgtgggtcgctcccgattccctgccccggccggccccgcctcggctccgcaccctcgccccgctctcagccgccgctctgccccgcagcagccagccccgtgtccggcagtatgttcagctgggtcagcaaggatgcccgccgcaagaaggagccggagctcttccagacggtggccgaggggctgcggcagctgtacgcgcagaagctgctacccctggaggagcactaccgcttccacgagttccactcgcccgcgctggaggacgctgacttcgacaacaagcctatggtgctcctcgtggggcagtacagcacgggcaagaccaccttcatccgacacctgatcgagcaggacttcccggggatgcgcatcgggcccgagcccaccaccgactccttcatcgccgtcatgcacggccccactgagggcgtggtgccgggcaacgcgctcgtggtggacccgcggcgccccttccgcaagctcaacgcgtttggcaacgctttcctcaacaggttcatgtgtgcccagctgcccaaccccgtcctggacagcatcagcatcatcgacacccccgggatcctgtctggagagaagcagcggatcagcagaggctatgactttgcagccgtcctggagtggttcgcggagcgtgtggaccgcatcatcctgctcttcgacgcccacaagctggacatctccgatgagttctcggaagtgatcaaggctctgaagaaccatgaggacaagatccgcgtggtgctgaacaaggcagaccagatcgagacgcagcagctgatgcgggtgtacggggccctcatgtggtccctgggcaagatcatcaacacccccgaggtggtcagggtctacatcggctccttctggtcccacccgctcctcatccccgacaaccgcaagctctttgaggccgaggagcaggacctcttcaaggacatccagtcactgccccgaaacgccgccctcaggaagctcaatgacctgatcaagcgggcacggctggccaaggtagaccctggggtgaggggagcagcctattgccaggcagggccatggggctctgagactggcactcagggccccaggattgcccgagacccttcccagctcacttcacaggcagacctgcactgcgctgtttccctctatagaaaccagtctttggtcagcacccgcgtgcagcctgctcttaactaagattctctacccggcctccctctaaacctgttctgtttgtggtttataccccatctactttcaggaagggtttgactgtgcttacaacacagaaacactacttgggaggctgagacaggagaatcacttgaacccaggagggagaggttgcagtgagctgagatcacaccactgcactccatcccaggtggcagagcaagactctgtctca

SEQ ID NO: 458978 - DNA, 848 bp, Homo sapiens
ggaagacgtggcaccagtcggaggggcggggctgggaggggctcctccctaccgcccccaattccgccctgcccccgccgcggcggcgctagccgccactgagggaccgaccctataaaggccgctccgcgaggggtgcgcagcattcggcagagggcgcttcgacgggctgggctgtgcgcctgcgcagtgtgggtcgctcccgattccctgccccggccggccccgcctcggctccgcaccctcgccccgctctcagccgccgctctgccccgcagcagccagccccgtgtccggcagtatgttcagctgggtcagcaaggatgcccgccgcaagaaggagccggagctcttccagacggtggccgaggggctgcggcagctgtacgcgcagaagctgctacccctggaggagcactaccgcttccacgagttccactcgcccgcgctggaggacgctgacttcgacaacaagcctatggtgctcctcgtggggcagtacagcacgggcaagaccaccttcatccgacacctgatcgagcaggacttcccggggatgcgcatcgggcccgagcccaccaccgactccttcatcgccgtcatgcacggccccactgagggcgtggtgccgggcaacgcgctcgtggtggacccgcggcgccccttccgcaagctcaacgcgttactggccttgttctccttagcccgtcactccatacagtattaggtgaggatggatgcgggcgctgtccttgccgggaagtcactgttgaagttgcagtggcttgttcacacctgtgggaagagaagtgaagactttctccttgcattaaaaagtctgaactgtg

SEQ ID NO: 458979 - DNA, 1754 bp, Homo sapiens
aactgttctgaaaagtttatttttaaaaaacttagagagagagagagagagaatcaaaataacctatgaagatttatagaaaacacaccaggtaaggaagggttctttcaaagcaaccacaggaacagttacgataacttaaaaagaaatgctttccacactgaactgacagcgctgcagaccacgcctgagtggggacggcagccccaagcccaggggcaagcgcccacaggctggacccaggccaggcacacctggggagtctcttactgctgaaaacctcagccatctcacttcatgtacttatcctgctggtcagccaggattttggcggaggacttggcatcatagaaaagttcactgatctcttcgacatgctctttctcaatgctgtccttcccgttgattttagcaagcaagttggccggggtcagcagctgcactgagtacctcagtgtggtcttggtgccaatctcccccaggtggttcagtgcctcctcactgatgttgattccttccgtctgggcacggattttaatgatctgtttcatttcctgtggagtatacagcatggtccggattatcatcactcggtccagaaggtcaagagggatgccgtgaggggatgtgatgtcctcagtgcctctgatgacacagttgcctcggttggatgcaaagatgacgatgggagcgatagaagactccagggcgcggtgcaggtaggtgaagcactcaatgtccagcatgtggacctcatcaacaaacagcacacccgggaccagctcagcaatgccctggtcgatgtacttgttcaccaccttaatgtcttccagaaaaatacataagctagtttctgttctgtaaagtgatatctttcatacttgaccaaagttcccaataacttcccaaccactgttcaaaagctgtgatttttgtctccccttcccaccctccagccaaggagcagccctgcccagggggcattaggtgtgggtacccggggagcaccccgttcctggaccccagtgttgcatttcctggctgaggaagggtggtcatcccagctcctgccctaccctctcacttaactggagctttgggacgcaccctccacagtgggaggtggtggtgggtggcggtggcggggcctcacgacagcttggtgctggtaagaggaagcccgtggttctggctaggctctcatgtccagacagcggggaccaggggaaaacccagccccttctgtaatcccccttcatttcctaccttccttcctcctctgtttagcaaaggagggcagctcacttggatgtccttacaacgcccctggccccaggttgagcaataagaaaccagaaccttgcggcccagtggcccgggccagttcaggccgcctccccctcctctgcctggggccattgagcccagcctccagggcccgggtgcgtttgcaggccagtggccactgtccgggctgtgatggcaccaaggcaggtggagcaccaggtaccacacagctgggcttcccaccaggctttcccgcgggggtctcagggagcttctccccagcgctgctcggagtctgcaggaactggccttgttctccttagcccgtcactccatacagtattaggtgaggatggatgcgggcgctgtccttgccgggaagtcactgttgaagttgcagtggcttgttcacacctgtgggaagagaagtgaagactttctccttgcattaaaaagtctgaactgtg

SEQ ID NO: 458980 - DNA, 3791 bp, Homo sapiens
gtagcttgtgtgctttactatgatgaaaagaatcaaatcaaagcactaaggggcgtaagattgcaggcagggttggaattacttatccgctctccaatggttagggagcaagaggggagggcaagggaactatctattccctcggaagggatcttacaagcggtaggcgaacaaacctcccatcgtgtcctctctagattccaccagactcagttcccctgagatatcccccgttctcagatttgagttcctgcctcttcctcttagcctaccagcccaagttatcccctgatacaggcccctagccctccaggcttccacatctcccagaagcgaggaagttggacctgaggctttcaaagtcgcaggttcaattcagatctctttaagagcccccagggtcctgctaccacaggttggtgtcttgatactggttacataacaatcagtccccaaagctctgacatcacccactgaagattctcaccagcctggacagccaaaggggtctgtgtgtggccggggaggatggcgggggagtgagccccatggaacagccaggaactgcagccagccccgtgtccggcagtatgttcagctgggtcagcaaggatgcccgccgcaagaaggagccggagctcttccagacggtggccgaggggctgcggcagctgtacgcgcagaagctgctacccctggaggagcactaccgcttccacgagttccactcgcccgcgctggaggacgctgacttcgacaacaagcctatggtgctcctcgtggggcagtacagcacgggcaagaccaccttcatccgacacctgatcgagcaggacttcccggggatgcgcatcgggcccgagcccaccaccgactccttcatcgccgtcatgcacggccccactgagggcgtggtgccgggcaacgcgctcgtggtggacccgcggcgccccttccgcaagctcaacgcgtttggcaacgctttcctcaacaggttcatgtgtgcccagctgcccaaccccgtcctggacagcatcagcatcatcgacacccccgggatcctgtctggagagaagcagcggatcagcagaggctatgactttgcagccgtcctggagtggttcgcggagcgtgtggaccgcatcatcctgctcttcgacgcccacaagctggacatctccgatgagttctcggaagtgatcaaggctctgaagaaccatgaggacaagatccgcgtggtgctgaacaaggcagaccagatcgagacgcagcagctgatgcgggtgtacggggccctcatgtggtccctgggcaagatcatcaacacccccgaggtggtcagggtctacatcggctccttctggtcccacccgctcctcatccccgacaaccgcaagctctttgaggccgaggagcaggacctcttcaaggacatccagtcactgccccgaaacgccgccctcaggaagctcaatgacctgatcaagcgggcacggctggccaaggttcacgcctacatcatcagctccctcaagaaagagatgcccaatgtctttggtaaagagagcaaaaagaaagagctggtgaacaacctgggagagatctaccagaagattgagcgcgagcaccagatctcccctggggacttcccgagcctccgcaagatgcaggaactcctgcagacccaggacttcagcaagttccaggcgctgaagcccaagctgctggacacggtggatgacatgctggccaacgacatcgcgcggctgatggtgatggtgcggcaggaggagtccctgatgccttcccaggtggtcaagggcggcgcctttgacggcaccatgaacgggccgttcgggcacggctacggcgagggggccggcgagggcatcgacgacgtggagtgggtggtgggcaaggacaagcccacctacgacgagatcttctacacgctgtcccctgtcaacggcaagatcacgggcgccaacgccaagaaggagatggtgaagtccaagctccccaacaccgtgctagggaagatctggaagctggccgacgtggacaaggacgggctgctggacgacgaggagttcgcgctggccaaccacctcatcaaggtcaagctggagggccacgagctgcccgccgacctgcccccgcacctggtgccgccctccaagcgcagacatgagtgatggcgcccggccccgcacctgccatttgcacgcccggccgggaggcagagacggggggaggggaagcctcaccatttctcaaggtccataaagactgagcggatgtttcctcgcctctcgaaaaggaaaaccaccatctttcttttaaggctgttcctgggcctggcgggggaggcaggggtgagaggatggaattgtgtgcacaagaactgtggctattttaatatataacgttagaggctgcgttctttgtcgccgcctcccctgtgtgccagccctgtgtgcacggcctctgccccccggcctttgctgtggctggagctggacagtgcagtgactgcgaccgtgggggagccaggtcgcccttttggcagctgctaggctgaggctgcatggacaggaacaccaggcaccctccgtgtgcttctgagctgaggttgcttcacgggaccgtggcttccttcctcacctggctctgcctcccccgtgctctcgggcgaagtgggttcttgtgccttcccctcccgggcccaggctccccgtgcgcgggccctgccctttcctcccgcgccccaccggctccgacgcgcaaccccgctcagcagtcacagaagcagggcccagccaccttggtctttttttgggagttcaggggagtaggagaatgtcttccagaaaaatacataagctagtttctgttctgtaaagtgatatctttcatacttgaccaaagttcccaataacttcccaaccactgttcaaaagctgtgatttttgtctccccttcccaccctccagccaaggagcagccctgcccagggggcattaggtgtgggtacccggggagcaccccgttcctggaccccagtgttgcatttcctggctgaggaagggtggtcatcccagctcctgccctaccctctcacttaactggagctttgggacgcaccctccacagtgggaggtggtggtgggtggcggtggcggggcctcacgacagcttggtgctggtaagaggaagcccgtggttctggctaggctctcatgtccagacagcggggaccaggggaaaacccagccccttctgtaatcccccttcatttcctaccttccttcctcctctgtttagcaaaggagggcagctcacttggatgtccttacaacgcccctggccccaggttgagcaataagaaaccagaaccttgcggcccagtggcccgggccagttcaggccgcctccccctcctctgcctggggccattgagcccagcctccagggcccgggtgcgtttgcaggccagtggccactgtccgggctgtgatggcaccaaggcaggtggagcaccaggtaccacacagctgggcttcccaccaggctttcccgcgggggtctcagggagcttctccccagcgctgctcggagtctgcaggaactggccttgttctccttagcccgtcactccatacagtattaggtgaggatggatgcgggcgctgtccttgccgggaagtcactgttgaagttgcagtggcttgttcacacctgtgggaagagaagtgaagactttctccttgcattaaaaagtctgaactgtg

SEQ ID NO: 458981 - DNA, 3657 bp, Homo sapiens
atttcttccagtctcagcctttctaaaaaaaaaaatgtggccgggcacggtggctcgcgcttgtactcccaaagtactaggattacaggcgtgagccaccacgcctggcctttcagagaacttttcaaaggagctttttctgcgtccagtgaaggatccctgctctcaactgagactgccccttgcctttctgggctgttctaagcttagtgtgaaactcagatatgcgtggctgagccctggcccgcaagtcgccagcctctccacggctttgttcttcctcagcctgctcggactttcagagaatggcgcgtctgtgcttctccgtcccaccgtctaccagcctgtgtggtccccagcttttgccagccgtccatttcaattccctcacccaagcggctggttgaaagggcagggctggccctagcagcagtaggaagcggccagctctcttcagtgtggagatttagccaagtgctggaggattctgagatgggatttcagcgccccagcgtgaccttctgcttcccctccgaactgaatggtgacctaggcttgcacagttttcactaacaagtcagcagcttgaaagttgacctctcaaactctaggggaaaagtgtgtgaggaagtgctgatttgggtcagtttgagcctgctggttgcattcccagttgagaaagtccatacgatttgccggccaccccgggaaactaagacgatagaaaaccacctgtcagttccccgctgctggagaggaagccagagatggagcgaaggagtacagagagccctttgttgtgtccggagcagtgatgactgtgtcttgacgcctctcttctggctcttgctctcatgtaggttcatgtgtgcccagctgcccaaccccgtcctggacagcatcagcatcatcgacacccccgggatcctgtctggagagaagcagcggatcagcagaggctatgactttgcagccgtcctggagtggttcgcggagcgtgtggaccgcatcatcctgctcttcgacgcccacaagctggacatctccgatgagttctcggaagtgatcaaggctctgaagaaccatgaggacaagatccgcgtggtgctgaacaaggcagaccagatcgagacgcagcagctgatgcgggtgtacggggccctcatgtggtccctgggcaagatcatcaacacccccgaggtggtcagggtctacatcggctccttctggtcccacccgctcctcatccccgacaaccgcaagctctttgaggccgaggagcaggacctcttcaaggacatccagtcactgccccgaaacgccgccctcaggaagctcaatgacctgatcaagcgggcacggctggccaaggttcacgcctacatcatcagctccctcaagaaagagatgcccaatgtctttggtaaagagagcaaaaagaaagagctggtgaacaacctgggagagatctaccagaagattgagcgcgagcaccagatctcccctggggacttcccgagcctccgcaagatgcaggaactcctgcagacccaggacttcagcaagttccaggcgctgaagcccaagctgctggacacggtggatgacatgctggccaacgacatcgcgcggctgatggtgatggtgcggcaggaggagtccctgatgccttcccaggtggtcaagggcggcgcctttgacggcaccatgaacgggccgttcgggcacggctacggcgagggggccggcgagggcatcgacgacgtggagtgggtggtgggcaaggacaagcccacctacgacgagatcttctacacgctgtcccctgtcaacggcaagatcacgggcgccaacgccaagaaggagatggtgaagtccaagctccccaacaccgtgctagggaagatctggaagctggccgacgtggacaaggacgggctgctggacgacgaggagttcgcgctggccaaccacctcatcaaggtcaagctggagggccacgagctgcccgccgacctgcccccgcacctggtgccgccctccaagcgcagacatgagtgatggcgcccggccccgcacctgccatttgcacgcccggccgggaggcagagacggggggaggggaagcctcaccatttctcaaggtccataaagactgagcggatgtttcctcgcctctcgaaaaggaaaaccaccatctttcttttaaggctgttcctgggcctggcgggggaggcaggggtgagaggatggaattgtgtgcacaagaactgtggctattttaatatataacgttagaggctgcgttctttgtcgccgcctcccctgtgtgccagccctgtgtgcacggcctctgccccccggcctttgctgtggctggagctggacagtgcagtgactgcgaccgtgggggagccaggtcgcccttttggcagctgctaggctgaggctgcatggacaggaacaccaggcaccctccgtgtgcttctgagctgaggttgcttcacgggaccgtggcttccttcctcacctggctctgcctcccccgtgctctcgggcgaagtgggttcttgtgccttcccctcccgggcccaggctccccgtgcgcgggccctgccctttcctcccgcgccccaccggctccgacgcgcaaccccgctcagcagtcacagaagcagggcccagccaccttggtctttttttgggagttcaggggagtaggagaatgtcttccagaaaaatacataagctagtttctgttctgtaaagtgatatctttcatacttgaccaaagttcccaataacttcccaaccactgttcaaaagctgtgatttttgtctccccttcccaccctccagccaaggagcagccctgcccagggggcattaggtgtgggtacccggggagcaccccgttcctggaccccagtgttgcatttcctggctgaggaagggtggtcatcccagctcctgccctaccctctcacttaactggagctttgggacgcaccctccacagtgggaggtggtggtgggtggcggtggcggggcctcacgacagcttggtgctggtaagaggaagcccgtggttctggctaggctctcatgtccagacagcggggaccaggggaaaacccagccccttctgtaatcccccttcatttcctaccttccttcctcctctgtttagcaaaggagggcagctcacttggatgtccttacaacgcccctggccccaggttgagcaataagaaaccagaaccttgcggcccagtggcccgggccagttcaggccgcctccccctcctctgcctggggccattgagcccagcctccagggcccgggtgcgtttgcaggccagtggccactgtccgggctgtgatggcaccaaggcaggtggagcaccaggtaccacacagctgggcttcccaccaggctttcccgcgggggtctcagggagcttctccccagcgctgctcggagtctgcaggaactggccttgttctccttagcccgtcactccatacagtattaggtgaggatggatgcgggcgctgtccttgccgggaagtcactgttgaagttgcagtggcttgttcacacctgtgggaagagaagtgaagactttctccttgcattaaaaagtctgaactgtg

SEQ ID NO: 458982 - DNA, 3544 bp, Homo sapiens
ggaagacgtggcaccagtcggaggggcggggctgggaggggctcctccctaccgcccccaattccgccctgcccccgccgcggcggcgctagccgccactgagggaccgaccctataaaggccgctccgcgaggggtgcgcagcattcggcagagggcgcttcgacgggctgggctgtgcgcctgcgcagtgtgggtcgctcccgattccctgccccggccggccccgcctcggctccgcaccctcgccccgctctcagccgccgctctgccccgcagcagccagccccgtgtccggcagtatgttcagctgggtcagcaaggatgcccgccgcaagaaggagccggagctcttccagacggtggccgaggggctgcggcagctgtacgcgcagaagctgctacccctggaggagcactaccgcttccacgagttccactcgcccgcgctggaggacgctgacttcgacaacaagcctatggtgctcctcgtggggcagtacagcacgggcaagaccaccttcatccgacacctgatcgagcaggacttcccggggatgcgcatcgggcccgagcccaccaccgactccttcatcgccgtcatgcacggccccactgagggcgtggtgccgggcaacgcgctcgtggtggacccgcggcgccccttccgcaagctcaacgcgtttggcaacgctttcctcaacaggttcatgtgtgcccagctgcccaaccccgtcctggacagcatcagcatcatcgacacccccgggatcctgtctggagagaagcagcggatcagcagaggctatgactttgcagccgtcctggagtggttcgcggagcgtgtggaccgcatcatcctgctcttcgacgcccacaagctggacatctccgatgagttctcggaagtgatcaaggctctgaagaaccatgaggacaagatccgcgtggtgctgaacaaggcagaccagatcgagacgcagcagctgatgcgggtgtacggggccctcatgtggtccctgggcaagatcatcaacacccccgaggtggtcagggtctacatcggctccttctggtcccacccgctcctcatccccgacaaccgcaagctctttgaggccgaggagcaggacctcttcaaggacatccagtcactgccccgaaacgccgccctcaggaagctcaatgacctgatcaagcgggcacggctggccaaggttcacgcctacatcatcagctccctcaagaaagagatgcccaatgtctttggtaaagagagcaaaaagaaagagctggtgaacaacctgggagagatctaccagaagattgagcgcgagcaccagatctcccctggggacttcccgagcctccgcaagatgcaggaactcctgcagacccaggacttcagcaagttccaggcgctgaagcccaagctgctggacacggtggatgacatgctggccaacgacatcgcgcggctgatggtgatggtgcggcaggaggagtccctgatgccttcccaggtggtcaagggcggcgcctttgacggcaccatgaacgggccgttcgggcacggctacggcgagggggccggcgagggcatcgacgacgtggagtgggtggtgggcaaggacaagcccacctacgacgagatcttctacacgctgtcccctgtcaacggcaagatcacgggcgccaacgccaagaaggagatggtgaagtccaagctccccaacaccgtgctagggaagatctggaagctggccgacgtggacaaggacgggctgctggacgacgaggagttcgcgctggccaaccacctcatcaaggtcaagctggagggccacgagctgcccgccgacctgcccccgcacctggtgccgccctccaagcgcagacatgagtgatggcgcccggccccgcacctgccatttgcacgcccggccgggaggcagagacggggggaggggaagcctcaccatttctcaaggtccataaagactgagcggatgtttcctcgcctctcgaaaaggaaaaccaccatctttcttttaaggctgttcctgggcctggcgggggaggcaggggtgagaggatggaattgtgtgcacaagaactgtggctattttaatatataacgttagaggctgcgttctttgtcgccgcctcccctgtgtgccagccctgtgtgcacggcctctgccccccggcctttgctgtggctggagctggacagtgcagtgactgcgaccgtgggggagccaggtcgcccttttggcagctgctaggctgaggctgcatggacaggaacaccaggcaccctccgtgtgcttctgagctgaggttgcttcacgggaccgtggcttccttcctcacctggctctgcctcccccgtgctctcgggcgaagtgggttcttgtgccttcccctcccgggcccaggctccccgtgcgcgggccctgccctttcctcccgcgccccaccggctccgacgcgcaaccccgctcagcagtcacagaagcagggcccagccaccttggtctttttttgggagttcaggggagtaggagaatgtcttccagaaaaatacataagctagtttctgttctgtaaagtgatatctttcatacttgaccaaagttcccaataacttcccaaccactgttcaaaagctgtgatttttgtctccccttcccaccctccagccaaggagcagccctgcccagggggcattaggtgtgggtacccggggagcaccccgttcctggaccccagtgttgcatttcctggctgaggaagggtggtcatcccagctcctgccctaccctctcacttaactggagctttgggacgcaccctccacagtgggaggtggtggtgggtggcggtggcggggcctcacgacagcttggtgctggtaagaggaagcccgtggttctggctaggctctcatgtccagacagcggggaccaggggaaaacccagccccttctgtaatcccccttcatttcctaccttccttcctcctctgtttagcaaaggagggcagctcacttggatgtccttacaacgcccctggccccaggttgagcaataagaaaccagaaccttgcggcccagtggcccgggccagttcaggccgcctccccctcctctgcctggggccattgagcccagcctccagggcccgggtgcgtttgcaggccagtggccactgtccgggctgtgatggcaccaaggcaggtggagcaccaggtaccacacagctgggcttcccaccaggctttcccgcgggggtctcagggagcttctccccagcgctgctcggagtctgcaggaactggccttgttctccttagcccgtcactccatacagtattaggtgaggatggatgcgggcgctgtccttgccgggaagtcactgttgaagttgcagtggcttgttcacacctctcggacgtcacccgtcgccggtggcgctccgcgtgaaagcggtcggcgtggtgggagaagagatacggggcaacagaggccggcggcggccg

SEQ ID NO: 458983 - DNA, 2614 bp, Homo sapiens
cttctttgggttgacagactgggttttactcttcctgaatcatcacaatgatccgtgcaaggccaaggctgttgtcttctgtttcaagtgcgttttcctgtcctgtcctctgtcctgtggcagtggacagctgtggctcttgccagattgtgtctgctcctaggactgtgggagccggtggtggtagcggccttgagcttgacccatccctcctgcttccctgttcctgagcgagcaccttggagtatccttggagtgtccttggaggctctgctctcgggggcagcctgggccaagagagcgcctgatgctcaccccgtcctcacaggttcacgcctacatcatcagctccctcaagaaagagatgcccaatgtctttggtaaagagagcaaaaagaaagagctggtgaacaacctgggagagatctaccagaagattgagcgcgagcaccagatctcccctggggacttcccgagcctccgcaagatgcaggaactcctgcagacccaggacttcagcaagttccaggcgctgaagcccaagctgctggacacggtggatgacatgctggccaacgacatcgcgcggctgatggtgatggtgcggcaggaggagtccctgatgccttcccaggtggtcaagggcggcgcctttgacggcaccatgaacgggccgttcgggcacggctacggcgagggggccggcgagggcatcgacgacgtggagtgggtggtgggcaaggacaagcccacctacgacgagatcttctacacgctgtcccctgtcaacggcaagatcacgggcgccaacgccaagaaggagatggtgaagtccaagctccccaacaccgtgctagggaagatctggaagctggccgacgtggacaaggacgggctgctggacgacgaggagttcgcgctggccaaccacctcatcaaggtcaagctggagggccacgagctgcccgccgacctgcccccgcacctggtgccgccctccaagcgcagacatgagtgatggcgcccggccccgcacctgccatttgcacgcccggccgggaggcagagacggggggaggggaagcctcaccatttctcaaggtccataaagactgagcggatgtttcctcgcctctcgaaaaggaaaaccaccatctttcttttaaggctgttcctgggcctggcgggggaggcaggggtgagaggatggaattgtgtgcacaagaactgtggctattttaatatataacgttagaggctgcgttctttgtcgccgcctcccctgtgtgccagccctgtgtgcacggcctctgccccccggcctttgctgtggctggagctggacagtgcagtgactgcgaccgtgggggagccaggtcgcccttttggcagctgctaggctgaggctgcatggacaggaacaccaggcaccctccgtgtgcttctgagctgaggttgcttcacgggaccgtggcttccttcctcacctggctctgcctcccccgtgctctcgggcgaagtgggttcttgtgccttcccctcccgggcccaggctccccgtgcgcgggccctgccctttcctcccgcgccccaccggctccgacgcgcaaccccgctcagcagtcacagaagcagggcccagccaccttggtctttttttgggagttcaggggagtaggagaatgtcttccagaaaaatacataagctagtttctgttctgtaaagtgatatctttcatacttgaccaaagttcccaataacttcccaaccactgttcaaaagctgtgatttttgtctccccttcccaccctccagccaaggagcagccctgcccagggggcattaggtgtgggtacccggggagcaccccgttcctggaccccagtgttgcatttcctggctgaggaagggtggtcatcccagctcctgccctaccctctcacttaactggagctttgggacgcaccctccacagtgggaggtggtggtgggtggcggtggcggggcctcacgacagcttggtgctggtaagaggaagcccgtggttctggctaggctctcatgtccagacagcggggaccaggggaaaacccagccccttctgtaatcccccttcatttcctaccttccttcctcctctgtttagcaaaggagggcagctcacttggatgtccttacaacgcccctggccccaggttgagcaataagaaaccagaaccttgcggcccagtggcccgggccagttcaggccgcctccccctcctctgcctggggccattgagcccagcctccagggcccgggtgcgtttgcaggccagtggccactgtccgggctgtgatggcaccaaggcaggtggagcaccaggtaccacacagctgggcttcccaccaggctttcccgcgggggtctcagggagcttctccccagcgctgctcggagtctgcaggaactggccttgttctccttagcccgtcactccatacagtattaggtgaggatggatgcgggcgctgtccttgccgggaagtcactgttgaagttgcagtggcttgttcacacctgtgggaagagaagtgaagactttctccttgcattaaaaagtctgaactgtg

SEQ ID NO: 458984 - DNA, 2249 bp, Homo sapiens
attcttgtcacccagagcatggaagtgcagatggcctggtgagcgactctcggaaagcatctacctcacagatttaacgcgagcatcatatctcccctgtcgcacttaccgagcctccggaagatgcagaactcctgcagacccaggacttcagcaagttccaggcgctgaagcccaagctgctggacacggtggatgacatgctggccaacgacatcgcgcggctgatggtgatggtgcggcaggaggagtccctgatgccttcccaggtggtcaagggcggcgcctttgacggcaccatgaacgggccgttcgggcacggctacggcgagggggccggcgagggcatcgacgacgtggagtgggtggtgggcaaggacaagcccacctacgacgagatcttctacacgctgtcccctgtcaacggcaagatcacgggcgccaacgccaagaaggagatggtgaagtccaagctccccaacaccgtgctagggaagatctggaagctggccgacgtggacaaggacgggctgctggacgacgaggagttcgcgctggccaaccacctcatcaaggtcaagctggagggccacgagctgcccgccgacctgcccccgcacctggtgccgccctccaagcgcagacatgagtgatggcgcccggccccgcacctgccatttgcacgcccggccgggaggcagagacggggggaggggaagcctcaccatttctcaaggtccataaagactgagcggatgtttcctcgcctctcgaaaaggaaaaccaccatctttcttttaaggctgttcctgggcctggcgggggaggcaggggtgagaggatggaattgtgtgcacaagaactgtggctattttaatatataacgttagaggctgcgttctttgtcgccgcctcccctgtgtgccagccctgtgtgcacggcctctgccccccggcctttgctgtggctggagctggacagtgcagtgactgcgaccgtgggggagccaggtcgcccttttggcagctgctaggctgaggctgcatggacaggaacaccaggcaccctccgtgtgcttctgagctgaggttgcttcacgggaccgtggcttccttcctcacctggctctgcctcccccgtgctctcgggcgaagtgggttcttgtgccttcccctcccgggcccaggctccccgtgcgcgggccctgccctttcctcccgcgccccaccggctccgacgcgcaaccccgctcagcagtcacagaagcagggcccagccaccttggtctttttttgggagttcaggggagtaggagaatgtcttccagaaaaatacataagctagtttctgttctgtaaagtgatatctttcatacttgaccaaagttcccaataacttcccaaccactgttcaaaagctgtgatttttgtctccccttcccaccctccagccaaggagcagccctgcccagggggcattaggtgtgggtacccggggagcaccccgttcctggaccccagtgttgcatttcctggctgaggaagggtggtcatcccagctcctgccctaccctctcacttaactggagctttgggacgcaccctccacagtgggaggtggtggtgggtggcggtggcggggcctcacgacagcttggtgctggtaagaggaagcccgtggttctggctaggctctcatgtccagacagcggggaccaggggaaaacccagccccttctgtaatcccccttcatttcctaccttccttcctcctctgtttagcaaaggagggcagctcacttggatgtccttacaacgcccctggccccaggttgagcaataagaaaccagaaccttgcggcccagtggcccgggccagttcaggccgcctccccctcctctgcctggggccattgagcccagcctccagggcccgggtgcgtttgcaggccagtggccactgtccgggctgtgatggcaccaaggcaggtggagcaccaggtaccacacagctgggcttcccaccaggctttcccgcgggggtctcagggagcttctccccagcgctgctcggagtctgcaggaactggccttgttctccttagcccgtcactccatacagtattaggtgaggatggatgcgggcgctgtccttgccgggaagtcactgttgaagttgcagtggcttgttcacacctgtgggaagagaagtgaagactttctccttgcattaaaaagtctgaactgtg

SEQ ID NO: 458985 - DNA, 3257 bp, Homo sapiens
  misc_feature (3249)..(3249): n is a, c, g, or t
ggaagacgtggcaccagtcggaggggcggggctgggaggggctcctccctaccgcccccaattccgccctgcccccgccgcggcggcgctagccgccactgagggaccgaccctataaaggccgctccgcgaggggtgcgcagcattcggcagagggcgcttcgacgggctgggctgtgcgcctgcgcagtgtgggtcgctcccgattccctgccccggccggccccgcctcggctccgcaccctcgccccgctctcagccgccgctctgccccgcagcagccagccccgtgtccggcagtatgttcagctgggtcagcaaggatgcccgccgcaagaaggagccggagctcttccagacggtggccgaggggctgcggcagctgtacgcgcagaagctgctacccctggaggagcactaccgcttccacgagttccactcgcccgcgctggaggacgctgacttcgacaacaagcctatggtgctcctcgtggggcagtacagcacgggcaagaccaccttcatccgacacctgatcgagcaggacttcccggggatgcgcatcgggcccgagcccaccaccgactccttcatcgccgtcatgcacggccccactgagggcgtggtgccgggcaacgcgctcgtggtggacccgcggcgccccttccgcaagctcaacgcgtttggcaacgctttcctcaacaggttcatgtgtgcccagctgcccaaccccgtcctggacagcatcagcatcatcgacacccccgggatcctgtctggagagaagcagcggatcagcagaggctatgactttgcagccgtcctggagtggttcgcggagcgtgtggaccgcatcatcctgctcttcgacgcccacaagctggacatctccgatgagttctcggaagtgatcaaggctctgaagaaccatgaggacaagatccgcgtggtgctgaacaaggcagaccagatcgagacgcagcagctgatgcgggtgtacggggccctcatgtggtccctgggcaagatcatcaacacccccgaggtggtcagggtctacatcggctccttctggtcccacccgctcctcatccccgacaaccgcaagctctttgaggccgaggagcaggacctcttcaaggacatccagtcactgccccgaaacgccgccctcaggaagctcaatgacctgatcaagcgggcacggctggccaaggttcacgcctacatcatcagctccctcaagaaagagatgcccaatgtctttggtaaagagagcaaaaagaaagagctggtgaacaacctgggagagatctaccagaagattgagcgcgagcaccagatctcccctggggacttcccgagcctccgcaagatgcaggaactcctgcagacccaggacttcagcaagttccaggcgctgaagcccaagctgctggacacggtggatgacatgctggccaacgacatcgcgcggctgatggtgatggtgcggcaggaggagtccctgatgccttcccaggtggtcaagggcggcgcctttgacggcaccatgaacgggccgttcgggcacggctacggcgagggggccggcgagggcatcgacgacgtggagtgggtggtgggcaaggacaagcccacctacgacgagatcttctacacgctgtcccctgtcaacggcaagatcacgggcgccaacgccaagaaggagatggtgaagtccaagctccccaacaccgtgctagggaagatctggaagctggccgacgtggacaaggacgggctgctggacgacgaggagttcgcgctggccaaccacctcatcaaggtcaagctggagggccacgagctgcccgccgacctgcccccgcacctggtgccgccctccaagcgcagacatgagtgatggcgcccggccccgcacctgccatttgcacgcccggccgggaggcagagacggggggaggggaagcctcaccatttctcaaggtccataaagactgagcggatgtttcctcgcctctcgaaaaggaaaaccaccatctttcttttaaggctgttcctgggcctggcgggggaggcaggggtgagaggatggaattgtgtgcacaagaactgtggctattttaatatataacgttagaggctgcgttctttgtcgccgcctcccctgtgtgccagccctgtgtgcacggcctctgccccccggcctttgctgtggctggagctggacagtgcagtgactgcgaccgtgggggagccaggtcgcccttttggcagctgctaggctgaggctgcatggacaggaacaccaggcaccctccgtgtgcttctgagctgaggttgcttcacgggaccgtggcttccttcctcacctggctctgcctcccccgtgctctcgggcgaagtgggttcttgtgccttcccctcccgggcccaggctccccgtgcgcgggccctgccctttcctcccgcgccccaccggctccgacgcgcaaccccgctcagcagtcacagaagcagggcccagccaccttggtctttttttgggagttcaggggagtaggagaatgtcttccagaaaaatacataagctagtttctgttctgtaaagtgatatctttcatacttgaccaaagttcccaataacttcccaaccactcccctcctctgcctggggccattgagcccagcctccagggcccgggtgcgtttgcaggccagtggccactgtccgggctgtgatggcaccaaggcaggtggagcaccaggtaccacacagctgggcttcccaccaggctttcccgcgggggtctcagggagcttctccccagcgctgctcggagtctgcaggaactggccttgttctccttagcccgtcactccatacagtattaggtgaggatggatgcgggcgctgtccttgccgggaagtcactgttgaagttgcagtggcttgttcacacctgtgggaagagaagtgaagactttctccttgcattaaaaagtctgaactgtgaaaaaaaaaaaaaaaaaaaaaaactccggagggaatttatattgttggggggcggagaaaaagagagggtatgagaaggggcaaggggctcattagttggttccctggaccaaggttttttggtacaagggggaaaatttggccgggtccccccaattaggggaagtcgatattaaatttcgagatataagccacaggttaaccttgggttatatggaattcggaaaacnctgaaaag

SEQ ID NO: 458986 - DNA, 1335 bp, Homo sapiens
ggaagacgtggcaccagtcggaggggcggggctgggaggggctcctccctaccgcccccaattccgccctgcccccgccgcggcggcgctagccgccactgagggaccgaccctataaaggccgctccgcgaggggtgcgcagcattcggcagagggcgcttcgacgggctgggctgtgcgcctgcgcagtgtgggtcgctcccgattccctgccccggccggccccgcctcggctccgcaccctcgccccgctctcagccgccgctctgccccgcagcagccagccccgtgtccggcagtatgttcagctgggtcagcaaggatgcccgccgcaagaaggagccggagctcttccagacggtggccgaggggctgcggcagctgtacgcgcagaagctgctacccctggaggagcactaccgcttccacgagttccactcgcccgcgctggaggacgctgacttcgacaacaagcctatggtgctcctcgtggggcagtacagcacgggcaagaccaccttcatccgacacctgatcgagcaggacttcccggggatgcgcatcgggcccgagcccaccaccgactccttcatcgccgtcatgcacggccccactgagggcgtggtgccgggcaacgcgctcgtggtggacccgcggcgccccttccgcaagctcaacgcgtttggcaacgctttcctcaacaggttcatgtgtgcccagctgcccaaccccgtcctggacagcatcagcatcatcgacacccccgggatcctgtctggagagaagcagcggatcagcagaggctatgactttgcagccgtcctggagtggttcgcggagcgtgtggaccgcatcatcctgctcttcgacgcccacaagctggacatctccgatgagttctcggaagtgatcaaggctctgaagaaccatgaggacaagatccgcgtggtgctgaacaaggcagaccagatcgagacgcagcagctgatgcgggtgtacggggccctcatgtggtccctgggcaagatcatcaacacccccgaggtggtcagggtctacatcggctccttctggtcccacccgctcctcatccccgacaaccgcaagctctttgaggccgaggagcaggacctcttcaaggacatccagcgctgctcggagtctgcaggaactggccttgttctccttagcccgtcactccatacagtattaggtgaggatggatgcgggcgctgtccttgccgggaagtcactgttgaagttgcagtggcttgttcacacctgtgggaagagaagtgaagactttctccttgcattaaaaagtctgaactgtg

SEQ ID NO: 458987 - DNA, 6104 bp, Homo sapiens
aagccacgcagggccacgtctgcggttctgaggactgggtttgggtgcagacgttgttgcttgggcgcttctccgctgcgtgtaggtgaagggggcttcctgaccgagacatggatttaggtgctattacaaaatactcagcattacacgccaagcccaatggactgatccttcaatacgggactgctggatttcgaacgaaggcagaacatcttgatcatgtcatgtttcgcatgggattattagctgtcctgaggtcaaaacagacaaaatccactataggagtcatggtaacagcgtcccacaatcctgaggaagacaatggtgtaaaattggttgatcctttgggtgaaatgttggcaccatcctgggaggaacatgccacctgtttagcaaatgctgaggaacaagatatgcagagagtgcttattgacatcagcgagaaagaagctgtgaatctgcaacaagatgcctttgtagttattggtagagataccaggcccagcagtgagaaactttcacaatctgtaatagatggtgtgactgttctaggaggtcaattccatgattatggcttgttaacaacaccccagctgcactacatggtgtattgtcgaaacacgggtggccgatatggaaaggcaactatagaaggttactaccagaaactctctaaggcttttgtggaactcaccaaacaggcttcttgcagtggagatgaatacagatcacttaaggttgactgtgcaaatggcataggggccctgaagctaagggaaatggaacactacttctcacagggcctgtcagttcagctgtttaatgatgggtccaagggcaaactcaatcatttatgtggagctgactttgtgaaaagtcatcagaaacctccacagggaatggaaattaagtccaatgaaagatgctgttcttttgatggagatgcagacagaattgtttattactaccatgatgcagatggccactttcatctcatagatggagacaagatagcaacgttaattagcagtttccttaaagagctcctggtggagattggagaaagtttgaatattggtgttgtacaaactgcatatgcaaatggaagttcaacacggtatcttgaagaagttatgaaggtacctgtctattgcactaagactggtgtaaaacatttgcaccacaaggctcaagagtttgacattggagtttattttgaagcaaatgggcatggcactgcactgtttagtacagctgttgaaatgaagataaaacaatcagcagaacaactggaagataagaaaagaaaagctgctaagatgcttgaaaacattattgacttgtttaaccaggcagctggtgatgctatttctgacatgctggtgattgaagcaatcttggctctgaagggcttgactgtacaacagtgggatgctctctatacagatcttccaaacagacaacttaaagttcaggttgcagacaggagagttattagcactaccgatgctgaaagacaagcagttacacccccaggattacaggaggcaatcaatgacctggtgaagaagtacaagctttctcgagcttttgtccggccctctggtacagaagatgtcgtccgagtatatgcagaagcagactcacaagaaagtgcagatcaccttgcacatgaagtgagcttggcagtatttcagctggctggaggaattggagaaaggccccaaccaggtttctgaagataattttcatattcctgagaaactggactttttacaagtctttacaaaactgtcaataataatggcagtactaagagatttataatcataatgtttacaatgcagcctactggattgtctctagatctgtttttcttaaacactaacagaataattctttataaataggtaagccttacacttgttaaagaaatttacctctaatttcagtctcactaatgtaaaatactgggacttaagtatacaattcagtcactaactgtacagttttatgtggggaacaattcatgcaggctactggaaaattaaatcttattaccaactccttgtgatatctttgccatcaccatcacatgagcaagatgatgttttgcagcattccccattgctgatacaaatggagagggcagagaagactttatacaaccagtttttccattgcagagtcttaagaaagattattagatgacttacctatatgactaatgccatcaggaactcagaggtatgaatagggggttgtccatccctcttccatactgaggtggagatgctcatgcaatacttttaaggatgcatggtccagccttcagttattcttcactgctcttggtgaaggtatgtgggagaaaaactaattataatacgtttcccagcctctgatggagaaggaacaccattctgataccagaacatggttaataaggaaaagagaaaaatccccaaccaatcttaattgaaccaagtctgaaaccaatggaaaaaaaaaatgggtagtgtatattttgcaggtttaagacaactcaggacaataaaaacaatggactttacatgtgtatatatatagctctcttaggcaccataatcagtatgagccaacaatatttaaacttgattcaggccacattcagacatttgctcttatatacaaatatttaaattaaatacaatctgaaatgtgttctgttacatacaaaaaaggaaaaactatacaacgcagagcagtgtgtgtgttttaaataattacatttacatgtaagctaaatggaaccagcaatggtgctcaagtttttatcatcccttccagaaaatctttttctaccatctcttctattttttgcctggctttgctggaacatggtttgtggttctccagtttcatgtccttattagggaaggcatttgagtagaggataggactccctgagtgtcctccacatcggcttgtgactttgctgttgaagacttgactgagcacattgaagaacggcaggagctgctccatactgcgcacggtgcagatggtgagcagcaagtgccctggctcccaacccaatgttctccctgagttgtcttcctctggatttttctgcagaaaacaaaaagtgaactggtattaatacaacagacaatgtggtatgttagaaaaattaaaaatatataaactttggcaattggtcaagaaatgaatacaaatgacattaagtttctaactcctgacctgatcaaaacccttggtgcttctgagaccttttactgccatttattagttttacatggagcagtctaacattgtagtaatagttcccaactagaatgcgcagataagcttagttaacagaaatagctttgaacaggaatagagtcaaacataaaagttttatgttgtgctttgtatttactcaaaaagctcccaggtttctgaaccctcactactgtaaccaaggactaggtcacaaaattactacagaaaaaaggaacaaagtgctttatacatttcataatatatccccttttattataattagttaattcccttttatctaaatggcctaaatttgccatgatggtagcagtgtccaaagtgaataattactgtcagtactgcatcacagagaaaggaagggatccctcaggagacactgctgtctccttctgggttgtgctaaacaacatagggaggaaagctggacctggagtcaaaggaattgagttagtgtgctggctctgccatacttacggcacccttgggcaggatatacaaaggttcctcacttataaaatgggacagtctaaaactaccttttagtagagaagtcaaatgagaaggtatgtgaaaactctgtcaactaaatataaagactaataatttgggtattaagaggctagtttgagaagccacctgaattacacaaacacagctacagacatcattctgtctagagaaagataagagagaacaggttggttgaacttgggcagaatcacagatacaattccacactaaagaatgaaaataagcaatgaactagacagaaggaagaaatcatgaagacttaggaagcagaattacaatctgtcatattaacaaatggagtttgccttctaagatcagatgttgctcagaaactttcattgtttacctaataatttaatatcactagtttcctagtgggtcaagcagatgcaaaatccagcttattttcttctatgtgctctcaagcttattgcttattttaaagtaaaatcctgaaaaaggaaaatattaggttggtgcaaacgtaattgcggtttttgcattgttgaaatttgccgttttatattggagtacattcttaaataaatgtggttatgttatacatcattttaagcatatttctcactttttttttgctaatgacttattgctgtttatatttattttagactatggaaatgatgttagacaaaaatcaaatttagcgattttctgagttcaaaataggttataaagcagcagagacaacacacaacatcaacaatgcatttggcccaggaactgctaatgaacatacagtgccgtgatggctcaagaagttttgcaaaggagactagagccttgaagatgaggagtgcagtggccagtcatcggaaattgataatgaccaattgagaacatcatcgaagctgatcctcttacaactataagagagctgcccaagaactcaatgttgaccattttatggtcgttcggcatttgaagcaaattgaaaaggtgaaaaagctcaataaatgggtgcctcatgagctgagtgaaaaataaaaaaattcgttgttttgaagtgtcattttctctattctatgcaacaataatgaatcatttctctatcggattgtgatgtgtgccaaaaggtggattttatacgacaactggcgatgaccagctcagtggctggactgaaagaagctccaaagcacttcccaaagccaaacttgctccaaaaaatggtcatggtcattgtttggtggtttgctgccagtctgatccactacagctttctgaatccaggtgaaaccattacatctgataagtatgctcagcaaatcaatgagatgcaccaaaaactgcaatgcctgcagccggcattggccaccagaaagggcccaattcttttcacgacaacactgggccgcacgttgcacaaccaacgcttcgaaaattgaactaattgggctatgaagttttgcctcatctgccatattcacctgacctcttgccaacaaactaccacttctttaggcatctcagcaacgttttgcagggaaattgcttccacaactagcaggacacagaaaatgctttccaagagttcgtcaaatttggaagcatggatttttatgctacaggagtaaacaaacttatttctcattggcaaaaatgtgttgattgtaatggttcctattttaattaataaagatttgtgtgaacctagttataatgacttaaaattcatggtcccaaacagcaattacttttgcaccaaactaaaaatataagttaaaatggaagagtctaggagcaaaccaagaaaagatcacctacttcatcatctctggtcaaaaacaaaccaaaaaacttaacagctatcacttaagtttgcttcctagcaattatttagcttccagtctagattacaggatatataaaactttctttctttctttcttaactatgacactggcaccaatgagagtcctgtgactgactttcacatttccaccattactcaattactggtaccataccacctctaatcccctaaatcaaactgcaattcaacaataaagggcgtacagagatgactttgtcctgaaggaaaatgaatatccttgtaccctctatatagctaacttccaaatgtaagagaactatggggtaaccttttgtttctattcctatcaagatgagcctttaagagagggacttttattaagctcttgaccaagaagaatacacttgattcagagtttctgatgctcttaatcagaactatatgtattgtctcaatattaaataaagtcaaatgtttccatacaaatgat

SEQ ID NO: 458988 - DNA, 6059 bp, Homo sapiens
aagccacgcagggccacgtctgcggttctgaggactgggtttgggtgcagacgttgttgcttgggcgcttctccgctgcgtgtaggtgaagggggcttcctgaccgagacatggatttaggtgctattacaaaatactcagcattacacgccaagcccaatggactgatccttcaatacgggactgctggatttcgaacgaaggcagaacatcttgatcatgtcatgtttcgcatgggattattagctgtcctgaggtcaaaacagacaaaatccactataggagtcatggtaacagcgtcccacaatcctgaggaagacaatggtgtaaaattggttgatcctttgggtgaaatgttggcaccatcctgggaggaacatgccacctgtttagcaaatgctgaggaacaagatatgcagagagtgcttattgacatcagcgagaaagaagctgtgaatctgcaacaagatgcctttgtagttattggtagagataccaggcccagcagtgagaaactttcacaatctgtaatagatggtgtgactgttctaggaggtcaattccatgattatggcttgttaacaacaccccagctgcactacatggtgtattgtcgaaacacgggtggccgatatggaaaggcaactatagaaggttactaccagaaactctctaaggcttttgtggaactcaccaaacaggcttcttgcagtggagatgaatacagatcacttaaggttgactgtgcaaatggcataggggccctgaagctaagggaaatggaacactacttctcacagggcctgtcagttcagctgtttaatgatgggtccaagggcaaactcaatcatttatgtggagctgactttgtgaaaagtcatcagaaacctccacagggaatggaaattaagtccaatgaaagatgctgttcttttgatggagatgcagacagaattgtttattactaccatgatgcagatggccactttcatctcatagatggagacaagatagcaacgttaattagcagtttccttaaagagctcctggtggagattggagaaagtttgaatattggtgttgtacaaactgcatatgcaaatggaagttcaacacggtatcttgaagaagttatgaaggtacctgtctattgcactaagactggtgtaaaacatttgcaccacaaggctcaagagtttgacattggagtttattttgaagcaaatgggcatggcactgcactgtttagtacagctgttgaaatgaagataaaacaatcagcagaacaactggaagataagaaaagaaaagctgctaagatgcttgaaaacattattgacttgtttaaccaggcagctggtgatgctatttctgacatgctggtgattgaagcaatcttggctctgaagggcttgactgtacaacagtgggatgctctctatacagatcttccaaacagacaacttaaagttcaggttgcagacaggagagttattagcactaccgatgctgaaagacaagcagttacacccccaggattacaggaggcaatcaatgacctggtgaagaagtacaagctttctcgagcttttgtccggccctctggtacagaagatgtcgtccgagtatatgcagaagcagactcacaagaaagtgcagatcaccttgcacatgaagtgagcttggcagtatttcagctggctggaggaattggagaaaggccccaaccaggtttctgaagataattttcatattcctgagaaactggactttttacaagtctttacaaaactgtcaataataatggcagtactaagagatttataatcataatgtttacaatgcagcctactggattgtctctagatctgtttttcttaaacactaacagaataattctttataaataggtaagccttacacttgttaaagaaatttacctctaatttcagtctcactaatgtaaaatactgggacttaagtatacaattcagtcactaactgtacagttttatgtggggaacaattcatgcaggctactggaaaattaaagagcaagatgatgttttgcagcattccccattgctgatacaaatggagagggcagagaagactttatacaaccagtttttccattgcagagtcttaagaaagattattagatgacttacctatatgactaatgccatcaggaactcagaggtatgaatagggggttgtccatccctcttccatactgaggtggagatgctcatgcaatacttttaaggatgcatggtccagccttcagttattcttcactgctcttggtgaaggtatgtgggagaaaaactaattataatacgtttcccagcctctgatggagaaggaacaccattctgataccagaacatggttaataaggaaaagagaaaaatccccaaccaatcttaattgaaccaagtctgaaaccaatggaaaaaaaaaatgggtagtgtatattttgcaggtttaagacaactcaggacaataaaaacaatggactttacatgtgtatatatatagctctcttaggcaccataatcagtatgagccaacaatatttaaacttgattcaggccacattcagacatttgctcttatatacaaatatttaaattaaatacaatctgaaatgtgttctgttacatacaaaaaaggaaaaactatacaacgcagagcagtgtgtgtgttttaaataattacatttacatgtaagctaaatggaaccagcaatggtgctcaagtttttatcatcccttccagaaaatctttttctaccatctcttctattttttgcctggctttgctggaacatggtttgtggttctccagtttcatgtccttattagggaaggcatttgagtagaggataggactccctgagtgtcctccacatcggcttgtgactttgctgttgaagacttgactgagcacattgaagaacggcaggagctgctccatactgcgcacggtgcagatggtgagcagcaagtgccctggctcccaacccaatgttctccctgagttgtcttcctctggatttttctgcagaaaacaaaaagtgaactggtattaatacaacagacaatgtggtatgttagaaaaattaaaaatatataaactttggcaattggtcaagaaatgaatacaaatgacattaagtttctaactcctgacctgatcaaaacccttggtgcttctgagaccttttactgccatttattagttttacatggagcagtctaacattgtagtaatagttcccaactagaatgcgcagataagcttagttaacagaaatagctttgaacaggaatagagtcaaacataaaagttttatgttgtgctttgtatttactcaaaaagctcccaggtttctgaaccctcactactgtaaccaaggactaggtcacaaaattactacagaaaaaaggaacaaagtgctttatacatttcataatatatccccttttattataattagttaattcccttttatctaaatggcctaaatttgccatgatggtagcagtgtccaaagtgaataattactgtcagtactgcatcacagagaaaggaagggatccctcaggagacactgctgtctccttctgggttgtgctaaacaacatagggaggaaagctggacctggagtcaaaggaattgagttagtgtgctggctctgccatacttacggcacccttgggcaggatatacaaaggttcctcacttataaaatgggacagtctaaaactaccttttagtagagaagtcaaatgagaaggtatgtgaaaactctgtcaactaaatataaagactaataatttgggtattaagaggctagtttgagaagccacctgaattacacaaacacagctacagacatcattctgtctagagaaagataagagagaacaggttggttgaacttgggcagaatcacagatacaattccacactaaagaatgaaaataagcaatgaactagacagaaggaagaaatcatgaagacttaggaagcagaattacaatctgtcatattaacaaatggagtttgccttctaagatcagatgttgctcagaaactttcattgtttacctaataatttaatatcactagtttcctagtgggtcaagcagatgcaaaatccagcttattttcttctatgtgctctcaagcttattgcttattttaaagtaaaatcctgaaaaaggaaaatattaggttggtgcaaacgtaattgcggtttttgcattgttgaaatttgccgttttatattggagtacattcttaaataaatgtggttatgttatacatcattttaagcatatttctcactttttttttgctaatgacttattgctgtttatatttattttagactatggaaatgatgttagacaaaaatcaaatttagcgattttctgagttcaaaataggttataaagcagcagagacaacacacaacatcaacaatgcatttggcccaggaactgctaatgaacatacagtgccgtgatggctcaagaagttttgcaaaggagactagagccttgaagatgaggagtgcagtggccagtcatcggaaattgataatgaccaattgagaacatcatcgaagctgatcctcttacaactataagagagctgcccaagaactcaatgttgaccattttatggtcgttcggcatttgaagcaaattgaaaaggtgaaaaagctcaataaatgggtgcctcatgagctgagtgaaaaataaaaaaattcgttgttttgaagtgtcattttctctattctatgcaacaataatgaatcatttctctatcggattgtgatgtgtgccaaaaggtggattttatacgacaactggcgatgaccagctcagtggctggactgaaagaagctccaaagcacttcccaaagccaaacttgctccaaaaaatggtcatggtcattgtttggtggtttgctgccagtctgatccactacagctttctgaatccaggtgaaaccattacatctgataagtatgctcagcaaatcaatgagatgcaccaaaaactgcaatgcctgcagccggcattggccaccagaaagggcccaattcttttcacgacaacactgggccgcacgttgcacaaccaacgcttcgaaaattgaactaattgggctatgaagttttgcctcatctgccatattcacctgacctcttgccaacaaactaccacttctttaggcatctcagcaacgttttgcagggaaattgcttccacaactagcaggacacagaaaatgctttccaagagttcgtcaaatttggaagcatggatttttatgctacaggagtaaacaaacttatttctcattggcaaaaatgtgttgattgtaatggttcctattttaattaataaagatttgtgtgaacctagttataatgacttaaaattcatggtcccaaacagcaattacttttgcaccaaactaaaaatataagttaaaatggaagagtctaggagcaaaccaagaaaagatcacctacttcatcatctctggtcaaaaacaaaccaaaaaacttaacagctatcacttaagtttgcttcctagcaattatttagcttccagtctagattacaggatatataaaactttctttctttctttcttaactatgacactggcaccaatgagagtcctgtgactgactttcacatttccaccattactcaattactggtaccataccacctctaatcccctaaatcaaactgcaattcaacaataaagggcgtacagagatgactttgtcctgaaggaaaatgaatatccttgtaccctctatatagctaacttccaaatgtaagagaactatggggtaaccttttgtttctattcctatcaagatgagcctttaagagagggacttttattaagctcttgaccaagaagaatacacttgattcagagtttctgatgctcttaatcagaactatatgtattgtctcaatattaaataaagtcaaatgtttccatacaaatgat

SEQ ID NO: 458989 - DNA, 4515 bp, Homo sapiens
aagccacgcagggccacgtctgcggttctgaggactgggtttgggtgcagacgttgttgcttgggcgcttctccgctgcgtgtaggtgaagggggcttcctgaccgagacatggatttaggtgctattacaaaatactcagcattacacgccaagcccaatggactgatccttcaatacgggactgctggatttcgaacgaaggcagaacatcttgatcatgtcatgtttcgcatgggattattagctgtcctgaggtcaaaacagacaaaatccactataggagtcatggtaacagcgtcccacaatcctgaggaagacaatggtgtaaaattggttgatcctttgggtgaaatgttggcaccatcctgggaggaacatgccacctgtttagcaaatgctgaggaacaagatatgcagagagtgcttattgacatcagcgagaaagaagctgtgaatctgcaacaagatgcctttgtagttattggtagagataccaggcccagcagtgagaaactttcacaatctgtaatagatggtgtgactgttctaggaggtcaattccatgattatggcttgttaacaacaccccagctgcactacatggtgtattgtcgaaacacgggtggccgatatggaaaggcaactatagaaggttactaccagaaactctctaaggcttttgtggaactcaccaaacaggcttcttgcagtggagatgaatacagatcacttaaggttgactgtgcaaatggcataggggccctgaagctaagggaaatggaacactacttctcacagggcctgtcagttcagctgtttaatgatgggtccaagggcaaactcaatcatttatgtggagctgactttgtgaaaagtcatcagaaacctccacagggaatggaaattaagtccaatgaaagatgctgttcttttgatggagatgcagacagaattgtttattactaccatgatgcagatggccactttcatctcatagatggagacaagatagcaacgttaattagcagtttccttaaagagctcctggtggagattggagaaagtttgaatattggtgttgtacaaactgcatatgcaaatggaagttcaacacggtatcttgaagaagttatgaaggtacctgtctattgcactaagactggtgtaaaacatttgcaccacaaggctcaagagtttgacattggagtttattttgaagcaaatgggcatggcactgcactgtttagtacagctgttgaaatgaagataaaacaatcagcagaacaactggaagataagaaaagaaaagctgctaagatgcttgaaaacattattgacttgtttaaccaggcagctggtgatgctatttctgacatgctggtgattgaagcaatcttggctctgaagggcttgactgtacaacagtgggatgctctctatacagatcttccaaacagacaacttaaagttcaggttgcagacaggagagttattagcactaccgatgctgaaagacaagcagttacacccccaggattacaggaggcaatcaatgacctggtgaagaagtacaagctttctcgagcttttgtccggccctctggtacagaagatgtcgtccgagtatatgcagaagcagactcacaagaaagtgcagatcaccttgcacatgaagtgagcttggcagtatttcagctggctggaggaattggagaaaggccccaaccaggtttctgaagataattttcatattcctgagaaactggactttttacaagtctttacaaaactgtcaataataatggcagtactaagagatttataatcataatgtttacaatgcagcctactggattgtctctagatctgtttttcttaaacactaacagaataattctttataaataggtaagccttacacttgttaaagaaatttacctctaatttcagtctcactaatgtaaaatactgggacttaagtatacaattcagtcactaactgtacagttttatgtggggaacaattcatgcaggctactggaaaattaaatcttattaccaactccttgtgatatctttgccatcaccatcacatgagcaagatgatgttttgcagcattccccattgctgatacaaatggagagggcagagaagactttatacaaccagtttttccattgcagagtcttaagaaagattattagatgacttacctatatgactaatgccatcaggaactcagaggtatgaatagggggttgtccatccctcttccatactgaggtggagatgctcatgcaatacttttaaggatgcatggtccagccttcagttattcttcactgctcttggtgaaggtatgtgggagaaaaactaattataatacgtttcccagcctctgatggagaaggaacaccattctgataccagaacatggttaataaggaaaagagaaaaatccccaaccaatcttaattgaaccaagtctgaaaccaatggaaaaaaaaaatgggtagtgtatattttgcaggtttaagacaactcaggacaataaaaacaatggactttacatgtgtatatatatagctctcttaggcaccataatcagtatgagccaacaatatttaaacttgattcaggccacattcagacatttgctcttatatacaaatatttaaattaaatacaatctgaaatgtgttctgttacatacaaaaaaggaaaaactatacaacgcagagcagtgtgtgtgttttaaataattacatttacatgtaagctaaatggaaccagcaatggtgctcaagtttttatcatcccttccagaaaatctttttctaccatctcttctattttttgcctggctttgctggaacatggtttgtggttctccagtttcatgtccttattagggaaggcatttgagtagaggataggactccctgagtgtcctccacatcggcttgtgactttgctgttgaagacttgactgagcacattgaagaacggcaggagctgctccatactgcgcacggtgcagatggtgagcagcaagtgccctggctcccaacccaatgttctccctgagttgtcttcctctggatttttctgcagaaaacaaaaagtgaactggtattaatacaacagacaatgtggtatgttagaaaaattaaaaatatataaactttggcaattggtcaagaaatgaatacaaatgacattaagtttctaactcctgacctgatcaaaacccttggtgcttctgagaccttttactgccatttattagttttacatggagcagtctaacattgtagtaatagttcccaactagaatgcgcagataagcttagttaacagaaatagctttgaacaggaatagagtcaaacataaaagttttatgttgtgctttgtatttactcaaaaagctcccaggtttctgaaccctcactactgtaaccaaggactaggtcacaaaattactacagaaaaaaggaacaaagtgctttatacatttcataatatatccccttttattataattagttaattcccttttatctaaatggcctaaatttgccatgatggtagcagtgtccaaagtgaataattactgtcagtactgcatcacagagaaaggaagggatccctcaggagacactgctgtctccttctgggttgtgctaaacaacatagggaggaaagctggacctggagtcaaaggaattgagttagtgtgctggctctgccatacttacggcacccttgggcaggatatacaaaggttcctcacttataaaatgggacagtctaaaactaccttttagtagagaagtcaaatgagaaggtatgtgaaaactctgtcaactaaatataaagactaataatttgggtattaagaggctagtttgagaagccacctgaattacacaaacacagctacagacatcattctgtctagagaaagataagagagaacaggttggttgaacttgggcagaatcacagatacaattccacactaaagaatgaaaataagcaatgaactagacagaaggaagaaatcatgaagacttaggaagcagaattacaatctgtcatattaacaaatggagtttgccttctaagatcagatgttgctcagaaactttcattgtttacctaataatttaatatcactagtttcctagtgggtcaagcagatgcaaaatccagcttattttcttctatgtgctctcaagcttattgcttattttaaagtaaaatcctgaaaaaggaaaatattaggttggtgcaaacgtaattgcggtttttgcattgttgaaatttgccgttttatattggagtacattcttaaataaatgtggttatgttatacatcaaaaaaaaaaaaaaaaaaaaacaaaaacacacaccaaaaaataaggggggcgcgcaccaaacgcccccgaggggggccccaactgccgcaccccgcttttcggcaacgcggcgccccaagggggccaaca

SEQ ID NO: 458990 - DNA, 3237 bp, Homo sapiens
aagccacgcagggccacgtctgcggttctgaggactgggtttgggtgcagacgttgttgcttgggcgcttctccgctgcgtgtaggtgaagggggcttcctgaccgagacatggatttaggtgctattacaaaatactcagcattacacgccaagcccaatggactgatccttcaatacgggactgctggatttcgaacgaaggcagaacatcttgatcatgtcatgtttcgcatgggattattagctgtcctgaggtcaaaacagacaaaatccactataggagtcatggtaacagcgtcccacaatcctgaggaagacaatggtgtaaaattggttgatcctttgggtgaaatgttggcaccatcctgggaggaacatgccacctgtttagcaaatgctgaggaacaagatatgcagagagtgcttattgacatcagcgagaaagaagctgtgaatctgcaacaagatgcctttgtagttattggtagagataccaggcccagcagtgagaaactttcacaatctgtaatagatggtgtgactgttctaggaggtcaattccatgattatggcttgttaacaacaccccagctgcactacatggtgtattgtcgaaacacgggtggccgatatggaaaggcaactatagaaggttactaccagaaactctctaaggcttttgtggaactcaccaaacaggcttcttgcagtggagatgaatacagatcacttaaggttgactgtgcaaatggcataggggccctgaagctaagggaaatggaacactacttctcacagggcctgtcagttcagctgtttaatgatgggtccaagggcaaactcaatcatttatgtggagctgactttgtgaaaagtcatcagaaacctccacagggaatggaaattaagtccaatgaaagatgctgttcttttgatggagatgcagacagaattgtttattactaccatgatgcagatggccactttcatctcatagatggagacaagatagcaacgttaattagcagtttccttaaagagctcctggtggagattggagaaagtttgaatattggtgttgtacaaactgcatatgcaaatggaagttcaacacggtatcttgaagaagttatgaaggtacctgtctattgcactaagactggtgtaaaacatttgcaccacaaggctcaagagtttgacattggagtttattttgaagcaaatgggcatggcactgcactgtttagtacagctgttgaaatgaagataaaacaatcagcagaacaactggaagataagaaaagaaaagctgctaagatgcttgaaaacattattgacttgtttaaccaggcagctggtgatgctatttctgacatgctggtgattgaagcaatcttggctctgaagggcttgactgtacaacagtgggatgctctctatacagatcttccaaacagacaacttaaagttcaggttgcagacaggagagttattagcactaccgatgctgaaagacaagcagttacacccccaggattacaggaggcaatcaatgacctggtgaagaagtacaagctttctcgagcttttgtccggccctctggtacagaagatgtcgtccgagtatatgcagaagcagactcacaagaaagtgcagatcaccttgcacatgaagtgagcttggcagtatttcagctggctggaggaattggagaaaggccccaaccaggtttctgaagataattttcatattcctgagaaactggactttttacaagtctttacaaaactgtcaataataatggcagtactaagagatttataatcataatgtttacaatgcagcctactggattgtctctagatctgtttttcttaaacactaacagaataattctttataaataggtaagccttacacttgttaaagaaatttacctctaatttcagtctcactaatgtaaaatactgggacttaagtatacaattcagtcactaactgtacagttttatgtggggaacaattcatgcaggctactggaaaattaaatcttattaccaactccttgtgatatctttgccatcaccatcacatgagcaagatgatgttttgcagcattccccattgctgatacaaatggagagggcagagaagactttatacaaccagtttttccattgcagagtcttaagaaagattattagatgacttacctatatgactaatgccatcaggaactcagaggtatgaatagggggttgtccatccctcttccatactgaggtggagatgctcatgcaatacttttaaggatgcatggtccagccttcagttattcttcactgctcttggtgaaggtatgtgggagaaaaactaattataatacgtttcccagcctctgatggagaaggaacaccattctgataccagaacatggttaataaggaaaagagaaaaatccccaaccaatcttaattgaaccaagtctgaaaccaatggaaaaaaaaaatgggtagtgtatattttgcaggtttaagacaactcaggacaataaaaacaatggactttacatgtgtatatatatagctctcttaggcaccataatcagtatgagccaacaatatttaaacttgattcaggccacattcagacatttgctcttatatacaaatatttaaattaaatacaatctgaaatgtgttctgttacatacaaaaaaggaaaaactatacaacgcagagcagtgtgtgtgttttaaataattacatttacatgtaagctaaatggaaccagcaatggtgctcaagtttttatcatcccttccagaaaatctttttctaccatctcttctattttttgcctggctttgctggaacatggtttgtggttctccagtttcatgtccttattagggaaggcatttgagtagaggataggactccctgagtgtcctccacatcggcttgtgactttgctgttgaagacttgactgagcacattgaagaacggcaggagctgctccatactgcgcacggtgcagatggtgagcagcaagtgccctggctcccaacccaatgttctccctgagttgtcttcctctggatttttctttgctcttttccgaagaagttttgctagtcgtaccacgtaaggtttaaattctcgttgatgtataccctgccttctgacttccaaacctgaatcatctgaggcttctggaataaaggcccatcg

SEQ ID NO: 458991 - DNA, 5898 bp, Homo sapiens
aagccacgcagggccacgtctgcggttctgaggactgggtttgggtgcagacgttgttgcttgggcgcttctccgctgcgtgtaggtgaagggggcttcctgaccgaggaagacaatggtgtaaaattggttgatcctttgggtgaaatgttggcaccatcctgggaggaacatgccacctgtttagcaaatgctgaggaacaagatatgcagagagtgcttattgacatcagcgagaaagaagctgtgaatctgcaacaagatgcctttgtagttattggtagagataccaggcccagcagtgagaaactttcacaatctgtaatagatggtgtgactgttctaggaggtcaattccatgattatggcttgttaacaacaccccagctgcactacatggtgtattgtcgaaacacgggtggccgatatggaaaggcaactatagaaggttactaccagaaactctctaaggcttttgtggaactcaccaaacaggcttcttgcagtggagatgaatacagatcacttaaggttgactgtgcaaatggcataggggccctgaagctaagggaaatggaacactacttctcacagggcctgtcagttcagctgtttaatgatgggtccaagggcaaactcaatcatttatgtggagctgactttgtgaaaagtcatcagaaacctccacagggaatggaaattaagtccaatgaaagatgctgttcttttgatggagatgcagacagaattgtttattactaccatgatgcagatggccactttcatctcatagatggagacaagatagcaacgttaattagcagtttccttaaagagctcctggtggagattggagaaagtttgaatattggtgttgtacaaactgcatatgcaaatggaagttcaacacggtatcttgaagaagttatgaaggtacctgtctattgcactaagactggtgtaaaacatttgcaccacaaggctcaagagtttgacattggagtttattttgaagcaaatgggcatggcactgcactgtttagtacagctgttgaaatgaagataaaacaatcagcagaacaactggaagataagaaaagaaaagctgctaagatgcttgaaaacattattgacttgtttaaccaggcagctggtgatgctatttctgacatgctggtgattgaagcaatcttggctctgaagggcttgactgtacaacagtgggatgctctctatacagatcttccaaacagacaacttaaagttcaggttgcagacaggagagttattagcactaccgatgctgaaagacaagcagttacacccccaggattacaggaggcaatcaatgacctggtgaagaagtacaagctttctcgagcttttgtccggccctctggtacagaagatgtcgtccgagtatatgcagaagcagactcacaagaaagtgcagatcaccttgcacatgaagtgagcttggcagtatttcagctggctggaggaattggagaaaggccccaaccaggtttctgaagataattttcatattcctgagaaactggactttttacaagtctttacaaaactgtcaataataatggcagtactaagagatttataatcataatgtttacaatgcagcctactggattgtctctagatctgtttttcttaaacactaacagaataattctttataaataggtaagccttacacttgttaaagaaatttacctctaatttcagtctcactaatgtaaaatactgggacttaagtatacaattcagtcactaactgtacagttttatgtggggaacaattcatgcaggctactggaaaattaaatcttattaccaactccttgtgatatctttgccatcaccatcacatgagcaagatgatgttttgcagcattccccattgctgatacaaatggagagggcagagaagactttatacaaccagtttttccattgcagagtcttaagaaagattattagatgacttacctatatgactaatgccatcaggaactcagaggtatgaatagggggttgtccatccctcttccatactgaggtggagatgctcatgcaatacttttaaggatgcatggtccagccttcagttattcttcactgctcttggtgaaggtatgtgggagaaaaactaattataatacgtttcccagcctctgatggagaaggaacaccattctgataccagaacatggttaataaggaaaagagaaaaatccccaaccaatcttaattgaaccaagtctgaaaccaatggaaaaaaaaaatgggtagtgtatattttgcaggtttaagacaactcaggacaataaaaacaatggactttacatgtgtatatatatagctctcttaggcaccataatcagtatgagccaacaatatttaaacttgattcaggccacattcagacatttgctcttatatacaaatatttaaattaaatacaatctgaaatgtgttctgttacatacaaaaaaggaaaaactatacaacgcagagcagtgtgtgtgttttaaataattacatttacatgtaagctaaatggaaccagcaatggtgctcaagtttttatcatcccttccagaaaatctttttctaccatctcttctattttttgcctggctttgctggaacatggtttgtggttctccagtttcatgtccttattagggaaggcatttgagtagaggataggactccctgagtgtcctccacatcggcttgtgactttgctgttgaagacttgactgagcacattgaagaacggcaggagctgctccatactgcgcacggtgcagatggtgagcagcaagtgccctggctcccaacccaatgttctccctgagttgtcttcctctggatttttctgcagaaaacaaaaagtgaactggtattaatacaacagacaatgtggtatgttagaaaaattaaaaatatataaactttggcaattggtcaagaaatgaatacaaatgacattaagtttctaactcctgacctgatcaaaacccttggtgcttctgagaccttttactgccatttattagttttacatggagcagtctaacattgtagtaatagttcccaactagaatgcgcagataagcttagttaacagaaatagctttgaacaggaatagagtcaaacataaaagttttatgttgtgctttgtatttactcaaaaagctcccaggtttctgaaccctcactactgtaaccaaggactaggtcacaaaattactacagaaaaaaggaacaaagtgctttatacatttcataatatatccccttttattataattagttaattcccttttatctaaatggcctaaatttgccatgatggtagcagtgtccaaagtgaataattactgtcagtactgcatcacagagaaaggaagggatccctcaggagacactgctgtctccttctgggttgtgctaaacaacatagggaggaaagctggacctggagtcaaaggaattgagttagtgtgctggctctgccatacttacggcacccttgggcaggatatacaaaggttcctcacttataaaatgggacagtctaaaactaccttttagtagagaagtcaaatgagaaggtatgtgaaaactctgtcaactaaatataaagactaataatttgggtattaagaggctagtttgagaagccacctgaattacacaaacacagctacagacatcattctgtctagagaaagataagagagaacaggttggttgaacttgggcagaatcacagatacaattccacactaaagaatgaaaataagcaatgaactagacagaaggaagaaatcatgaagacttaggaagcagaattacaatctgtcatattaacaaatggagtttgccttctaagatcagatgttgctcagaaactttcattgtttacctaataatttaatatcactagtttcctagtgggtcaagcagatgcaaaatccagcttattttcttctatgtgctctcaagcttattgcttattttaaagtaaaatcctgaaaaaggaaaatattaggttggtgcaaacgtaattgcggtttttgcattgttgaaatttgccgttttatattggagtacattcttaaataaatgtggttatgttatacatcattttaagcatatttctcactttttttttgctaatgacttattgctgtttatatttattttagactatggaaatgatgttagacaaaaatcaaatttagcgattttctgagttcaaaataggttataaagcagcagagacaacacacaacatcaacaatgcatttggcccaggaactgctaatgaacatacagtgccgtgatggctcaagaagttttgcaaaggagactagagccttgaagatgaggagtgcagtggccagtcatcggaaattgataatgaccaattgagaacatcatcgaagctgatcctcttacaactataagagagctgcccaagaactcaatgttgaccattttatggtcgttcggcatttgaagcaaattgaaaaggtgaaaaagctcaataaatgggtgcctcatgagctgagtgaaaaataaaaaaattcgttgttttgaagtgtcattttctctattctatgcaacaataatgaatcatttctctatcggattgtgatgtgtgccaaaaggtggattttatacgacaactggcgatgaccagctcagtggctggactgaaagaagctccaaagcacttcccaaagccaaacttgctccaaaaaatggtcatggtcattgtttggtggtttgctgccagtctgatccactacagctttctgaatccaggtgaaaccattacatctgataagtatgctcagcaaatcaatgagatgcaccaaaaactgcaatgcctgcagccggcattggccaccagaaagggcccaattcttttcacgacaacactgggccgcacgttgcacaaccaacgcttcgaaaattgaactaattgggctatgaagttttgcctcatctgccatattcacctgacctcttgccaacaaactaccacttctttaggcatctcagcaacgttttgcagggaaattgcttccacaactagcaggacacagaaaatgctttccaagagttcgtcaaatttggaagcatggatttttatgctacaggagtaaacaaacttatttctcattggcaaaaatgtgttgattgtaatggttcctattttaattaataaagatttgtgtgaacctagttataatgacttaaaattcatggtcccaaacagcaattacttttgcaccaaactaaaaatataagttaaaatggaagagtctaggagcaaaccaagaaaagatcacctacttcatcatctctggtcaaaaacaaaccaaaaaacttaacagctatcacttaagtttgcttcctagcaattatttagcttccagtctagattacaggatatataaaactttctttctttctttcttaactatgacactggcaccaatgagagtcctgtgactgactttcacatttccaccattactcaattactggtaccataccacctctaatcccctaaatcaaactgcaattcaacaataaagggcgtacagagatgactttgtcctgaaggaaaatgaatatccttgtaccctctatatagctaacttccaaatgtaagagaactatggggtaaccttttgtttctattcctatcaagatgagcctttaagagagggacttttattaagctcttgaccaagaagaatacacttgattcagagtttctgatgctcttaatcagaactatatgtattgtctcaatattaaataaagtcaaatgtttccatacaaatgat

SEQ ID NO: 458992 - DNA, 6622 bp, Homo sapiens
aagccacgcagggccacgtctgcggttctgaggactgggtttgggtgcagacgttgttgcttgggcgcttctccgctgcgtgtaggtgaagggggcttcctgaccgagacatggatttaggtgctattacaaaatactcagcattacacgccaagcccaatggactgatccttcaatacgggactgctggatttcgaacgaaggcagaacatcttgatcatgtcatgtttcgcatgggattattagctgtcctgaggtcaaaacagacaaaatccactataggagtcatggtaacagcgtcccacaatcctgaggaagacaatggtgtaaaattggttgatcctttgggtgaaatgttggcaccatcctgggaggaacatgccacctgtttagcaaatgctgaggaacaagatatgcagagagtgcttattgacatcagcgagaaagaagctgtgaatctgcaacaagatgcctttgtagttattggtagagataccaggcccagcagtgagaaactttcacaatctgtaatagatggtgtgactgttctaggaggtcaattccatgattatggcttgttaacaacaccccagctgcactacatggtgtattgtcgaaacacgggtggccgatatggaaaggcaactatagaaggttactaccagaaactctctaaggcttttgtggaactcaccaaacaggcttcttgcagtggagatgaatacagatcacttaaggttgactgtgcaaatggcataggggccctgaagctaagggaaatggaacactacttctcacagggcctgtcagttcagctgtttaatgatgggtccaagggcaaactcaatcatttatgtggagctgactttgtgaaaagtcatcagaaacctccacagggaatggaaattaagtccaatgaaagatgctgttcttttgatggagatgcagacagaattgtttattactaccatgatgcagatggccactttcatctcatagatggagacaagatagcaacgttaattagcagtttccttaaagagctcctggtggagattggagaaagtttgaatattggtgttgtacaaactgcatatgcaaatggaagttcaacacggtatcttgaagaagttatgaaggtacctgtctattgcactaagactggtgtaaaacatttgcaccacaaggctcaagagtttgacattggagtttattttgaagcaaatgggcatggcactgcactgtttagtacagctgttgaaatgaagataaaacaatcagcagaacaactggaagataagaaaagaaaagctgctaagatgcttgaaaacattattgacttgtttaaccaggcagctggtgatgctatttctgacatgctggtgattgaagcaatcttggctctgaagggcttgactgtacaacagtgggatgctctctatacagatcttccaaacagacaacttaaagttcaggttgcagacaggagagttattagcactaccgatgctgaaagacaagcagttacacccccaggattacaggaggcaatcaatgacctggtgaagaagtacaagctttctcgagcttttgtccggccctctggtacagaagatgtcgtccgagtatatgcagaagcagactcacaagggtcaagacttgtggtctggatttttattatttggcctcttcacatactccttaaagtgtgtgcaaagccagggcaaagtacagtgagtgcgctgaatagggaatcaggaggagacatttggcagctttcctgcagaagcttaagccatctcagagtctaatgaatatccatgatggatgaggagatggcaacagaggcattagtacttacttactgttaggccaattgtggattaaagttttattgaattttttcagttgtggaatgatagctatttttataatctgaattgattaaaaacttaccttatttagaagaatttggtctgttttccgtttatttaagggctttggaatttgttactgaaagatgaaaaaaggttttcattagaatttgttagtgaaacaaaatcaagaatcacccctctcttccccagagttccaagtaacatggtcttgcccatgttagacacatgctatgtctttctcatctaatctcttttaatgtaatttgcaggaaagtgcagatcaccttgcacatgaagtgagcttggcagtatttcagctggctggaggaattggagaaaggccccaaccaggtttctgaagataattttcatattcctgagaaactggactttttacaagtctttacaaaactgtcaataataatggcagtactaagagatttataatcataatgtttacaatgcagcctactggattgtctctagatctgtttttcttaaacactaacagaataattctttataaataggtaagccttacacttgttaaagaaatttacctctaatttcagtctcactaatgtaaaatactgggacttaagtatacaattcagtcactaactgtacagttttatgtggggaacaattcatgcaggctactggaaaattaaatcttattaccaactccttgtgatatctttgccatcaccatcacatgagcaagatgatgttttgcagcattccccattgctgatacaaatggagagggcagagaagactttatacaaccagtttttccattgcagagtcttaagaaagattattagatgacttacctatatgactaatgccatcaggaactcagaggtatgaatagggggttgtccatccctcttccatactgaggtggagatgctcatgcaatacttttaaggatgcatggtccagccttcagttattcttcactgctcttggtgaaggtatgtgggagaaaaactaattataatacgtttcccagcctctgatggagaaggaacaccattctgataccagaacatggttaataaggaaaagagaaaaatccccaaccaatcttaattgaaccaagtctgaaaccaatggaaaaaaaaaatgggtagtgtatattttgcaggtttaagacaactcaggacaataaaaacaatggactttacatgtgtatatatatagctctcttaggcaccataatcagtatgagccaacaatatttaaacttgattcaggccacattcagacatttgctcttatatacaaatatttaaattaaatacaatctgaaatgtgttctgttacatacaaaaaaggaaaaactatacaacgcagagcagtgtgtgtgttttaaataattacatttacatgtaagctaaatggaaccagcaatggtgctcaagtttttatcatcccttccagaaaatctttttctaccatctcttctattttttgcctggctttgctggaacatggtttgtggttctccagtttcatgtccttattagggaaggcatttgagtagaggataggactccctgagtgtcctccacatcggcttgtgactttgctgttgaagacttgactgagcacattgaagaacggcaggagctgctccatactgcgcacggtgcagatggtgagcagcaagtgccctggctcccaacccaatgttctccctgagttgtcttcctctggatttttctgcagaaaacaaaaagtgaactggtattaatacaacagacaatgtggtatgttagaaaaattaaaaatatataaactttggcaattggtcaagaaatgaatacaaatgacattaagtttctaactcctgacctgatcaaaacccttggtgcttctgagaccttttactgccatttattagttttacatggagcagtctaacattgtagtaatagttcccaactagaatgcgcagataagcttagttaacagaaatagctttgaacaggaatagagtcaaacataaaagttttatgttgtgctttgtatttactcaaaaagctcccaggtttctgaaccctcactactgtaaccaaggactaggtcacaaaattactacagaaaaaaggaacaaagtgctttatacatttcataatatatccccttttattataattagttaattcccttttatctaaatggcctaaatttgccatgatggtagcagtgtccaaagtgaataattactgtcagtactgcatcacagagaaaggaagggatccctcaggagacactgctgtctccttctgggttgtgctaaacaacatagggaggaaagctggacctggagtcaaaggaattgagttagtgtgctggctctgccatacttacggcacccttgggcaggatatacaaaggttcctcacttataaaatgggacagtctaaaactaccttttagtagagaagtcaaatgagaaggtatgtgaaaactctgtcaactaaatataaagactaataatttgggtattaagaggctagtttgagaagccacctgaattacacaaacacagctacagacatcattctgtctagagaaagataagagagaacaggttggttgaacttgggcagaatcacagatacaattccacactaaagaatgaaaataagcaatgaactagacagaaggaagaaatcatgaagacttaggaagcagaattacaatctgtcatattaacaaatggagtttgccttctaagatcagatgttgctcagaaactttcattgtttacctaataatttaatatcactagtttcctagtgggtcaagcagatgcaaaatccagcttattttcttctatgtgctctcaagcttattgcttattttaaagtaaaatcctgaaaaaggaaaatattaggttggtgcaaacgtaattgcggtttttgcattgttgaaatttgccgttttatattggagtacattcttaaataaatgtggttatgttatacatcattttaagcatatttctcactttttttttgctaatgacttattgctgtttatatttattttagactatggaaatgatgttagacaaaaatcaaatttagcgattttctgagttcaaaataggttataaagcagcagagacaacacacaacatcaacaatgcatttggcccaggaactgctaatgaacatacagtgccgtgatggctcaagaagttttgcaaaggagactagagccttgaagatgaggagtgcagtggccagtcatcggaaattgataatgaccaattgagaacatcatcgaagctgatcctcttacaactataagagagctgcccaagaactcaatgttgaccattttatggtcgttcggcatttgaagcaaattgaaaaggtgaaaaagctcaataaatgggtgcctcatgagctgagtgaaaaataaaaaaattcgttgttttgaagtgtcattttctctattctatgcaacaataatgaatcatttctctatcggattgtgatgtgtgccaaaaggtggattttatacgacaactggcgatgaccagctcagtggctggactgaaagaagctccaaagcacttcccaaagccaaacttgctccaaaaaatggtcatggtcattgtttggtggtttgctgccagtctgatccactacagctttctgaatccaggtgaaaccattacatctgataagtatgctcagcaaatcaatgagatgcaccaaaaactgcaatgcctgcagccggcattggccaccagaaagggcccaattcttttcacgacaacactgggccgcacgttgcacaaccaacgcttcgaaaattgaactaattgggctatgaagttttgcctcatctgccatattcacctgacctcttgccaacaaactaccacttctttaggcatctcagcaacgttttgcagggaaattgcttccacaactagcaggacacagaaaatgctttccaagagttcgtcaaatttggaagcatggatttttatgctacaggagtaaacaaacttatttctcattggcaaaaatgtgttgattgtaatggttcctattttaattaataaagatttgtgtgaacctagttataatgacttaaaattcatggtcccaaacagcaattacttttgcaccaaactaaaaatataagttaaaatggaagagtctaggagcaaaccaagaaaagatcacctacttcatcatctctggtcaaaaacaaaccaaaaaacttaacagctatcacttaagtttgcttcctagcaattatttagcttccagtctagattacaggatatataaaactttctttctttctttcttaactatgacactggcaccaatgagagtcctgtgactgactttcacatttccaccattactcaattactggtaccataccacctctaatcccctaaatcaaactgcaattcaacaataaagggcgtacagagatgactttgtcctgaaggaaaatgaatatccttgtaccctctatatagctaacttccaaatgtaagagaactatggggtaaccttttgtttctattcctatcaagatgagcctttaagagagggacttttattaagctcttgaccaagaagaatacacttgattcagagtttctgatgctcttaatcagaactatatgtattgtctcaatattaaataaagtcaaatgtttccatacaaatgat

SEQ ID NO: 458993 - DNA, 5044 bp, Homo sapiens
tatctctgggatactaggtatgcaagaaacatttgacatctgagtaattgctgtatttctttaaatgcatgtgttataggtacctgtctattgcactaagactggtgtaaaacatttgcaccacaaggctcaagagtttgacattggagtttattttgaagcaaatgggcatggcactgcactgtttagtacagctgttgaaatgaagataaaacaatcagcagaacaactggaagataagaaaagaaaagctgctaagatgcttgaaaacattattgacttgtttaaccaggcagctggtgatgctatttctgacatgctggtgattgaagcaatcttggctctgaagggcttgactgtacaacagtgggatgctctctatacagatcttccaaacagacaacttaaagttcaggttgcagacaggagagttattagcactaccgatgctgaaagacaagcagttacacccccaggattacaggaggcaatcaatgacctggtgaagaagtacaagctttctcgagcttttgtccggccctctggtacagaagatgtcgtccgagtatatgcagaagcagactcacaagaaagtgcagatcaccttgcacatgaagtgagcttggcagtatttcagctggctggaggaattggagaaaggccccaaccaggtttctgaagataattttcatattcctgagaaactggactttttacaagtctttacaaaactgtcaataataatggcagtactaagagatttataatcataatgtttacaatgcagcctactggattgtctctagatctgtttttcttaaacactaacagaataattctttataaataggtaagccttacacttgttaaagaaatttacctctaatttcagtctcactaatgtaaaatactgggacttaagtatacaattcagtcactaactgtacagttttatgtggggaacaattcatgcaggctactggaaaattaaatcttattaccaactccttgtgatatctttgccatcaccatcacatgagcaagatgatgttttgcagcattccccattgctgatacaaatggagagggcagagaagactttatacaaccagtttttccattgcagagtcttaagaaagattattagatgacttacctatatgactaatgccatcaggaactcagaggtatgaatagggggttgtccatccctcttccatactgaggtggagatgctcatgcaatacttttaaggatgcatggtccagccttcagttattcttcactgctcttggtgaaggtatgtgggagaaaaactaattataatacgtttcccagcctctgatggagaaggaacaccattctgataccagaacatggttaataaggaaaagagaaaaatccccaaccaatcttaattgaaccaagtctgaaaccaatggaaaaaaaaaatgggtagtgtatattttgcaggtttaagacaactcaggacaataaaaacaatggactttacatgtgtatatatatagctctcttaggcaccataatcagtatgagccaacaatatttaaacttgattcaggccacattcagacatttgctcttatatacaaatatttaaattaaatacaatctgaaatgtgttctgttacatacaaaaaaggaaaaactatacaacgcagagcagtgtgtgtgttttaaataattacatttacatgtaagctaaatggaaccagcaatggtgctcaagtttttatcatcccttccagaaaatctttttctaccatctcttctattttttgcctggctttgctggaacatggtttgtggttctccagtttcatgtccttattagggaaggcatttgagtagaggataggactccctgagtgtcctccacatcggcttgtgactttgctgttgaagacttgactgagcacattgaagaacggcaggagctgctccatactgcgcacggtgcagatggtgagcagcaagtgccctggctcccaacccaatgttctccctgagttgtcttcctctggatttttctgcagaaaacaaaaagtgaactggtattaatacaacagacaatgtggtatgttagaaaaattaaaaatatataaactttggcaattggtcaagaaatgaatacaaatgacattaagtttctaactcctgacctgatcaaaacccttggtgcttctgagaccttttactgccatttattagttttacatggagcagtctaacattgtagtaatagttcccaactagaatgcgcagataagcttagttaacagaaatagctttgaacaggaatagagtcaaacataaaagttttatgttgtgctttgtatttactcaaaaagctcccaggtttctgaaccctcactactgtaaccaaggactaggtcacaaaattactacagaaaaaaggaacaaagtgctttatacatttcataatatatccccttttattataattagttaattcccttttatctaaatggcctaaatttgccatgatggtagcagtgtccaaagtgaataattactgtcagtactgcatcacagagaaaggaagggatccctcaggagacactgctgtctccttctgggttgtgctaaacaacatagggaggaaagctggacctggagtcaaaggaattgagttagtgtgctggctctgccatacttacggcacccttgggcaggatatacaaaggttcctcacttataaaatgggacagtctaaaactaccttttagtagagaagtcaaatgagaaggtatgtgaaaactctgtcaactaaatataaagactaataatttgggtattaagaggctagtttgagaagccacctgaattacacaaacacagctacagacatcattctgtctagagaaagataagagagaacaggttggttgaacttgggcagaatcacagatacaattccacactaaagaatgaaaataagcaatgaactagacagaaggaagaaatcatgaagacttaggaagcagaattacaatctgtcatattaacaaatggagtttgccttctaagatcagatgttgctcagaaactttcattgtttacctaataatttaatatcactagtttcctagtgggtcaagcagatgcaaaatccagcttattttcttctatgtgctctcaagcttattgcttattttaaagtaaaatcctgaaaaaggaaaatattaggttggtgcaaacgtaattgcggtttttgcattgttgaaatttgccgttttatattggagtacattcttaaataaatgtggttatgttatacatcattttaagcatatttctcactttttttttgctaatgacttattgctgtttatatttattttagactatggaaatgatgttagacaaaaatcaaatttagcgattttctgagttcaaaataggttataaagcagcagagacaacacacaacatcaacaatgcatttggcccaggaactgctaatgaacatacagtgccgtgatggctcaagaagttttgcaaaggagactagagccttgaagatgaggagtgcagtggccagtcatcggaaattgataatgaccaattgagaacatcatcgaagctgatcctcttacaactataagagagctgcccaagaactcaatgttgaccattttatggtcgttcggcatttgaagcaaattgaaaaggtgaaaaagctcaataaatgggtgcctcatgagctgagtgaaaaataaaaaaattcgttgttttgaagtgtcattttctctattctatgcaacaataatgaatcatttctctatcggattgtgatgtgtgccaaaaggtggattttatacgacaactggcgatgaccagctcagtggctggactgaaagaagctccaaagcacttcccaaagccaaacttgctccaaaaaatggtcatggtcattgtttggtggtttgctgccagtctgatccactacagctttctgaatccaggtgaaaccattacatctgataagtatgctcagcaaatcaatgagatgcaccaaaaactgcaatgcctgcagccggcattggccaccagaaagggcccaattcttttcacgacaacactgggccgcacgttgcacaaccaacgcttcgaaaattgaactaattgggctatgaagttttgcctcatctgccatattcacctgacctcttgccaacaaactaccacttctttaggcatctcagcaacgttttgcagggaaattgcttccacaactagcaggacacagaaaatgctttccaagagttcgtcaaatttggaagcatggatttttatgctacaggagtaaacaaacttatttctcattggcaaaaatgtgttgattgtaatggttcctattttaattaataaagatttgtgtgaacctagttataatgacttaaaattcatggtcccaaacagcaattacttttgcaccaaactaaaaatataagttaaaatggaagagtctaggagcaaaccaagaaaagatcacctacttcatcatctctggtcaaaaacaaaccaaaaaacttaacagctatcacttaagtttgcttcctagcaattatttagcttccagtctagattacaggatatataaaactttctttctttctttcttaactatgacactggcaccaatgagagtcctgtgactgactttcacatttccaccattactcaattactggtaccataccacctctaatcccctaaatcaaactgcaattcaacaataaagggcgtacagagatgactttgtcctgaaggaaaatgaatatccttgtaccctctatatagctaacttccaaatgtaagagaactatggggtaaccttttgtttctattcctatcaagatgagcctttaagagagggacttttattaagctcttgaccaagaagaatacacttgattcagagtttctgatgctcttaatcagaactatatgtattgtctcaatattaaataaagtcaaatgtttccatacaaatgat

SEQ ID NO: 458994 - DNA, 5106 bp, Homo sapiens
actcttgtgacatgaaaacaaccagctttgtagttcatttctaagtcaactgatagcattctggactcttgatttgtttttcaaaatatttcctttaaatgacagccttactctgtgcctgtttccctgacaggggtcaagacttgtggtctggatttttattatttggcctcttcacatactccttaaagtgtgtgcaaagccagggcaaagtacagtgagtgcgctgaatagggaatcaggaggagacatttggcagctttcctgcagaagcttaagccatctcagagtctaatgaatatccatgatggatgaggagatggcaacagaggcattagtacttacttactgttaggccaattgtggattaaagttttattgaattttttcagttgtggaatgatagctatttttataatctgaattgattaaaaacttaccttatttagaagaatttggtctgttttccgtttatttaagggctttggaatttgttactgaaagatgaaaaaaggttttcattagaatttgttagtgaaacaaaatcaagaatcacccctctcttccccagagttccaagtaacatggtcttgcccatgttagacacatgctatgtctttctcatctaatctcttttaatgtaatttgcaggaaagtgcagatcaccttgcacatgaagtgagcttggcagtatttcagctggctggaggaattggagaaaggccccaaccaggtttctgaagataattttcatattcctgagaaactggactttttacaagtctttacaaaactgtcaataataatggcagtactaagagatttataatcataatgtttacaatgcagcctactggattgtctctagatctgtttttcttaaacactaacagaataattctttataaataggtaagccttacacttgttaaagaaatttacctctaatttcagtctcactaatgtaaaatactgggacttaagtatacaattcagtcactaactgtacagttttatgtggggaacaattcatgcaggctactggaaaattaaatcttattaccaactccttgtgatatctttgccatcaccatcacatgagcaagatgatgttttgcagcattccccattgctgatacaaatggagagggcagagaagactttatacaaccagtttttccattgcagagtcttaagaaagattattagatgacttacctatatgactaatgccatcaggaactcagaggtatgaatagggggttgtccatccctcttccatactgaggtggagatgctcatgcaatacttttaaggatgcatggtccagccttcagttattcttcactgctcttggtgaaggtatgtgggagaaaaactaattataatacgtttcccagcctctgatggagaaggaacaccattctgataccagaacatggttaataaggaaaagagaaaaatccccaaccaatcttaattgaaccaagtctgaaaccaatggaaaaaaaaaatgggtagtgtatattttgcaggtttaagacaactcaggacaataaaaacaatggactttacatgtgtatatatatagctctcttaggcaccataatcagtatgagccaacaatatttaaacttgattcaggccacattcagacatttgctcttatatacaaatatttaaattaaatacaatctgaaatgtgttctgttacatacaaaaaaggaaaaactatacaacgcagagcagtgtgtgtgttttaaataattacatttacatgtaagctaaatggaaccagcaatggtgctcaagtttttatcatcccttccagaaaatctttttctaccatctcttctattttttgcctggctttgctggaacatggtttgtggttctccagtttcatgtccttattagggaaggcatttgagtagaggataggactccctgagtgtcctccacatcggcttgtgactttgctgttgaagacttgactgagcacattgaagaacggcaggagctgctccatactgcgcacggtgcagatggtgagcagcaagtgccctggctcccaacccaatgttctccctgagttgtcttcctctggatttttctgcagaaaacaaaaagtgaactggtattaatacaacagacaatgtggtatgttagaaaaattaaaaatatataaactttggcaattggtcaagaaatgaatacaaatgacattaagtttctaactcctgacctgatcaaaacccttggtgcttctgagaccttttactgccatttattagttttacatggagcagtctaacattgtagtaatagttcccaactagaatgcgcagataagcttagttaacagaaatagctttgaacaggaatagagtcaaacataaaagttttatgttgtgctttgtatttactcaaaaagctcccaggtttctgaaccctcactactgtaaccaaggactaggtcacaaaattactacagaaaaaaggaacaaagtgctttatacatttcataatatatccccttttattataattagttaattcccttttatctaaatggcctaaatttgccatgatggtagcagtgtccaaagtgaataattactgtcagtactgcatcacagagaaaggaagggatccctcaggagacactgctgtctccttctgggttgtgctaaacaacatagggaggaaagctggacctggagtcaaaggaattgagttagtgtgctggctctgccatacttacggcacccttgggcaggatatacaaaggttcctcacttataaaatgggacagtctaaaactaccttttagtagagaagtcaaatgagaaggtatgtgaaaactctgtcaactaaatataaagactaataatttgggtattaagaggctagtttgagaagccacctgaattacacaaacacagctacagacatcattctgtctagagaaagataagagagaacaggttggttgaacttgggcagaatcacagatacaattccacactaaagaatgaaaataagcaatgaactagacagaaggaagaaatcatgaagacttaggaagcagaattacaatctgtcatattaacaaatggagtttgccttctaagatcagatgttgctcagaaactttcattgtttacctaataatttaatatcactagtttcctagtgggtcaagcagatgcaaaatccagcttattttcttctatgtgctctcaagcttattgcttattttaaagtaaaatcctgaaaaaggaaaatattaggttggtgcaaacgtaattgcggtttttgcattgttgaaatttgccgttttatattggagtacattcttaaataaatgtggttatgttatacatcattttaagcatatttctcactttttttttgctaatgacttattgctgtttatatttattttagactatggaaatgatgttagacaaaaatcaaatttagcgattttctgagttcaaaataggttataaagcagcagagacaacacacaacatcaacaatgcatttggcccaggaactgctaatgaacatacagtgccgtgatggctcaagaagttttgcaaaggagactagagccttgaagatgaggagtgcagtggccagtcatcggaaattgataatgaccaattgagaacatcatcgaagctgatcctcttacaactataagagagctgcccaagaactcaatgttgaccattttatggtcgttcggcatttgaagcaaattgaaaaggtgaaaaagctcaataaatgggtgcctcatgagctgagtgaaaaataaaaaaattcgttgttttgaagtgtcattttctctattctatgcaacaataatgaatcatttctctatcggattgtgatgtgtgccaaaaggtggattttatacgacaactggcgatgaccagctcagtggctggactgaaagaagctccaaagcacttcccaaagccaaacttgctccaaaaaatggtcatggtcattgtttggtggtttgctgccagtctgatccactacagctttctgaatccaggtgaaaccattacatctgataagtatgctcagcaaatcaatgagatgcaccaaaaactgcaatgcctgcagccggcattggccaccagaaagggcccaattcttttcacgacaacactgggccgcacgttgcacaaccaacgcttcgaaaattgaactaattgggctatgaagttttgcctcatctgccatattcacctgacctcttgccaacaaactaccacttctttaggcatctcagcaacgttttgcagggaaattgcttccacaactagcaggacacagaaaatgctttccaagagttcgtcaaatttggaagcatggatttttatgctacaggagtaaacaaacttatttctcattggcaaaaatgtgttgattgtaatggttcctattttaattaataaagatttgtgtgaacctagttataatgacttaaaattcatggtcccaaacagcaattacttttgcaccaaactaaaaatataagttaaaatggaagagtctaggagcaaaccaagaaaagatcacctacttcatcatctctggtcaaaaacaaaccaaaaaacttaacagctatcacttaagtttgcttcctagcaattatttagcttccagtctagattacaggatatataaaactttctttctttctttcttaactatgacactggcaccaatgagagtcctgtgactgactttcacatttccaccattactcaattactggtaccataccacctctaatcccctaaatcaaactgcaattcaacaataaagggcgtacagagatgactttgtcctgaaggaaaatgaatatccttgtaccctctatatagctaacttccaaatgtaagagaactatggggtaaccttttgtttctattcctatcaagatgagcctttaagagagggacttttattaagctcttgaccaagaagaatacacttgattcagagtttctgatgctcttaatcagaactatatgtattgtctcaatattaaataaagtcaaatgtttccatacaaatgat

SEQ ID NO: 458995 - DNA, 608 bp, Homo sapiens
ctgcactacatggtgtattgtcgaaacacgggtggccgatatggaaaggcaactatagaaggttactaccagaaactctctaaggcttttgtggaactcaccaaacaggtgaaaagtttattgaacatggttaaagttaaacaaatgaataaagtaacatggtctactgaacaaattatcttgtttgtcatgcctcctctttccttttccaaagatgctgcatatctccttttttgtttttctctagggctacacaaggttctggtctatgtatcctgctaacttacattggcgtttacttggcaaattatgtagtacattctgagatactttggggaagcaaacatggtgggggtcttgacgatggtatcataagtattcattcagatgaatttgatcttagttaatgtaggtgctgttggcttaatacctgaggcatgtactattgagattttcttctaggtatattggcttgttaaatgtagagagatttgagaagtataattcgtttgatcaacaaatattgagtatatgtccttaccaggcacaattaactaaaagcccttgctctcatagaacttataatttggggtgaggatagctgggag

SEQ ID NO: 458996 - DNA, 425 bp, Homo sapiens
attattagtttaattgattatgtgtgtcatgaggatttaatgaggtaatatatatacataaaatacctaatccagggtccagtattaatatttggtgtttattgttgaagctgctcagccatcactgtctttggttgaagggaaacagcttttgagttctgttctcaactcagcctcatgagtatgcacagattgcttattgtttgtttttcttttaaggaagacaatggtgtaaaattggttgatcctttgggtgaaatgttggcaccatcctgggaggaacatgccacctgtttagcaaatgctgaggaacaagatatgcagagagtgcttattgacatcagcgagaaagaagctgtgaatctgcaacaagatgcctttgtagttattggtagagataccaggtgatgataagagttactggt

SEQ ID NO: 458997 - DNA, 561 bp, Homo sapiens
aagccacgcagggccacgtctgcggttctgaggactgggtttgggtgcagacgttgttgcttgggcgcttctccgctgcgtgtaggtgaagggggcttcctgaccgagacatggatttaggtgctattacaaaatactcagcattacacgccaagcccaatggactgatccttcaatacgggactgctggatttcgaacgaaggcagaacatcttgatcatgtcatgtttcgcatgggattattagctgtcctgaggtcaaaacagacaaaatccactataggagtcatggtaacagcgtcccacaatcctgaggaagacaatggtgtaaaattggttgatcctttgggtgaaatgttggcaccatcctgggaggaacatgccacctgtttagcaaatgctgaggaacaagatatgcagagagtgcttattgacatcagcgagaaagaagctgtgaatctgcaacaagatgcctttgtagttattggtagagataccagcccaaccgtggagaaactttcacaaacttgtaaaaatggtggggatggtccttggaagtgaa

SEQ ID NO: 458998 - DNA, 4386 bp, Homo sapiens
aagccacgcagggccacgtctgcggttctgaggactgggtttgggtgcagacgttgttgcttgggcgcttctccgctgcgtgtaggtgaagggggcttcctgaccgagacatggatttaggtgctattacaaaatactcagcattacacgccaagcccaatggactgatccttcaatacgggactgctggatttcgaacgaaggcagaacatcttgatcatgtcatgtttcgcatgggattattagctgtcctgaggtcaaaacagacaaaatccactataggagtcatggtaacagcgtcccacaatcctgaggaagacaatggtgtaaaattggttgatcctttgggtgaaatgttggcaccatcctgggaggaacatgccacctgtttagcaaatgctgaggaacaagatatgcagagagtgcttattgacatcagcgagaaagaagctgtgaatctgcaacaagatgcctttgtagttattggtagagataccaggcccagcagtgagaaactttcacaatctgtaatagatggtgtgactgttctaggaggtcaattccatgattatggcttgttaacaacaccccagctgcactacatggtgtattgtcgaaacacgggtggccgatatggaaaggcaactatagaaggttactaccagaaactctctaaggcttttgtggaactcaccaaacaggcttcttgcagtggagatgaatacagatcacttaaggttgactgtgcaaatggcataggggccctgaagctaagggaaatggaacactacttctcacagggcctgtcagttcagctgtttaatgatgggtccaagggcaaactcaatcatttatgtggagctgactttgtgaaaagtcatcagaaacctccacagggaatggaaattaagtccaatgaaagatgctgttcttttgatggagatgcagacagaattgtttattactaccatgatgcagatggccactttcatctcatagatggagacaagatagcaacgttaattagcagtttccttaaagagctcctggtggagattggagaaagtttgaatattggtgttgtacaaactgcatatgcaaatggaagttcaacacggtatcttgaagaagttatgaaggtacctgtctattgcactaagactggtgtaaaacatttgcaccacaaggctcaagagtttgacattggagtttattttgaagcaaatgggcatggcactgcactgtttagtacagctgttgaaatgaagataaaacaatcagcagaacaactggaagataagaaaagaaaagctgctaagatgcttgaaaacattattgacttgtttaaccaggcagctggtgatgctatttctgacatgctggtgattgaagcaatcttggctctgaagggcttgactgtacaacagtgggatgctctctatacagatcttccaaacagacaacttaaagttcaggttgcagacaggagagttattagcactaccgatgctgaaagacaagcagttacacccccaggattacaggaggcaatcaatgacctggtgaagaagtacaagctttctcgagcttttgtccggccctctggtacagaagatgtcgtccgagtatatgcagaagcagactcacaagaaagtgcagatcaccttgcacatgaagtgagcttggcagtatttcagctggctggaggaattggagaaaggccccaaccaggtttctgaagataattttcatattcctgagaaactggactttttacaagtctttacaaaactgtcaataataatggcagtactaagagatttataatcataatgtttacaatgcagcctactggattgtctctagatctgtttttcttaaacactaacagaataattctttataaataggtaagccttacacttgttaaagaaatttacctctaatttcagtctcactaatgtaaaatactgggacttaagtatacaattcagtcactaactgtacagttttatgtggggaacaattcatgcaggctactggaaaattaaatcttattaccaactccttgtgatatctttgccatcaccatcacatgagcaagatgatgttttgcagcattccccattgctgatacaaatggagagggcagagaagactttatacaaccagtttttccattgcagagtcttaagaaagattattagatgacttacctatatgactaatgccatcaggaactcagaggtatgaatagggggttgtccatccctcttccatactgaggtggagatgctcatgcaatacttttaaggatgcatggtccagccttcagttattcttcactgctcttggtgaaggtatgtgggagaaaaactaattataatacgtttcccagcctctgatggagaaggaacaccattctgataccagaacatggttaataaggaaaagagaaaaatccccaaccaatcttaattgaaccaagtctgaaaccaatggaaaaaaaaaatgggtagtgtatattttgcaggtttaagacaactcaggacaataaaaacaatggactttacatgtgtatatatatagctctcttaggcaccataatcagtatgagccaacaatatttaaacttgattcaggccacattcagacatttgctcttatatacaaatatttaaattaaatacaatctgaaatgtgttctgttacatacaaaaaaggaaaaactatacaacgcagagcagtgtgtgtgttttaaataattacatttacatgtaagctaaatggaaccagcaatggtgctcaagtttttatcatcccttccagaaaatctttttctaccatctcttctattttttgcctggctttgctggaacatggtttgtggttctccagtttcatgtccttattagggaaggcatttgagtagaggataggactccctgagtgtcctccacatcggcttgtgactttgctgttgaagacttgactgagcacattgaagaacggcaggagctgctccatactgcgcacggtgcagatggtgagcagcaagtgccctggctcccaacccaatgttctccctgagttgtcttcctctggatttttctgcagaaaacaaaaagtgaactggtattaatacaacagacaatgtggtatgttagaaaaattaaaaatatataaactttggcaattggtcaagaaatgaatacaaatgacattaagtttctaactcctgacctgatcaaaacccttggtgcttctgagaccttttactgccatttattagttttacatggagcagtctaacattgtagtaatagttcccaactagaatgcgcagataagcttagttaacagaaatagctttgaacaggaatagagtcaaacataaaagttttatgttgtgctttgtatttactcaaaaagctcccaggtttctgaaccctcactactgtaaccaaggactaggtcacaaaattactacagaaaaaaggaacaaagtgctttatacatttcataatatatccccttttattataattagttaattcccttttatctaaatggcctaaatttgccatgatggtagcagtgtccaaagtgaataattactgtcagtactgcatcacagagaaaggaagggatccctcaggagacactgctgtctccttctgggttgtgctaaacaacatagggaggaaagctggacctggagtcaaaggaattgagttagtgtgctggctctgccatacttacggcacccttgggcaggatatacaaaggttcctcacttataaaatgggacagtctaaaactaccttttagtagagaagtcaaatgagaaggtatgtgaaaactctgtcaactaaatataaagactaataatttgggtattaagaggctagtttgagaagccacctgaattacacaaacacagctacagacatcattctgtctagagaaagataagagagaacaggttggttgaacttgggcagaatcacagatacaattccacactaaagaatgaaaataagcaatgaactagacagaaggaagaaatcatgaagacttaggaagcagaattacaatctgtcatattaacaaatggagtttgccttctaagatcagatgttgctcagaaactttcattgtttacctaataatttaatatcactagtttcctagtgggtcaagcagatgcaaaatccagcttattttcttctatgtgctctcaagcttattgcttattttaaagtaaaatcctgaaaaaggaaaatattaggttggtgcaaacgtaattgcggtttttgcattgttgaaatttgccgttttatattggagtacattcttaaataaatgtggttatgttatacatca

SEQ ID NO: 458999 - DNA, 4332 bp, Homo sapiens
aagccacgcagggccacgtctgcggttctgaggactgggtttgggtgcagacgttgttgcttgggcgcttctccgctgcgtgtaggtgaagggggcttcctgaccgagacatggatttaggtgctattacaaaatactcagcattacacgccaagcccaatggactgatccttcaatacgggactgctggatttcgaacgaaggcagaacatcttgatcatgtcatgtttcgcatgggattattagctgtcctgaggtcaaaacagacaaaatccactataggagtcatggtaacagcgtcccacaatcctgaggaagacaatggtgtaaaattggttgatcctttgggtgaaatgttggcaccatcctgggaggaacatgccacctgtttagcaaatgctgaggaacaagatatgcagagagtgcttattgacatcagcgagaaagaagctgtgaatctgcaacaagatgcctttgtagttattggtagagataccaggcccagcagtgagaaactttcacaatctgtaatagatggtgtgactgttctaggaggtcaattccatgattatggcttgttaacaacaccccagctgcactacatggtgtattgtcgaaacacgggtggccgatatggaaaggcaactatagaaggttactaccagaaactctctaaggcttttgtggaactcaccaaacaggcttcttgcagtggagatgaatacagatcacttaaggttgactgtgcaaatggcataggggccctgaagctaagggaaatggaacactacttctcacagggcctgtcagttcagctgtttaatgatgggtccaagggcaaactcaatcatttatgtggagctgactttgtgaaaagtcatcagaaacctccacagggaatggaaattaagtccaatgaaagatgctgttcttttgatggagatgcagacagaattgtttattactaccatgatgcagatggccactttcatctcatagatggagacaagatagcaacgttaattagcagtttccttaaagagctcctggtggagattggagaaagtttgaatattggtgttgtacaaactgcatatgcaaatggaagttcaacacggtatcttgaagaagttatgaaggtacctgtctattgcactaagactggtgtaaaacatttgcaccacaaggctcaagagtttgacattggagtttattttgaagcaaatgggcatggcactgcactgtttagtacagctgttgaaatgaagataaaacaatcagcagaacaactggaagataagaaaagaaaagctgctaagatgcttgaaaacattattgacttgtttaaccaggcagctggtgatgctatttctgacatgctggtgattgaagcaatcttggctctgaagggcttgactgtacaacagtgggatgctctctatacagatcttccaaacagacaacttaaagttcaggttgcagacaggagagttattagcactaccgatgctgaaagacaagcagttacacccccaggattacaggaggcaatcaatgacctggtgaagaagtacaagctttctcgagcttttgtccggccctctggtacagaagatgtcgtccgagtatatgcagaagcagactcacaagaaagtgcagatcaccttgcacatgaagtgagcttggcagtatttcagctggctggaggaattggagaaaggccccaaccaggtttctgaagataattttcatattcctgagaaactggactttttacaagtctttacaaaactgtcaataataatggcagtactaagagatttataatcataatgtttacaatgcagcctactggattgtctctagatctgtttttcttaaacactaacagaataattctttataaataggtaagccttacacttgttaaagaaatttacctctaatttcagtctcactaatgtaaaatactgggacttaagtatacaattcagtcactaactgtacagttttatgtggggaacaattcatgcaggctactggaaaattaaatcttattaccaactccttgtgatatctttgccatcaccatcacatgagcaagatgatgttttgcagcattccccattgctgatacaaatggagagggcagagaagactttatacaaccagtttttccattgcagagtcttaagaaagattattagatgacttacctatatgactaatgccatcaggaactcagaggtatgaatagggggttgtccatccctcttccatactgaggtggagatgctcatgcaatacttttaaggatgcatggtccagccttcagttattcttcactgctcttggtgaaggtatgtgggagaaaaactaattataatacgtttcccagcctctgatggagaaggaacaccattctgataccagaacatggttaataaggaaaagagaaaaatccccaaccaatcttaattgaaccaagtctgaaaccaatggaaaaaaaaaatgggtagtgtatattttgcaggtttaagacaactcaggacaataaaaacaatggactttacatgtgtatatatatagctctcttaggcaccataatcagtatgagccaacaatatttaaacttgattcaggccacattcagacatttgctcttatatacaaatatttaaattaaatacaatctgaaatgtgttctgttacatacaaaaaaggaaaaactatacaacgcagagcagtgtgtgtgttttaaataattacatttacatgtaagctaaatggaaccagcaatggtgctcaagtttttatcatcccttccagaaaatctttttctaccatctcttctattttttgcctggctttgctggaacatggtttgtggttctccagtttcatgtccttattagggaaggcatttgagtagaggataggactccctgagtgtcctccacatcggcttgtgactttgctgttgaagacttgactgagcacattgaagaacggcaggagctgctccatactgcgcacggtgcagatggtgagcagcaagtgccctggctcccaacccaatgttctccctgagttgtcttcctctggatttttctgcagaaaacaaaaagtgaactggtattaatacaacagacaatgtggtatgttagaaaaattaaaaatatataaactttggcaattggtcaagaaatgaatacaaatgacattaagtttctaactcctgacctgatcaaaacccttggtgcttctgagaccttttactgccatttattagttttacatggagcagtctaacattgtagtaatagttcccaactagaatgcgcagataagcttagttaacagaaatagctttgaacaggaatagagtcaaacataaaagttttatgttgtgctttgtatttactcaaaaagctcccaggtttctgaaccctcactactgtaaccaaggactaggtcacaaaattactacagaaaaaaggaacaaagtgctttatacatttcataatatatccccttttattataattagttaattcccttttatctaaatggcctaaatttgccatgatggtagcagtgtccaaagtgaataattactgtcagtactgcatcacagagaaaggaagggatccctcaggagacactgctgtctccttctgggttgtgctaaacaacatagggaggaaagctggacctggagtcaaaggaattgagttagtgtgctggctctgccatacttacggcacccttgggcagtagagaagtcaaatgagaaggtatgtgaaaactctgtcaactaaatataaagactaataatttgggtattaagaggctagtttgagaagccacctgaattacacaaacacagctacagacatcattctgtctagagaaagataagagagaacaggttggttgaacttgggcagaatcacagatacaattccacactaaagaatgaaaataagcaatgaactagacagaaggaagaaatcatgaagacttaggaagcagaattacaatctgtcatattaacaaatggagtttgccttctaagatcagatgttgctcagaaactttcattgtttacctaataatttaatatcactagtttcctagtgggtcaagcagatgcaaaatccagcttattttcttctatgtgctctcaagcttattgcttattttaaagtaaaatcctgaaaaaggaaaatattaggttggtgcaaacgtaattgcggtttttgcattgttgaaatttgccgttttatattggagtacattcttaaataaatgtggttatgttatacatca

SEQ ID NO: 459000 - DNA, 2717 bp, Homo sapiens
aagccacgcagggccacgtctgcggttctgaggactgggtttgggtgcagacgttgttgcttgggcgcttctccgctgcgtgtaggtgaagggggcttcctgaccgagacatggatttaggtgctattacaaaatactcagcattacacgccaagcccaatggactgatccttcaatacgggactgctggatttcgaacgaaggcagaacatcttgatcatgtcatgtttcgcatgggattattagctgtcctgaggtcaaaacagacaaaatccactataggagtcatggtaacagcgtcccacaatcctgaggaagacaatggtgtaaaattggttgatcctttgggtgaaatgttggcaccatcctgggaggaacatgccacctgtttagcaaatgctgaggaacaagatatgcagagagtgcttattgacatcagcgagaaagaagctgtgaatctgcaacaagatgcctttgtagttattggtagagataccaggcccagcagtgagaaactttcacaatctgtaatagatggtgtgactgttctaggaggtcaattccatgattatggcttgttaacaacaccccagctgcactacatggtgtattgtcgaaacacgggtggccgatatggaaaggcaactatagaaggttactaccagaaactctctaaggcttttgtggaactcaccaaacaggcttcttgcagtggagatgaatacagatcacttaaggttgactgtgcaaatggcataggggccctgaagctaagggaaatggaacactacttctcacagggcctgtcagttcagctgtttaatgatgggtccaagggcaaactcaatcatttatgtggagctgactttgtgaaaagtcatcagaaacctccacagggaatggaaattaagtccaatgaaagatgctgttcttttgatggagatgcagacagaattgtttattactaccatgatgcagatggccactttcatctcatagatggagacaagatagcaacgttaattagcagtttccttaaagagctcctggtggagattggagaaagtttgaatattggtgttgtacaaactgcatatgcaaatggaagttcaacacggtatcttgaagaagttatgaaggtacctgtctattgcactaagactggtgtaaaacatttgcaccacaaggctcaagagtttgacattggagtttattttgaagcaaatgggcatggcactgcactgtttagtacagctgttgaaatgaagataaaacaatcagcagaacaactggaagataagaaaagaaaagctgctaagatgcttgaaaacattattgacttgtttaaccaggcagctggtgatgctatttctgacatgctggtgattgaagcaatcttggctctgaagggcttgactgtacaacagtgggatgctctctatacagatcttccaaacagacaacttaaagttcaggttgcagacaggagagttattagcactaccgatgctgaaagacaagcagttacacccccaggattacaggaggcaatcaatgacctggtgaagaagtacaagctttctcgagcttttgtccggccctctggtacagaagatgtcgtccgagtatatgcagaagcagactcacaagaaagtgcagatcaccttgcacatgaagtgagcttggcagtatttcagctggctggaggaattggagaaaggccccaaccaggtttctgaagataattttcatattcctgagaaactggactttttacaagtctttacaaaactgtcaataataatggcagtactaagagatttataatcataatgtttacaatgcagcctactggattgtctctagatctgtttttcttaaacactaacagaataattctttataaataggtaagccttacacttgttaaagaaatttacctctaatttcagtctcactaatgtaaaatactgggacttaagtatacaattcagtcactaactgtacagttttatgtggggaacaattcatgcaggctactggaaaattaaatcttattaccaactccttgtgatatctttgccatcaccatcacatgagcaagatgatgttttgcagcattccccattgctgatacaaatggagagggcagagaagactttatacaaccagtttttccattgcagagtcttaagaaagattattagatgacttacctatatgactaatgccatcaggaactcagaggtatgaatagggggttgtccatccctcttccatactgaggtggagatgctcatgcaatacttttaaggatgcatggtccagccttcagttattcttcactgctcttggtgaaggtatgtgggagaaaaactaattataatacgtttcccagcctctgatggagaaggaacaccattctgataccagaacatggttaataaggaaaagagaaaaatccccaaccaatcttaattgaaccaagtctgaaaccaatggaaaaaaaaaatgggtagtgtatattttgcaggtttaagacaactcaggacaataaaaacaatggactttacatgtgtatatatatagctctcttaggcaccataatcagtatgagccaacaatatttaaacttgattcaggccacattcagacatttgctcttatatacaaatatttaaattaaatacaatctgaaatgtgttctgttacataca

SEQ ID NO: 459001 - DNA, 6315 bp, Homo sapiens
aagccacgcagggccacgtctgcggttctgaggactgggtttgggtgcagacgttgttgcttgggcgcttctccgctgcgtgtaggtgaagggggcttcctgaccgagacatggatttaggtgctattacaaaatactcagcattacacgccaagcccaatggactgatccttcaatacgggactgctggatttcgaacgaaggcagaacatcttgatcatgtcatgtttcgcatgggattattagctgtcctgaggtcaaaacagacaaaatccactataggagtcatggtaacagcgtcccacaatcctgaggaagacaatggtgtaaaattggttgatcctttgggtgaaatgttggcaccatcctgggaggaacatgccacctgtttagcaaatgctgaggaacaagatatgcagagagtgcttattgacatcagcgagaaagaagctgtgaatctgcaacaagatgcctttgtagttattggtagagataccaggcccagcagtgagaaactttcacaatctgtaatagatggtgtgactgttctaggaggtcaattccatgattatggcttgttaacaacaccccagctgcactacatggtgtattgtcgaaacacgggtggccgatatggaaaggcaactatagaaggttactaccagaaactctctaaggcttttgtggaactcaccaaacaggcttcttgcagtggagatgaatacagatcacttaaggttgactgtgcaaatggcataggggccctgaagctaagggaaatggaacactacttctcacagggcctgtcagttcagctgtttaatgatgggtccaagggcaaactcaatcatttatgtggagctgactttgtgaaaagtcatcagaaacctccacagggaatggaaattaagtccaatgaaagatgctgttcttttgatggagatgcagacagaattgtttattactaccatgatgcagatggccactttcatctcatagatggagacaagatagcaacgttaattagcagtttccttaaagagctcctggtggagattggagaaagtttgaatattggtgttgtacaaactgcatatgcaaatggaagttcaacacggtatcttgaagaagttatgaaggtacctgtctattgcactaagactggtgtaaaacatttgcaccacaaggctcaagagtttgacattggagtttattttgaagcaaatgggcatggcactgcactgtttagtacagctgttgaaatgaagataaaacaatcagcagaacaactggaagataagaaaagaaaagctgctaagatgcttgaaaacattattgacttgtttaaccaggcagctggtgatgctatttctgacatgctggtgattgaagcaatcttggctctgaagggcttgactgtacaacagtgggatgctctctatacagatcttccaaacagacaacttaaagttcaggttgcagacaggagagttattagcactaccgatgctgaaagacaagcagttacacccccaggattacaggaggcaatcaatgacctggtgaagaagtacaagctttctcgagcttttgtccggccctctggtacagaagatgtcgtccgagtatatgcagaagcagactcacaacttatttagaagaatttggtctgttttccgtttatttaagggctttggaatttgttactgaaagatgaaaaaaggttttcattagaatttgttagtgaaacaaaatcaagaatcacccctctcttccccagagttccaagtaacatggtcttgcccatgttagacacatgctatgtctttctcatctaatctcttttaatgtaatttgcaggaaagtgcagatcaccttgcacatgaagtgagcttggcagtatttcagctggctggaggaattggagaaaggccccaaccaggtttctgaagataattttcatattcctgagaaactggactttttacaagtctttacaaaactgtcaataataatggcagtactaagagatttataatcataatgtttacaatgcagcctactggattgtctctagatctgtttttcttaaacactaacagaataattctttataaataggtaagccttacacttgttaaagaaatttacctctaatttcagtctcactaatgtaaaatactgggacttaagtatacaattcagtcactaactgtacagttttatgtggggaacaattcatgcaggctactggaaaattaaatcttattaccaactccttgtgatatctttgccatcaccatcacatgagcaagatgatgttttgcagcattccccattgctgatacaaatggagagggcagagaagactttatacaaccagtttttccattgcagagtcttaagaaagattattagatgacttacctatatgactaatgccatcaggaactcagaggtatgaatagggggttgtccatccctcttccatactgaggtggagatgctcatgcaatacttttaaggatgcatggtccagccttcagttattcttcactgctcttggtgaaggtatgtgggagaaaaactaattataatacgtttcccagcctctgatggagaaggaacaccattctgataccagaacatggttaataaggaaaagagaaaaatccccaaccaatcttaattgaaccaagtctgaaaccaatggaaaaaaaaaatgggtagtgtatattttgcaggtttaagacaactcaggacaataaaaacaatggactttacatgtgtatatatatagctctcttaggcaccataatcagtatgagccaacaatatttaaacttgattcaggccacattcagacatttgctcttatatacaaatatttaaattaaatacaatctgaaatgtgttctgttacatacaaaaaaggaaaaactatacaacgcagagcagtgtgtgtgttttaaataattacatttacatgtaagctaaatggaaccagcaatggtgctcaagtttttatcatcccttccagaaaatctttttctaccatctcttctattttttgcctggctttgctggaacatggtttgtggttctccagtttcatgtccttattagggaaggcatttgagtagaggataggactccctgagtgtcctccacatcggcttgtgactttgctgttgaagacttgactgagcacattgaagaacggcaggagctgctccatactgcgcacggtgcagatggtgagcagcaagtgccctggctcccaacccaatgttctccctgagttgtcttcctctggatttttctgcagaaaacaaaaagtgaactggtattaatacaacagacaatgtggtatgttagaaaaattaaaaatatataaactttggcaattggtcaagaaatgaatacaaatgacattaagtttctaactcctgacctgatcaaaacccttggtgcttctgagaccttttactgccatttattagttttacatggagcagtctaacattgtagtaatagttcccaactagaatgcgcagataagcttagttaacagaaatagctttgaacaggaatagagtcaaacataaaagttttatgttgtgctttgtatttactcaaaaagctcccaggtttctgaaccctcactactgtaaccaaggactaggtcacaaaattactacagaaaaaaggaacaaagtgctttatacatttcataatatatccccttttattataattagttaattcccttttatctaaatggcctaaatttgccatgatggtagcagtgtccaaagtgaataattactgtcagtactgcatcacagagaaaggaagggatccctcaggagacactgctgtctccttctgggttgtgctaaacaacatagggaggaaagctggacctggagtcaaaggaattgagttagtgtgctggctctgccatacttacggcacccttgggcaggatatacaaaggttcctcacttataaaatgggacagtctaaaactaccttttagtagagaagtcaaatgagaaggtatgtgaaaactctgtcaactaaatataaagactaataatttgggtattaagaggctagtttgagaagccacctgaattacacaaacacagctacagacatcattctgtctagagaaagataagagagaacaggttggttgaacttgggcagaatcacagatacaattccacactaaagaatgaaaataagcaatgaactagacagaaggaagaaatcatgaagacttaggaagcagaattacaatctgtcatattaacaaatggagtttgccttctaagatcagatgttgctcagaaactttcattgtttacctaataatttaatatcactagtttcctagtgggtcaagcagatgcaaaatccagcttattttcttctatgtgctctcaagcttattgcttattttaaagtaaaatcctgaaaaaggaaaatattaggttggtgcaaacgtaattgcggtttttgcattgttgaaatttgccgttttatattggagtacattcttaaataaatgtggttatgttatacatcattttaagcatatttctcactttttttttgctaatgacttattgctgtttatatttattttagactatggaaatgatgttagacaaaaatcaaatttagcgattttctgagttcaaaataggttataaagcagcagagacaacacacaacatcaacaatgcatttggcccaggaactgctaatgaacatacagtgccgtgatggctcaagaagttttgcaaaggagactagagccttgaagatgaggagtgcagtggccagtcatcggaaattgataatgaccaattgagaacatcatcgaagctgatcctcttacaactataagagagctgcccaagaactcaatgttgaccattttatggtcgttcggcatttgaagcaaattgaaaaggtgaaaaagctcaataaatgggtgcctcatgagctgagtgaaaaataaaaaaattcgttgttttgaagtgtcattttctctattctatgcaacaataatgaatcatttctctatcggattgtgatgtgtgccaaaaggtggattttatacgacaactggcgatgaccagctcagtggctggactgaaagaagctccaaagcacttcccaaagccaaacttgctccaaaaaatggtcatggtcattgtttggtggtttgctgccagtctgatccactacagctttctgaatccaggtgaaaccattacatctgataagtatgctcagcaaatcaatgagatgcaccaaaaactgcaatgcctgcagccggcattggccaccagaaagggcccaattcttttcacgacaacactgggccgcacgttgcacaaccaacgcttcgaaaattgaactaattgggctatgaagttttgcctcatctgccatattcacctgacctcttgccaacaaactaccacttctttaggcatctcagcaacgttttgcagggaaattgcttccacaactagcaggacacagaaaatgctttccaagagttcgtcaaatttggaagcatggatttttatgctacaggagtaaacaaacttatttctcattggcaaaaatgtgttgattgtaatggttcctattttaattaataaagatttgtgtgaacctagttataatgacttaaaattcatggtcccaaacagcaattacttttgcaccaaactaaaaatataagttaaaatggaagagtctaggagcaaaccaagaaaagatcacctacttcatcatctctggtcaaaaacaaaccaaaaaacttaacagctatcacttaagtttgcttcctagcaattatttagcttccagtctagattacaggatatataaaactttctttctttctttcttaactatgacactggcaccaatgagagtcctgtgactgactttcacatttccaccattactcaattactggtaccataccacctctaatcccctaaatcaaactgcaattcaacaataaagggcgtacagagatgactttgtcctgaaggaaaatgaatatccttgtaccctctatatagctaacttccaaatgtaagagaactatggggtaaccttttgtttctattcctatcaagatgagcctttaagagagggacttttattaagctcttgaccaagaagaatacacttgattcagagtttctgatgctcttaatcagaactatatgtattgtctcaatattaaataaagtcaaatgtttccatacaaatgat

SEQ ID NO: 459002 - DNA, 5170 bp, Homo sapiens
tcttaaaattggtccaaaagtattattccagtaactactccttttgtttttctttttctttttttgagacaaggtcttgctatgttgcccaggctggagtgcattggctgttcacaggcattatcacagcacactgcagcctcaaactcctagcttcaagtaatcatcccatctcagcctctcctgagtagctgggactgtaggtgtatgccaccacacctggcagttgtatacccacattttgacctgtcacaggaggccaggtgtggaatttttcacttgtgattattttggcactcagcatgtttcagattcaggttgttcaacctgtactgtgattggttttctaagaaaaaacatccatttccaagatttgcttgtgttaagtggtttcttccatttgtttccccatttgcaggcagctggtgatgctatttctgacatgctggtgattgaagcaatcttggctctgaagggcttgactgtacaacagtgggatgctctctatacagatcttccaaacagacaacttaaagttcaggttgcagacaggagagttattagcactaccgatgctgaaagacaagcagttacacccccaggattacaggaggcaatcaatgacctggtgaagaagtacaagctttctcgagcttttgtccggccctctggtacagaagatgtcgtccgagtatatgcagaagcagactcacaagaaagtgcagatcaccttgcacatgaagtgagcttggcagtatttcagctggctggaggaattggagaaaggccccaaccaggtttctgaagataattttcatattcctgagaaactggactttttacaagtctttacaaaactgtcaataataatggcagtactaagagatttataatcataatgtttacaatgcagcctactggattgtctctagatctgtttttcttaaacactaacagaataattctttataaataggtaagccttacacttgttaaagaaatttacctctaatttcagtctcactaatgtaaaatactgggacttaagtatacaattcagtcactaactgtacagttttatgtggggaacaattcatgcaggctactggaaaattaaatcttattaccaactccttgtgatatctttgccatcaccatcacatgagcaagatgatgttttgcagcattccccattgctgatacaaatggagagggcagagaagactttatacaaccagtttttccattgcagagtcttaagaaagattattagatgacttacctatatgactaatgccatcaggaactcagaggtatgaatagggggttgtccatccctcttccatactgaggtggagatgctcatgcaatacttttaaggatgcatggtccagccttcagttattcttcactgctcttggtgaaggtatgtgggagaaaaactaattataatacgtttcccagcctctgatggagaaggaacaccattctgataccagaacatggttaataaggaaaagagaaaaatccccaaccaatcttaattgaaccaagtctgaaaccaatggaaaaaaaaaatgggtagtgtatattttgcaggtttaagacaactcaggacaataaaaacaatggactttacatgtgtatatatatagctctcttaggcaccataatcagtatgagccaacaatatttaaacttgattcaggccacattcagacatttgctcttatatacaaatatttaaattaaatacaatctgaaatgtgttctgttacatacaaaaaaggaaaaactatacaacgcagagcagtgtgtgtgttttaaataattacatttacatgtaagctaaatggaaccagcaatggtgctcaagtttttatcatcccttccagaaaatctttttctaccatctcttctattttttgcctggctttgctggaacatggtttgtggttctccagtttcatgtccttattagggaaggcatttgagtagaggataggactccctgagtgtcctccacatcggcttgtgactttgctgttgaagacttgactgagcacattgaagaacggcaggagctgctccatactgcgcacggtgcagatggtgagcagcaagtgccctggctcccaacccaatgttctccctgagttgtcttcctctggatttttctgcagaaaacaaaaagtgaactggtattaatacaacagacaatgtggtatgttagaaaaattaaaaatatataaactttggcaattggtcaagaaatgaatacaaatgacattaagtttctaactcctgacctgatcaaaacccttggtgcttctgagaccttttactgccatttattagttttacatggagcagtctaacattgtagtaatagttcccaactagaatgcgcagataagcttagttaacagaaatagctttgaacaggaatagagtcaaacataaaagttttatgttgtgctttgtatttactcaaaaagctcccaggtttctgaaccctcactactgtaaccaaggactaggtcacaaaattactacagaaaaaaggaacaaagtgctttatacatttcataatatatccccttttattataattagttaattcccttttatctaaatggcctaaatttgccatgatggtagcagtgtccaaagtgaataattactgtcagtactgcatcacagagaaaggaagggatccctcaggagacactgctgtctccttctgggttgtgctaaacaacatagggaggaaagctggacctggagtcaaaggaattgagttagtgtgctggctctgccatacttacggcacccttgggcaggatatacaaaggttcctcacttataaaatgggacagtctaaaactaccttttagtagagaagtcaaatgagaaggtatgtgaaaactctgtcaactaaatataaagactaataatttgggtattaagaggctagtttgagaagccacctgaattacacaaacacagctacagacatcattctgtctagagaaagataagagagaacaggttggttgaacttgggcagaatcacagatacaattccacactaaagaatgaaaataagcaatgaactagacagaaggaagaaatcatgaagacttaggaagcagaattacaatctgtcatattaacaaatggagtttgccttctaagatcagatgttgctcagaaactttcattgtttacctaataatttaatatcactagtttcctagtgggtcaagcagatgcaaaatccagcttattttcttctatgtgctctcaagcttattgcttattttaaagtaaaatcctgaaaaaggaaaatattaggttggtgcaaacgtaattgcggtttttgcattgttgaaatttgccgttttatattggagtacattcttaaataaatgtggttatgttatacatcattttaagcatatttctcactttttttttgctaatgacttattgctgtttatatttattttagactatggaaatgatgttagacaaaaatcaaatttagcgattttctgagttcaaaataggttataaagcagcagagacaacacacaacatcaacaatgcatttggcccaggaactgctaatgaacatacagtgccgtgatggctcaagaagttttgcaaaggagactagagccttgaagatgaggagtgcagtggccagtcatcggaaattgataatgaccaattgagaacatcatcgaagctgatcctcttacaactataagagagctgcccaagaactcaatgttgaccattttatggtcgttcggcatttgaagcaaattgaaaaggtgaaaaagctcaataaatgggtgcctcatgagctgagtgaaaaataaaaaaattcgttgttttgaagtgtcattttctctattctatgcaacaataatgaatcatttctctatcggattgtgatgtgtgccaaaaggtggattttatacgacaactggcgatgaccagctcagtggctggactgaaagaagctccaaagcacttcccaaagccaaacttgctccaaaaaatggtcatggtcattgtttggtggtttgctgccagtctgatccactacagctttctgaatccaggtgaaaccattacatctgataagtatgctcagcaaatcaatgagatgcaccaaaaactgcaatgcctgcagccggcattggccaccagaaagggcccaattcttttcacgacaacactgggccgcacgttgcacaaccaacgcttcgaaaattgaactaattgggctatgaagttttgcctcatctgccatattcacctgacctcttgccaacaaactaccacttctttaggcatctcagcaacgttttgcagggaaattgcttccacaactagcaggacacagaaaatgctttccaagagttcgtcaaatttggaagcatggatttttatgctacaggagtaaacaaacttatttctcattggcaaaaatgtgttgattgtaatggttcctattttaattaataaagatttgtgtgaacctagttataatgacttaaaattcatggtcccaaacagcaattacttttgcaccaaactaaaaatataagttaaaatggaagagtctaggagcaaaccaagaaaagatcacctacttcatcatctctggtcaaaaacaaaccaaaaaacttaacagctatcacttaagtttgcttcctagcaattatttagcttccagtctagattacaggatatataaaactttctttctttctttcttaactatgacactggcaccaatgagagtcctgtgactgactttcacatttccaccattactcaattactggtaccataccacctctaatcccctaaatcaaactgcaattcaacaataaagggcgtacagagatgactttgtcctgaaggaaaatgaatatccttgtaccctctatatagctaacttccaaatgtaagagaactatggggtaaccttttgtttctattcctatcaagatgagcctttaagagagggacttttattaagctcttgaccaagaagaatacacttgattcagagtttctgatgctcttaatcagaactatatgtattgtctcaatattaaataaagtcaaatgtttccatacaaatgat

SEQ ID NO: 459003 - DNA, 569 bp, Homo sapiens
ccactgcacccagcctcagggcactcttacttgaaaaattgtttatagttattcaaactttatatagatagaggacattgtaaagccttttcctggaaaaagtaaaccttgtgagctaagatggtagctagaacatttatgattattttcttgtacaggtcctttgacttgattcattcacctcacggagagttaaaggctgtcttcctgctgcagaacaacctggtggaattgtattcactgaatccatccttgcctactcctcagcctgtcaggacaagcagaatcactattgggggtcatcgcagtgatgtgcggactttgtcattcagctcagacaatattgctgttctttcagctgcagctgattccattaaaatatggaacaggttcgtgaaatgatgttttatatagctgtagttagtagtatttcttttaattttttttggtactcttaagggttagttattaactccttaaggccctaaatacaattatctttagtgcatttgggccattagcctgtggagcttagagaagaaaaagttgccttttaaaatgtggtgcaa

SEQ ID NO: 459004 - DNA, 3890 bp, Homo sapiens
cgagacgggcgtgttaaaggccggttgctagggctgggggaactcagattgcttcacctgtggtatcagacatcacaacatggggctcaccaagcagtacctacgctatgttgctagtgcggtctttggcgttatcggcagccaaaaaggtaatattgtctttgtgacacttcgtggtgagaaaggacgttatgtggcagtaccagcttgtgaacacgttttcatctgggacttaaggaaaggagagaagattcttatccttcaggggcttaaacaagaagttacttgcttatgcccctccccagatgggctacacttagctgttgggtatgaggatgggtcgatccgaatcttcagtctcctgagtggggaaggaaatgtgaccttcaatggtcacaaagcagctatcactaccttgaagtatgatcagctaggaggcagactggcatctgggtccaaggacacagatattattgtatgggatgtgatcaatgaaagtggtctgtaccgtctaaaggggcacaaggatgccatcacacaagcattgtttctacgagaaaagaacctgctagttactagtgggaaagataccatggtgaaatggtgggaccttgatactcagcactgctttaaaacaatggttggccaccggactgaggtatgggggttggttctgttgtcagaagaaaagcgactcatcactggggcctcagacagtgaactgagggtatgggacatagcttatctgcaagagattgaagacccggaagaaccagaccccaagaaaatcaaaggatcttctcctggaatacaagatactcttgaggcagaggatggtgcctttgagacggatgaagcccctgaggatcgaatcctttcatgcagaaaagctggttccataatgcgggaaggaagagacagagttgtaaaccttgcagtcgacaagacaggcaggattcttgcttgccatggaactgactctgtgctagaattgttttgtatcctttccaaaaaggaaattcagaagaaaatggataagaagatgaagaaagctagaaagaaagcaaaattacattctagcaaaggagaggaggaagatcctgaggttaatgttgaaatgagtctgcaagatgaaatccagcgggtgactaatataaaaacttctgccaaaatcaagtcctttgacttgattcattcacctcacggagagttaaaggctgtcttcctgctgcagaacaacctggtggaattgtattcactgaatccatccttgcctactcctcagcctgtcaggacaagcagaatcactattgggggtcatcgcagtgatgtgcggactttgtcattcagctcagacaatattgctgttctttcagctgcagctgattccattaaaatatggaacaggtctacactgcagtgtattcgcacaatgacctgtgaatatgcactttgctcattctttgtacctggtgatagacaggtagtcataggaacaaagacagggaagctgcagctttatgacttggcttcagggaatctgctggagacaatagatgcacatgatggagctttgtggtccatgtccctctctccagatcagcgtggctttgtgacaggtggtgcagataaatctgtcaaattctgggattttgagttagtgaaagatgaaaatagtacccaaaagagactttctgtgaagcaaacccgaactttgcaactagatgaagatgttctgtgtgtcagttactctcccaatcaaaagctattggctgtgtctttgctggactgtactgtgaaaattttctacgttgatactttaaagttttttctgtcactgtatggacacaaactgcctgttatatgcatggacatctctcatgatggagcactcatagcaactggctccgctgataggaatgtgaaaatctggggtttggactttggggactgccacaagtctctctttgcacatgatgacagtgtgatgtacctacagtttgtacccaagtctcacctcttcttcactgccggaaaagatcataagattaaacagtgggatgcagacaaatttgaacacatacagactctggagggtcatcaccaggaaatatggtgtttggctgtaagccccagtggagactatgttgtatcatcgtcccatgacaaatctctgagactttgggagagaacaagggagcctcttattcttgaggaagaaagggagatggaaagagaagcagaatatgaggagagtgtggccaaagaagaccaaccagcagttccaggagagactcaaggtgacagttactttactggaaagaaaactattgaaacagtgaaagcagctgagaggattatggaggctattgagttgtaccgagaagaaactgcaaaaatgaaggaacacaaagccatttgtaaagctgcagggaaagaggttccacttcccagcaaccccatcctaatggcttatggcagtatctcaccttcagcttatgtattagagatttttaaagggatcaagtcgagtgagctggaagaatctctacttgtgctgcctttctcttatgtcccagacattcttaaactctttaacgaattcattcagctgggctctgatgttgaacttatatgccggtgcctcttcttcctccttaggattcactttggacagatcactagcaatcaaatgcttgtgccagtgatagaaaaattaagggaaacaactatttcaaaagtcagccaagtccgggatgttatcggcttcaatatggctggtcttgattatctcaagagggaatgcgaggcaaaaagtgaagttatgttttttgctgatgctactagccacttggaagagaagaagaggaagaggaaaaagagggagaagttgattctaacgttgacttagaactgaaatgtggtatctttttttttttcaactttttcctttaaaggactcctaaactaagcacagaagagttggcgtcatcttaaaaataccaaataacagaagatcgcattgcagatgatatcaggatgtggtttccagctttgcctgagggaattccaacatgagattatgggctggctccatttcttggacttaaaatgcattattagtttaaaaatctttctgtgctctcaaagcttgagccttgcagctcaagcttgttgttccctttatattctagcagggaataaataattgttttaattaggtatttgtttcattggagttgaaattaacatttcaaaagtttttcgtatttttttatggcagatgatttgtcatttatttatattaggttttactgcctattgagacaaccaggtgcataattgattgccctttggccataaaaatgcagtgtcatggatcttagagctaaaaaggactgtaaaaattacccagaacagcgtcctcagacttaaccttctgcaagttatgtctgtatataagaagattctaattgctaactgtttatacttttctgaataaaatagttgtttctaattaaaaagtagccaagctaagatgcctggctgggcttctgaggaattaatacactcgtgtgcgtgtgtgtgtgtgtgtgtgtgtgtgtgtgtgtatgtgtatgtgtatgtacacatacatatatatagttgacacttgaaaaatgcaggtggtaggggcactgacccacccctacgccccgcacagtcaaaaatctgcatataacttttgattccccaaagtcttaagtactagtagcctgttattgactgggagcctgactgatgtattatatatattgtatactgtattcttaaagtaagctagagaaaagaaaatgttacttagaaaatcataaggaagagaaaatatatttactgtgtttatcaatact

SEQ ID NO: 459005 - DNA, 3466 bp, Homo sapiens
cgagacgggcgtgttaaaggccggttgctagggctgggggaactcagattgcttcacctgtggtatcagacatcacaacatggggctcaccaagcagtacctacgctatgttgctagtgcggtctttggcgttatcggcagccaaaaaggtaatattgtctttgtgacacttcgtggtgagaaaggacgttatgtggcagtaccagcttgtgaacacgttttcatctgggacttaaggaaaggagagaagattcttatccttcaggggcttaaacaagaagttacttgcttatgcccctccccagatgggctacacttagctgttgggtatgaggatgggtcgatccgaatcttcagtctcctgagtggggaaggaaatgtgaccttcaatggtcacaaagcagctatcactaccttgaagtatgatcagctaggaggcagactggcatctgggtccaaggacacagatattattgtatgggatgtgatcaatgaaagtggtctgtaccgtctaaaggggcacaaggatgccatcacacaagcattgtttctacgagaaaagaacctgctagttactagtgggaaagataccatggtgaaatggtgggaccttgatactcagcactgctttaaaacaatggttggccaccggactgaggtatgggggttggttctgttgtcagaagaaaagcgactcatcactggggcctcagacagtgaactgagggtatgggacatagcttatctgcaagagattgaagacccggaagaaccagaccccaagaaaatcaaaggatcttctcctggaatacaagatactcttgaggcagaggatggtgcctttgagacggatgaagcccctgaggatcgaatcctttcatgcagaaaagctggttccataatgcgggaaggaagagacagagttgtaaaccttgcagtcgacaagacaggcaggattcttgcttgccatggaactgactctgtgctagaattgttttgtatcctttccaaaaaggaaattcagaagaaaatggataagaagatgaagaaagctagaaagaaagcaaaattacattctagcaaaggagaggaggaagatcctgaggttaatgttgaaatgagtctgcaagatgaaatccagcgggtgactaatataaaaacttctgccaaaatcaagtcctttgacttgattcattcacctcacggagagttaaaggctgtcttcctgctgcagaacaacctggtggaattgtattcactgaatccatccttgcctactcctcagcctgtcaggacaagcagaatcactattgggggtcatcgcagtgatgtgcggactttgtcattcagctcagacaatattgctgttctttcagctgcagctgattccattaaaatatggaacaggtctacactgcagtgtattcgcacaatgacctgtgaatatgcactttgctcattctttgtacctggtgatagacaggtagtcataggaacaaagacagggaagctgcagctttatgacttggcttcagggaatctgctggagacaatagatgcacatgatggagctttgtggtccatgtccctctctccagatcagcgtggctttgtgacaggtggtgcagataaatctgtcaaattctgggattttgagttagtgaaagatgaaaatagtacccaaaagagactttctgtgaagcaaacccgaactttgcaactagatgaagatgttctgtgtgtcagttactctcccaatcaaaagctattggctgtgtctttgctggactgtactgtgaaaattttctacgttgatactttaaagttttttctgtcactgtatggacacaaactgcctgttatatgcatggacatctctcatgatggagcactcatagcaactggctccgctgataggaatgtgaaaatctggggtttggactttggggactgccacaagtctctctttgcacatgatgacagtgtgatgtacctacagtttgtacccaagtctcacctcttcttcactgccggaaaagatcataagattaaacagtgggatgcagacaaatttgaacacatacagactctggagggtcatcaccaggaaatatggtgtttggctgtaagccccagtggagactatgttgtatcatcgtcccatgacaaatctctgagactttgggagagaacaagggagcctcttattcttgaggaagaaagggagatggaaagagaagcagaatatgaggagagtgtggccaaagaagaccaaccagcagttccaggagagactcaaggtgacagttactttactggaaagaaaactattgaaacagtgaaagcagctgagaggattatggaggctattgagttgtaccgagaagaaactgcaaaaatgaaggaacacaaagccatttgtaaagctgcagggaaagaggttccacttcccagcaaccccatcctaatggcttatggcagtatctcaccttcagcttatgtattagagatttttaaagggatcaagtcgagtgagctggaagaatctctacttgtgctgcctttctcttatgtcccagacattcttaaactctttaacgaattcattcagctgggctctgatgttgaacttatatgccggtgcctcttcttcctccttaggattcactttggacagatcactagcaatcaaatgcttgtgccagtgatagaaaaattaagggaaacaactatttctctcaagagggaatgcgaggcaaaaagtgaagttatgttttttgctgatgctactagccacttggaagagaagaagaggaagaggaaaaagagggagaagttgattctaacgttgacttagaactgaaatgtggtatctttttttttttcaactttttcctttaaaggactcctaaactaagcacagaagagttggcgtcatcttaaaaataccaaataacagaagatcgcattgcagatgatatcaggatgtggtttccagctttgcctgagggaattccaacatgagattatgggctggctccatttcttggacttaaaatgcattattagtttaaaaatctttctgtgctctcaaagcttgagccttgcagctcaagcttgttgttccctttatattctagcagggaataaataattgttttaattaggtatttgtttcattggagttgaaattaacatttcaaaagtttttcgtatttttttatggcagatgatttgtcatttatttatattaggttttactgcctattgagacaaccaggtgcataattgattgccctttggccataaaaatgcagtgtcatggatcttagagctaaaaaggactgtaaaaattacccagaacagcgtcctcagacttaaccttctgcaagttatgtctgtatataagaagattctaattgctaactgtttatacttttctgaataaaatagttgtttctaatta

SEQ ID NO: 459006 - DNA, 3318 bp, Homo sapiens
cgagacgggcgtgttaaaggccggttgctagggctgggggaactcagattgcttcacctgtggtatcagacatcacaacatggggctcaccaagcagtacctacgctatgttgctagtgcggtctttggcgttatcggcagccaaaaaggtaatattgtctttgtgacacttcgtggtgagaaaggacgttatgtggcagtaccagcttgtgaacacgttttcatctgggacttaaggaaaggagagaagattcttatccttcaggggcttaaacaagaagttacttgcttatgcccctccccagatgggctacacttagctgttgggtatgaggatgggtcgatccgaatcttcagtctcctgagtggggaaggaaatgtgaccttcaatggtcacaaagcagctatcactaccttgaagtatgatcagctaggaggcagactggcatctgggtccaaggacacagatattattgtatgggatgtgatcaatgaaagtggtctgtaccgtctaaaggggcacaaggatgccatcacacaagcattgtttctacgagaaaagaacctgctagttactagtgggaaagataccatggtgaaatggtgggaccttgatactcagcactgctttaaaacaatggttggccaccggactgaggtatgggggttggttctgttgtcagaagaaaagcgactcatcactggggcctcagacagtgaactgagggtatgggacatagcttatctgcaagagattgaagacccggaagaaccagaccccaagaaaatcaaaggatcttctcctggaatacaagatactcttgaggcagaggatggtgcctttgagacggatgaagcccctgaggatcgaatcctttcatgcagaaaagctggttccataatgcgggaaggaagagacagagttgtaaaccttgcagtcgacaagacaggcaggattcttgcttgccatggaactgactctgtgctagaattgttttgtatcctttccaaaaaggaaattcagaagaaaatggataagaagatgaagaaagctagaaagaaagcaaaattacattctagcaaaggagaggaggaagatcctgaggttaatgttgaaatgagtctgcaagatgaaatccagcgggtgactaatataaaaacttctgccaaaatcaagtcctttgacttgattcattcacctcacggagagttaaaggctgtcttcctgctgcagaacaacctggtggaattgtattcactgaatccatccttgcctactcctcagcctgtcaggacaagcagaatcactattgggggtcatcgcagtgatgtgcggactttgtcattcagctcagacaatattgctgttctttcagctgcagctgattccattaaaatatggaacaggtctacactgcagtgtattcgcacaatgacctgtgaatatgcactttgctcattctttgtacctggtgatagacaggtagtcataggaacaaagacagggaagctgcagctttatgacttggcttcagggaatctgctggagacaatagatgcacatgatggagctttgtggtccatgtccctctctccagatcagcgtggctttgtgacaggtggtgcagataaatctgtcaaattctgggattttgagttagtgaaagatgaaaatagtacccaaaagagactttctgtgaagcaaacccgaactttgcaactagatgaagatgttctgtgtgtcagttactctcccaatcaaaagctattggctgtgtctttgctggactgtactgtgaaaattttctacgttgatactttaaagttttttctgtcactgtatggacacaaactgcctgttatatgcatggacatctctcatgatggagcactcatagcaactggctccgctgataggaatgtgaaaatctggggtttggactttggggactgccacaagtctctctttgcacatgatgacagtgtgatgtacctacagtttgtacccaagtctcacctcttcttcactgccggaaaagatcataagattaaacagtgggatgcagacaaatttgaacacatacagactctggagggtcatcaccaggaaatatggtgtttggctgtaagccccagtggagactatgttgtatcatcgtcccatgacaaatctctgagactttgggagagaacaagggagcctcttattcttgaggaagaaagggagatggaaagagaagcagaatatgaggagagtgtggccaaagaagaccaaccagcagttccaggagagactcaaggtgacagttactttactggaaagaaaactattgaaacagtgaaagcagctgagaggattatggaggctattgagttgtaccgagaagaaactgcaaaaatgaaggaacacaaagccatttgtaaagctgcagggaaagaggttccacttcccagcaaccccatcctaatggcttatggcagtatctcaccttcagcttatgtattagagatttttaaagggatcaagtcgagtgagctggaagaatctctacttgtgctgcctttctcttatgtcccagacattcttaaactctttaacgaattcattcagctgggctctgatgttgaacttatatgccggtgcctcttcttcctccttaggattcactttggacagatcactagcaatcaaatgcttgtgccagtgatagaaaaattaagggaaacaactatttcaaaagtcagccaagtccgggactcctaaactaagcacagaagagttggcgtcatcttaaaaataccaaataacagaagatcgcattgcagatgatatcaggatgtggtttccagctttgcctgagggaattccaacatgagattatgggctggctccatttcttggacttaaaatgcattattagtttaaaaatctttctgtgctctcaaagcttgagccttgcagctcaagcttgttgttccctttatattctagcagggaataaataattgttttaattaggtatttgtttcattggagttgaaattaacatttcaaaagtttttcgtatttttttatggcagatgatttgtcatttatttatattaggttttactgcctattgagacaaccaggtgcataattgattgccctttggccataaaaatgcagtgtcatggatcttagagctaaaaaggactgtaaaaattacccagaacagcgtcctcagacttaaccttctgcaagttatgtctgtatataagaagattctaattgctaactgtttatacttttctgaataaaatagttgtttctaatta

SEQ ID NO: 459007 - DNA, 1744 bp, Homo sapiens
  misc_feature (1709)..(1709): n is a, c, g, or t
  misc_feature (1731)..(1731): n is a, c, g, or t
cgagacgggcgtgttaaaggccggttgctagggctgggggaactcagattgcttcacctgtggtatcagacatcacaacatggggctcaccaagcagtacctacgctatgttgctagtgcggtctttggcgttatcggcagccaaaaaggtaatattgtctttgtgacacttcgtggtgagaaaggacgttatgtggcagtaccagcttgtgaacacgttttcatctgggacttaaggaaaggagagaagattcttatccttcaggggcttaaacaagaagttacttgcttatgcccctccccagatgggctacacttagctgttgggtatgaggatgggtcgatccgaatcttcagtctcctgagtggggaaggaaatgtgaccttcaatggtcacaaagcagctatcactaccttgaagtatgatcagctaggaggcagactggcatctgggtccaaggacacagatattattgtatgggatgtgatcaatgaaagtggtctgtaccgtctaaaggggcacaaggatgccatcacacaagcattgtttctacgagaaaagaacctgctagttactagtgggaaagataccatggtgaaatggtgggaccttgatactcagcactgctttaaaacaatggttggccaccggactgaggtatgggggttggttctgttgtcagaagaaaagcgactcatcactggggcctcagacagtgaactgagggtatgggacatagcttatctgcaagagattgaagacccggaagaaccagaccccaagaaaatcaaaggatcttctcctggaatacaagatactcttgaggcagaggatggtgcctttgagacggatgaagcccctgaggatcgaatcctttcatgcagaaaagctggttccataatgcgggaaggaagagacagagttgtaaaccttgcagtcgacaagacaggcaggattcttgcttgccatggaactgactctgtgctagaattgttttgtatcctttccaaaaaggaaattcagaagaaaatggataagaagatgaagaaagctagaaagaaagcaaaattacattctagcaaaggagaggaggaagatcctgaggttaatgttgaaatgagtctgcaagatgaaatccagcgggtgactaatataaaaacttctgccaaaatcaagtcctttgacttgattcattcacctcacggagagttaaaggctgtcttcctgctgcagaacaacctggtggaattgtattcactgaatccatccttgcctactcctcagcctgtcaggacaagcagaatcactattgggggtcatcgcagtgatgtgcggactttgtcattcagctcagacaatattgctgttctttcagctgcagctgattccattaaaatatggaacaggtctacactgcagtgtattcgcacaatgacctgtgaatatgcactttgctcattctttgtacctggtgatagacaggtagtcataggaacaaagacagggaagctgcagctttatgacttggcttcagggaatctgctggagacaatagatgcacatgatggagctttgtggtccatgtccctctctccagatcagcgtggctttgtgacaggtggtgcagataaatctgtcaaattctgggattttgagttagtgaaagatgaaaatagtacccaaaagagaactttctgtttaagccaanccccaactttggcacttaaatnaaaaattttctgt

SEQ ID NO: 459008 - DNA, 388 bp, Homo sapiens
tattcaaggatttctttgtttctggcaggttccaggagagactcaaggtgacagttactttactggaaagaaaactattgaaacagtgaaagcagtaagttgatatagaatgtggtatctcgttttttaataagatctcaactttttagtaaaagttttattctgtatcaaccagaaagccatttttttggcaaaaagttgatgagatttaaagatggggattataacctgtttccttctcttgtaaccaaagatgggagtagtcctgaatctctttgatcaatatgtgctcctttcaggtgttcctgggacctgccctattcagagtgtctagatatcatcccacctgagtccatgacactcagtctcttccctgtacattaaaaaa

SEQ ID NO: 459009 - DNA, 655 bp, Homo sapiens
cgagacgggcgtgttaaaggccggttgctagggctgggggaactcagattgcttcacctgtggtatcagacatcacaacatggggctcaccaagcagtacctacgctatgttgctagtgcggtctttggcgttatcggcagccaaaaaggtaatattgtctttgtgacacttcgtggtgagaaaggacgttatgtggcagtaccagcttgtgaacacgttttcatctgggacttaaggaaaggagagaagattcttatccttcaggggcttaaacaagaagttacttgcttatgcccctccccagatgggctacacttagctgttgggtatgaggatgggtcgatccgaatcttcagtctcctgagtggggaaggaaatgtgaccttcaatggtcacaaagcagctatcactaccttgaagtatgatcagctaggaggcagactggcatctgggtccaaggacacagatattattgtatgggatgtgatcaatgaaagtggtctgtaccgtctaaaggggcacaaggatgccatcacacaagcattgtttctacgagaaaagaacctgctagttactagtgggaaagataccatggtgagaatggtgggaccctgatactccccggctgctaacaggtccggctcgacttctatt

SEQ ID NO: 459010 - DNA, 3520 bp, Homo sapiens
cgagacgggcgtgttaaaggccggttgctagggctgggggaactcagattgcttcacctgtggtatcagacatcacaacatggggctcaccaagcagtacctacgctatgttgctagtgcggtctttggcgttatcggcagccaaaaaggtaatattgtctttgtgacacttcgtggtgagaaaggacgttatgtggcagtaccagcttgtgaacacgttttcatctgggacttaaggaaaggagagaagattcttatccttcaggggcttaaacaagaagttacttgcttatgcccctccccagatgggctacacttagctgttgggtatgaggatgggtcgatccgaatcttcagtctcctgagtggggaaggaaatgtgaccttcaatggtcacaaagcagctatcactaccttgaagtatgatcagctaggaggcagactggcatctgggtccaaggacacagatattattgtatgggatgtgatcaatgaaagtggtctgtaccgtctaaaggggcacaaggatgccatcacacaagcattgtttctacgagaaaagaacctgctagttactagtgggaaagataccatggtgaaatggtgggaccttgatactcagcactgctttaaaacaatggttggccaccggactgaggtatgggggttggttctgttgtcagaagaaaagcgactcatcactggggcctcagacagtgaactgagggtatgggacatagcttatctgcaagagattgaagacccggaagaaccagaccccaagaaaatcaaaggatcttctcctggaatacaagatactcttgaggcagaggatggtgcctttgagacggatgaagcccctgaggatcgaatcctttcatgcagaaaagctggttccataatgcgggaaggaagagacagagttgtaaaccttgcagtcgacaagacaggcaggattcttgcttgccatggaactgactctgtgctagaattgttttgtatcctttccaaaaaggaaattcagaagaaaatggataagaagatgaagaaagctagaaagaaagcaaaattacattctagcaaaggagaggaggaagatcctgaggttaatgttgaaatgagtctgcaagatgaaatccagcgggtgactaatataaaaacttctgccaaaatcaagtcctttgacttgattcattcacctcacggagagttaaaggctgtcttcctgctgcagaacaacctggtggaattgtattcactgaatccatccttgcctactcctcagcctgtcaggacaagcagaatcactattgggggtcatcgcagtgatgtgcggactttgtcattcagctcagacaatattgctgttctttcagctgcagctgattccattaaaatatggaacaggtctacactgcagtgtattcgcacaatgacctgtgaatatgcactttgctcattctttgtacctggtgatagacaggtagtcataggaacaaagacagggaagctgcagctttatgacttggcttcagggaatctgctggagacaatagatgcacatgatggagctttgtggtccatgtccctctctccagatcagcgtggctttgtgacaggtggtgcagataaatctgtcaaattctgggattttgagttagtgaaagatgaaaatagtacccaaaagagactttctgtgaagcaaacccgaactttgcaactagatgaagatgttctgtgtgtcagttactctcccaatcaaaagctattggctgtgtctttgctggactgtactgtgaaaattttctacgttgatactttaaagttttttctgtcactgtatggacacaaactgcctgttatatgcatggacatctctcatgatggagcactcatagcaactggctccgctgataggaatgtgaaaatctggggtttggactttggggactgccacaagtctctctttgcacatgatgacagtgtgatgtacctacagtttgtacccaagtctcacctcttcttcactgccggaaaagatcataagattaaacagtgggatgcagacaaatttgaacacatacagactctggagggtcatcaccaggaaatatggtgtttggctgtaagccccagtggagactatgttgtatcatcgtcccatgacaaatctctgagactttgggagagaacaagggagcctcttattcttgaggaagaaagggagatggaaagagaagcagaatatgaggagagtgtggccaaagaagaccaaccagcagttccaggagagactcaaggtgacagttactttactggaaagaaaactattgaaacagtgaaagcagctgagaggattatggaggctattgagttgtaccgagaagaaactgcaaaaatgaaggaacacaaagccatttgtaaagctgcagggaaagaggttccacttcccagcaaccccatcctaatggcttatggcagtatctcaccttcagcttatgtattagagatttttaaagggatcaagtcgagtgagctggaagaatctctacttgtgctgcctttctcttatgtcccagacattcttaaactctttaacgaattcattcagctgggctctgatgttgaacttatatgccggtgcctcttcttcctccttaggattcactttggacagatcactagcaatcaaatgcttgtgccagtgatagaaaaattaagggaaacaactatttcaaaagtcagccaagtccgggatgttatcggcttcaatatggctggtcttgattatctcaagagggaatgcgaggcaaaaagtgaagttatgttttttgctgatgctactagccacttggaagagaagaagaggaagaggaaaaagagggagaagttgattctaacgttgacttagaactgaaatgtggtatctttttttttttcaactttttcctttaaaggactcctaaactaagcacagaagagttggcgtcatcttaaaaataccaaataacagaagatcgcattgcagatgatatcaggatgtggtttccagctttgcctgagggaattccaacatgagattatgggctggctccatttcttggacttaaaatgcattattagtttaaaaatctttctgtgctctcaaagcttgagccttgcagctcaagcttgttgttccctttatattctagcagggaataaataattgttttaattaggtatttgtttcattggagttgaaattaacatttcaaaagtttttcgtatttttttatggcagatgatttgtcatttatttatattaggttttactgcctattgagacaaccaggtgcataattgattgccctttggccataaaaatgcagtgtcatggatcttagagctaaaaaggactgtaaaaattacccagaacagcgtcctcagacttaaccttctgcaagttatgtctgtatataagaagattctaattgctaactgtttatacttttctgaataaaatagttgtttctaatta

SEQ ID NO: 459011 - DNA, 2759 bp, Homo sapiens
cgagacgggcgtgttaaaggccggttgctagggctgggggaactcagattgcttcacctgtggtatcagacatcacaacatggggctcaccaagcagtacctacgctatgttgctagtgcggtctttggcgttatcggcagccaaaaaggtaatattgtctttgtgacacttcgtggtgagaaaggacgttatgtggcagtaccagcttgtgaacacgttttcatctgggacttaaggaaaggagagaagattcttatccttcaggggcttaaacaagaagttacttgcttatgcccctccccagatgggctacacttagctgttgggtatgaggatgggtcgatccgaatcttcagtctcctgagtggggaaggaaatgtgaccttcaatggtcacaaagcagctatcactaccttgaagtatgatcagctaggaggcagactggcatctgggtccaaggacacagatattattgtatgggatgtgatcaatgaaagtggtctgtaccgtctaaaggggcacaaggatgccatcacacaagcattgtttctacgagaaaagaacctgctagttactagtgggaaagataccatggtgaaatggtgggaccttgatactcagcactgctttaaaacaatggttggccaccggactgaggtatgggggttggttctgttgtcagaagaaaagcgactcatcactggggcctcagacagtgaactgagggtatgggacatagcttatctgcaagagattgaagacccggaagaaccagaccccaagaaaatcaaaggatcttctcctggaatacaagatactcttgaggcagaggatggtgcctttgagacggatgaagcccctgaggatcgaatcctttcatgcagaaaagctggttccataatgcgggaaggaagagacagagttgtaaaccttgcagtcgacaagacaggcaggattcttgcttgccatggaactgactctgtgctagaattgttttgtatcctttccaaaaaggaaattcagaagaaaatggataagaagatgaagaaagctagaaagaaagcaaaattacattctagcaaaggagaggaggaagatcctgaggttaatgttgaaatgagtctgcaagatgaaatccagcgggtgactaatataaaaacttctgccaaaatcaagtcctttgacttgattcattcacctcacggagagttaaaggctgtcttcctgctgcagaacaacctggtggaattgtattcactgaatccatccttgcctactcctcagcctgtcaggacaagcagaatcactattgggggtcatcgcagtgatgtgcggactttgtcattcagctcagacaatattgctgttctttcagctgcagctgattccattaaaatatggaacaggtctacactgcagtgtattcgcacaatgacctgtgaatatgcactttgctcattctttgtacctggtgatagacaggtagtcataggaacaaagacagggaagctgcagctttatgacttggcttcagggaatctgctggagacaatagatgcacatgatggagctttgtggtccatgtccctctctccagatcagcgtggctttgtgacaggtggtgcagataaatctgtcaaattctgggattttgagttagtgaaagatgaaaatagtacccaaaagagactttctgtgaagcaaacccgaactttgcaactagatgaagatgttctgtgtgtcagttactctcccaatcaaaagctattggctgtgtctttgctggactgtactgtgaaaattttctacgttgatactttaaagttttttctgtcactgtatggacacaaactgcctgttatatgcatggacatctctcatgatggagcactcatagcaactggctccgctgataggaatgtgaaaatctggggtttggactttggggactgccacaagtctctctttgcacatgatgacagtgtgatgtacctacagtttgtacccaagtctcacctcttcttcactgccggaaaagatcataagattaaacagtgggatgcagacaaatttgaacacatacagactctggagggtcatcaccaggaaatatggtgtttggctgtaagccccagtggagactatgttgtatcatcgtcccatgacaaatctctgagactttgggagagaacaagggagcctcttattcttgaggaagaaagggagatggaaagagaagcagaatatgaggagagtgtggccaaagaagaccaaccagcagttccaggagagactcaaggtgacagttactttactggaaagaaaactattgaaacagtgaaagcagctgagaggattatggaggctattgagttgtaccgagaagaaactgcaaaaatgaaggaacacaaagccatttgtaaagctgcagggaaagaggttccacttccacagagacaaactgtccttctatccacttttatcttttaataaatatcaaaaggaaaaagctgcaagggtgcaaagggcctgtgccagaagaaaacacacacagggaaaccgctttttttaatcaattgtagagaatagtcatttttaatctaaattagagaattgtgatacaatggcagtcctcaaaggcgtaacgagttcatctttctttcaccataggggttatagttggcttgtgctactctggaatcattttactgtttgtttttattatcttaaggggtaattaaaaaaaaaataggatttt

SEQ ID NO: 459012 - DNA, 884 bp, Homo sapiens
gcggcagcggaaggtgggagcgacgactgcaaaacggcagcgatggggtgggtaggcaggccgctttcagcgcgcttctaacaaggtggagagaggcgcttcacttccctaccgcccttaccgccgctccgtcttgtctcccaccgactcacagggaggcttgctgctcctccgcggccgttacagagagcggggcttctgcggccgctaccgtttccctggggctaggttgcttcgcagaaggctctggccctgagtccgagggggactgcggggtccaggggcgatgaatgctcccgcaacctccggagcttgtgcgcgtacttcagggaccggcaccacgtcaccgtcacctcctgagtagtgagttcccctctgatgaaaccactggtgtgtttactcaccatccccaccatttttttttccccaacctgatggaaggaagtacataatggagagcaagtttttaaagcacggtcgtgtcgtgtgaacttgctctagccaaattaggtttatagcactttttttggctctcattacctccagtccccacataaacaagagtgaccagctgggtcatccgcaagaccgtttgaaattattgtggcttgggtggaaacttaaaggagtgaagtatctgctttccagaaaaatcgttgtcattcaaagtgaaattaaacttgttttctttgcaataattcgcctttatttccttgtatatctgtaaactcttcacttttttgtaattactagacaattcggacttaaaaagagcctcagcatgtgtattttggaattgtgtagcttcataatgtgaaaattattcttttctatttgagtaaagtacagttaatttgaagtaaataaaatttctatttccaaaa

SEQ ID NO: 459013 - DNA, 151 bp, Homo sapiens
gcagaaggctctggccctgagtccgagggggactgcggggtccaggggcgatgaatggtgaggtggcttcagtccgccctccccggggacgctgagcgtgttcgtgttcgtgtttgtgtttgtgtttgtgttggacacccccgcccccgca

SEQ ID NO: 459014 - DNA, 638 bp, Homo sapiens
gcggcagcggaaggtgggagcgacgactgcaaaacggcagcgatgggctcccgcaacctccggagcttgtgcgcgtacttcagggaccggcaccacgtcaccgtcacctcctgagtagtgagttcccctctgatgaaaccactggtgtgtttactcaccatccccaccatttttttttccccaacctgatggaaggaagtacataatggagagcaagtttttaaagcacggtcgtgtcgtgtgaacttgctctagccaaattaggtttatagcactttttttggctctcattacctccagtccccacataaacaagagtgaccagctgggtcatccgcaagaccgtttgaaattattgtggcttgggtggaaacttaaaggagtgaagtatctgctttccagaaaaatcgttgtcattcaaagtgaaattaaacttgttttctttgcaataattcgcctttatttccttgtatatctgtaaactcttcacttttttgtaattactagacaattcggacttaaaaagagcctcagcatgtgtattttggaattgtgtagcttcataatgtgaaaattattcttttctatttgagtaaagtacagttaatttgaagtaaataaaatttctatttccaaaa

SEQ ID NO: 459015 - DNA, 299 bp, Homo sapiens
  misc_feature (10)..(10): n is a, c, g, or t
  misc_feature (29)..(29): n is a, c, g, or t
  misc_feature (44)..(44): n is a, c, g, or t
aatgttgggnaaattccaccaccaagganggtaaggattttccnggctcttacttcaatagttgtctaaactaggaaaggtaccctggactgccattctacgcagttgagagaacactggatgtgttgttgactgctgtagctcaatgtctagcaaaataagcgtttgataaattaaaaaatgaattaatttaaacttattaaaggaaagactggtaacccaaaactctcttctctaatgtattttttaacgaaaatgacaatatttctttaataaagtatttataccaaaaaaaaaaa

SEQ ID NO: 459016 - DNA, 4275 bp, Homo sapiens
tcatctgcatcatctgcatcctcctgctgcccgagagcagggaccagaacctgcctgagaacatttctaacggggagcactacacgcgccagccgctgctgccgcacaagaagggggagcagccactgctgctcaccaacgccgagctcaaggactactcgggcctccacgatgccgcagccgcgggtgacacactgcccgagggtgccacggccaacggcatgaaggccatgtagcccggcctgcggaacccggggctccagggtctggggcagcttgggcacaggtttacagaccagggaccgaacacgcagccaggggtgggaaagctgcctcagccaagctgagcctctcaactggtgtggggaaatcctgtctttccaaaagtccaaggagcgcgggtcggaggagacaaactctttggaaataaccctttcaagactttcttttctgccgttaaatgtgtgtatttattttggtcatttttacgagaagcactttattccctctccctctcactgatcacaaatggaatcacctccctgggcagcgagacgcagttgctctgggaagatgccacagtgaccagggccatggccggtccctctggggagatgggacacggctcctggcagcacccaggagccccccaggctgcctgcctgcgtgcagaggcaggagaggaccgtggagcgtttccgggactgcattttagacggagtgaaatgtacatgaatttggcttttgctagagtctgtgtatggttttttaaggtcctttttccctttctgtttgtaaggtaagagcttctgttcgtgtgcagggaaagcagctcacagacgccgttaaaaccagcttcatctttccttcaggatcatccttttgtacttgatgctggaagctcttggagaaaaagcttaaacatttcaccagaaatcttaattgagcagcagtcatatcgccacagctttgtgagtacacagctaacagatgcgtcgagacctgagatgtgctcgtttttattcctcctctcccagattggctccagcagaaaagtccctcgtgcacaggcagctcttgtgccggcactacttgaaaacatggctactttctaagctacaaaccattagaaaataagcccgtcacccacaccttgagcacacaccatgaagatcaccagcttggatggccgtcacctcagacatcactccagggagcacccgcaggagctgggccccctcacgcctgccttcctgggccagcttcctgcttgcagtcactcgcatagcacagaggtggggcttcgggcagggagcggagattcctcataggtgagtccaaatgacctccagcctctcgaaggcatcaagacaaattgaaagaaagcaataactcaccaaagctcaacgctgcccctgcctcgacctccatgggtctcttcgtgttcctcgtttcaccccagaaagtggaggtttcctcttggcattttcggaggaaacttgtaggacacccaaggcgactaagagacagcctccttggcaagggcaggcaccactttgtagcaacttgggcaccagcttttctggacagcctggcttcttactggcattgtccaactcatcccttctcgaagcatgtctttgccatgggctgtgtccttccagggaaattgtggtctccggcctgggtgagacaatgaagtgacttccaaccgacagttgctagaattcacagggcagaaaaggggttgaccttctccccttctggctttccacccggcctgctgcttgctgtcgccactcatgtctcctccacatgcggtccacacatcagtaagggcctggagatgtgtaaagacacagcaaggggcaagcagactcttggccacgtgtttccagtggctggaccacgccgacacctgggatcttgagatacccaggaagggaggctgtctggccagcctctccctgcctccacttgctccacgtccagctcatcctcaccttccctcttttttaaagtcacatttccatgtttcaacattagtttgcattcacctttacaaaggcctttctttagatctgtgcagcctttgcgtgccaaacttgtgaaattccttttaccttttttggagtacttgctataaagccacctgtcaacaaacccccattatgtacagaataggacctatccagtagccaggccagtaggcagttggggaaggtgggaaggatccagcgaggcccctgagcctgcacctggacaggtgtacgtctgcacccatcaccctcagcaccaggccaccctgcagtccacttactgtactgtgttgtggaaggatatgctaagtgatgaaagttgcgagcagtctcactggtcgtgtaaacttttttttttttttggaaattgaagctgtagagtgctgcccgaaatctctaggaagttggtggcaagggacagcactcacactcttctggtcatgatctctgatctccacctcaaatgacaataaaaaactggtccaacgaagacactgctcagcacttcagccatcaggactaatccatcgatgactggaaaagaggctagctttgaggaaaacagcctgggctcttgggagcagagtccagtgggtgtgaggctgacttgccgacggtcggcaggtaatggctctcagccggcgaggcggtcccacagctctcctcccagggcagcctgaggaggaggaggccgggtgcctgtttggtggcagcttcagcctagggatacctgaagctgttgagcaacacctttatgaaatgttgccagagcagcaacacttccctgtgggcacagccccgggaaatccggtaccaagtgagcaaggtggcaggacccacccaagcctgatacgcatctgggcccgccgggctcagcaggggaggctgctacggctgcccacttcccagcaccgtctgtcaggcttgaacccctctgtgctgttcccttcctggctaatagggagacccttcgcaggcacccactgtttcaacttgaccctcccaccccctgctactctcctccacacacccctccgttccgctagcctaccctgtcagcctttcaataaaagttatgcacaaatgtgaacacctgagatggagctgaacatttcttcactttgttctttttctgaagtcaaactcttatcaaatgccctaaaattattaccacccaagagaaacaggaaaaaggttacatgtttttgtttactgagagtaagatcacctgcatctggaagacgggctggtaaattggtttggctacagaacagaaagaaaacaaaaacaaacctcgtaagggaagtatcgcactcagacaccaccacttcctagagccaaatgagcaatcccaaactgcaagtgccgtaagtgggcctgtgacgtcacaccgcccggcccgaggtatcgcatgtgcgggggaggcccacactacagctgtcctctcgtctagaaggcaccacctcgctttcatgtcccgtgtgttttggaaaagcagtatggtgtgtcatgtctagcggcgaacacttccctccctctgtccttgaggttgtaatataaaaactgtgtttctgtacgtgtgggtgggaattctctgacggtgctcgttcatagcacaagcttacgctgagttctgaactgtcgttcacagctgcgtgtctgcatggtgtcgcatctgttgtacctttggggaaaatttgtatgtaaatgtacagaaataaaaacgttgccccattaacagatttcctctggaatgtcttccctacctcacctgatggtatccaccgaagggcatttcactaccattaatggtgagtaataaaatcctccgtgttcattcagacctcactgcgtcactactttgaacgcctctgtaagctgtgtcttcactcgccccgaggtgggtggagggaggcctctcactctgcttcgagtcctggtcttaaaggtagtcagaggcagaggctggattaaacacacactgtttaccaagtgccactctcagaccacctgagagacggggggccatcagtaaaattaagaggaatttttttcccttgttcgtgtatgttctgctgatccgtggcctgaaggttcctagagacgtcaagaaatgaatatcttacactgtgattctgtgaggaaagactggtaacccaaaactctcttctctaatgtattttttaacgaaaatgacaatatttctttaataaagtatttataccaaaaaaaaaaa

SEQ ID NO: 459017 - DNA, 617 bp, Homo sapiens
ccgggggatgatacggggtacattataaaacacagattactgcatttaataaatatatagttatctatcaggagtgagccttagctcttcatcagtaaataaaaacgttgccccattaacagatttcctctggaatgtcttccctacctcacctgatggtatccaccgaagggcatttcactaccattaatggtgagtaataaaatcctccgtgttcattcagacctcactgcgtcactactttgaacgcctctgtaagctgtgtcttcactcgccccgaggtgggtggagggaggcctctcactctgcttcgagtcctggtcttaaaggtagtcagaggcagaggctggattaaacacacactgtttaccaagtgccactctcagaccacctgagagacggggggccatcagtaaaattaagaggaatttttttcccttgttcgtgtatgttctgctgatccgtggcctgaaggttcctagagacgtcaagaaatgaatatcttacactgtgattctgtgaggaaagactggtaacccaaaactctcttctctaatgtattttttaacgaaaatgacaatatttctttaataaagtatttataccaaaaaaaaaaa

SEQ ID NO: 459018 - DNA, 4332 bp, Homo sapiens
tcatctgcatcatctgcatcctcctgctgcccgagagcagggaccagaacctgcctgagaacatttctaacggggagcactacacgcgccagccgctgctgccgcacaagaagggggagcagccactgctgctcaccaacgccgagctcaaggactactcgggcctccacgatgccgcagccgcgggtgacacactgcccgagggtgccacggccaacggcatgaaggccatgtagcccggcctgcggaacccggggctccagggtctggggcagcttgggcacaggtttacagaccagggaccgaacacgcagccaggggtgggaaagctgcctcagccaagctgagcctctcaactggtgtggggaaatcctgtctttccaaaagtccaaggagcgcgggtcggaggagacaaactctttggaaataaccctttcaagactttcttttctgccgttaaatgtgtgtatttattttggtcatttttacgagaagcactttattccctctccctctcactgatcacaaatggaatcacctccctgggcagcgagacgcagttgctctgggaagatgccacagtgaccagggccatggccggtccctctggggagatgggacacggctcctggcagcacccaggagccccccaggctgcctgcctgcgtgcagaggcaggagaggaccgtggagcgtttccgggactgcattttagacggagtgaaatgtacatgaatttggcttttgctagagtctgtgtatggttttttaaggtcctttttccctttctgtttgtaaggtaagagcttctgttcgtgtgcagggaaagcagctcacagacgccgttaaaaccagcttcatctttccttcaggatcatccttttgtacttgatgctggaagctcttggagaaaaagcttaaacatttcaccagaaatcttaattgagcagcagtcatatcgccacagctttgtgagtacacagctaacagatgcgtcgagacctgagatgtgctcgtttttattcctcctctcccagattggctccagcagaaaagtccctcgtgcacaggcagctcttgtgccggcactacttgaaaacatggctactttctaagctacaaaccattagaaaataactcaaaaagatggcagaggcaaatccacagaaggggggctgccctccacacacacacgcccgtcacccacaccttgagcacacaccatgaagatcaccagcttggatggccgtcacctcagacatcactccagggagcacccgcaggagctgggccccctcacgcctgccttcctgggccagcttcctgcttgcagtcactcgcatagcacagaggtggggcttcgggcagggagcggagattcctcataggtgagtccaaatgacctccagcctctcgaaggcatcaagacaaattgaaagaaagcaataactcaccaaagctcaacgctgcccctgcctcgacctccatgggtctcttcgtgttcctcgtttcaccccagaaagtggaggtttcctcttggcattttcggaggaaacttgtaggacacccaaggcgactaagagacagcctccttggcaagggcaggcaccactttgtagcaacttgggcaccagcttttctggacagcctggcttcttactggcattgtccaactcatcccttctcgaagcatgtctttgccatgggctgtgtccttccagggaaattgtggtctccggcctgggtgagacaatgaagtgacttccaaccgacagttgctagaattcacagggcagaaaaggggttgaccttctccccttctggctttccacccggcctgctgcttgctgtcgccactcatgtctcctccacatgcggtccacacatcagtaagggcctggagatgtgtaaagacacagcaaggggcaagcagactcttggccacgtgtttccagtggctggaccacgccgacacctgggatcttgagatacccaggaagggaggctgtctggccagcctctccctgcctccacttgctccacgtccagctcatcctcaccttccctcttttttaaagtcacatttccatgtttcaacattagtttgcattcacctttacaaaggcctttctttagatctgtgcagcctttgcgtgccaaacttgtgaaattccttttaccttttttggagtacttgctataaagccacctgtcaacaaacccccattatgtacagaataggacctatccagtagccaggccagtaggcagttggggaaggtgggaaggatccagcgaggcccctgagcctgcacctggacaggtgtacgtctgcacccatcaccctcagcaccaggccaccctgcagtccacttactgtactgtgttgtggaaggatatgctaagtgatgaaagttgcgagcagtctcactggtcgtgtaaacttttttttttttttggaaattgaagctgtagagtgctgcccgaaatctctaggaagttggtggcaagggacagcactcacactcttctggtcatgatctctgatctccacctcaaatgacaataaaaaactggtccaacgaagacactgctcagcacttcagccatcaggactaatccatcgatgactggaaaagaggctagctttgaggaaaacagcctgggctcttgggagcagagtccagtgggtgtgaggctgacttgccgacggtcggcaggtaatggctctcagccggcgaggcggtcccacagctctcctcccagggcagcctgaggaggaggaggccgggtgcctgtttggtggcagcttcagcctagggatacctgaagctgttgagcaacacctttatgaaatgttgccagagcagcaacacttccctgtgggcacagccccgggaaatccggtaccaagtgagcaaggtggcaggacccacccaagcctgatacgcatctgggcccgccgggctcagcaggggaggctgctacggctgcccacttcccagcaccgtctgtcaggcttgaacccctctgtgctgttcccttcctggctaatagggagacccttcgcaggcacccactgtttcaacttgaccctcccaccccctgctactctcctccacacacccctccgttccgctagcctaccctgtcagcctttcaataaaagttatgcacaaatgtgaacacctgagatggagctgaacatttcttcactttgttctttttctgaagtcaaactcttatcaaatgccctaaaattattaccacccaagagaaacaggaaaaaggttacatgtttttgtttactgagagtaagatcacctgcatctggaagacgggctggtaaattggtttggctacagaacagaaagaaaacaaaaacaaacctcgtaagggaagtatcgcactcagacaccaccacttcctagagccaaatgagcaatcccaaactgcaagtgccgtaagtgggcctgtgacgtcacaccgcccggcccgaggtatcgcatgtgcgggggaggcccacactacagctgtcctctcgtctagaaggcaccacctcgctttcatgtcccgtgtgttttggaaaagcagtatggtgtgtcatgtctagcggcgaacacttccctccctctgtccttgaggttgtaatataaaaactgtgtttctgtacgtgtgggtgggaattctctgacggtgctcgttcatagcacaagcttacgctgagttctgaactgtcgttcacagctgcgtgtctgcatggtgtcgcatctgttgtacctttggggaaaatttgtatgtaaatgtacagaaataaaaacgttgccccattaacagatttcctctggaatgtcttccctacctcacctgatggtatccaccgaagggcatttcactaccattaatggtgagtaataaaatcctccgtgttcattcagacctcactgcgtcactactttgaacgcctctgtaagctgtgtcttcactcgccccgaggtgggtggagggaggcctctcactctgcttcgagtcctggtcttaaaggtagtcagaggcagaggctggattaaacacacactgtttaccaagtgccactctcagaccacctgagagacggggggccatcagtaaaattaagaggaatttttttcccttgttcgtgtatgttctgctgatccgtggcctgaaggttcctagagacgtcaagaaatgaatatcttacactgtgattctgtgaggaaagactggtaacccaaaactctcttctctaatgtattttttaacgaaaatgacaatatttctttaataaagtatttataccaaaaaaaaaaa

SEQ ID NO: 459019 - DNA, 3015 bp, Homo sapiens
tcatctgcatcatctgcatcctcctgctgcccgagagcagggaccagaacctgcctgagaacatttctaacggggagcactacacgcgccagccgctgctgccgcacaagaagggggagcagccactgctgctcaccaacgccgagctcaaggactactcgggcctccacgatgccgcagccgcgggtgacacactgcccgagggtgccacggccaacggcatgaaggccatgtagcccggcctgcggaacccggggctccagggtctggggcagcttgggcacaggtttacagaccagggaccgaacacgcagccaggggtgggaaagctgcctcagccaagctgagcctctcaactggtgtggggaaatcctgtctttccaaaagtccaaggagcgcgggtcggaggagacaaactctttggaaataaccctttcaagactttcttttctgccgttaaatgtgtgtatttattttggtcatttttacgagaagcactttattccctctccctctcactgatcacaaatggaatcacctccctgggcagcgagacgcagttgctctgggaagatgccacagtgaccagggccatggccggtccctctggggagatgggacacggctcctggcagcacccaggagccccccaggctgcctgcctgcgtgcagaggcaggagaggaccgtggagcgtttccgggactgcattttagacggagtgaaatgtacatgaatttggcttttgctagagtctgtgtatggttttttaaggtcctttttccctttctgtttgtaaggtaagagcttctgttcgtgtgcagggaaagcagctcacagacgccgttaaaaccagcttcatctttccttcaggatcatccttttgtacttgatgctggaagctcttggagaaaaagcttaaacatttcaccagaaatcttaattgagcagcagtcatatcgccacagctttgtgagtacacagctaacagatgcgtcgagacctgagatgtgctcgtttttattcctcctctcccagattggctccagcagaaaagtccctcgtgcacaggcagctcttgtgccggcactacttgaaaacatggctactttctaagctacaaaccattagaaaataactcaaaaagatggcagaggcaaatccacagaaggggggctgccctccacacacacacgcccgtcacccacaccttgagcacacaccatgaagatcaccagcttggatggccgtcacctcagacatcactccagggagcacccgcaggagctgggccccctcacgcctgccttcctgggccagcttcctgcttgcagtcactcgcatagcacagaggtggggcttcgggcagggagcggagattcctcataggtgagtccaaatgacctccagcctctcgaaggcatcaagacaaattgaaagaaagcaataactcaccaaagctcaacgctgcccctgcctcgacctccatgggtctcttcgtgttcctcgtttcaccccagaaagtggaggtttcctcttggcattttcggaggaaacttgtaggacacccaaggcgactaagagacagcctccttggcaagggcaggcaccactttgtagcaacttgggcaccagcttttctggacagcctggcttcttactggcattgtccaactcatcccttctcgaagcatgtctttgccatgggctgtgtccttccagggaaattgtggtctccggcctgggtgagacaatgaagtgacttccaaccgacagttgctagaattcacagggcagaaaaggggttgaccttctccccttctggctttccacccggcctgctgcttgctgtcgccactcatgtctcctccacatgcggtccacacatcagtaagggcctggagatgtgtaaagacacagcaaggggcaagcagactcttggccacgtgtttccagtggctggaccacgccgacacctgggatcttgagatacccaggaagggaggctgtctggccagcctctccctgcctccacttgctccacgtccagctcatcctcaccttccctcttttttaaagtcacatttccatgtttcaacattagtttgcattcacctttacaaaggcctttctttagatctgtgcagcctttgcgtgccaaacttgtgaaattccttttaccttttttggagtacttgctataaagccacctgtcaacaaacccccattatgtacagaataggacctatccagtagccaggccagtaggcagttggggaaggtgggaaggatccagcgaggcccctgagcctgcacctggacaggtgtacgtctgcacccatcaccctcagcaccaggccaccctgcagtccacttactgtactgtgttgtggaaggatatgctaagtgatgaaagttgcgagcagtctcactggtcgtgtaaacttttttttttttttggaaattgaagctgtagagtgctgcccgaaatctctaggaagttggtggcaagggacagcactcacactcttctggtcatgatctctgatctccacctcaaatgacaataaaaaactggtccaacgaagacactgctcagcacttcagccatcaggactaatccatcgatgactggaaaagaggctagctttgaggaaaacagcctgggctcttgggagcagagtccagtgggtgtgaggctgacttgccgacggtcggcaggtaatggctctcagccggcgaggcggtcccacagctctcctcccagggcagcctgaggaggaggaggccgggtgcctgtttggtggcagcttcagcctagggatacctgaagctgttgagcaacacctttatgaaatgttgccagagcagcaacacttccctgtgggcacagccccgggaaatccggtaccaagtgagcaaggtggcaggacccacccaagcctgacagacggtgctgggaagtgggcagccgtagcagcctcccctgctgagcccggcgggcccaaatgcgtat

SEQ ID NO: 459020 - DNA, 638 bp, Homo sapiens
tatactaaaattggaacgatacagagaagattagcatggcccctgcgcaaggatgacacgcaaattcgtgaagcgttccatatttttagagattttagatgtcattgaaccatcagaatttgtgaagatcatggaacccctcttccggcagttggccaaatgtgtctccagcccacacttccaggtggcagagcgagctctctattactggaataatgaatacatcatgagtttaatcagtgacaacgcagcgaagattctgcccatcatgtttccttccttgtaccgcaactcaaagacccattggaacaagacaatacatggcttgatatacaacgccctgaagctcttcatggagatgaaccaaaagctatttgatgactgtacacaacagttcaaagcagagaaactaaaagagaagctaaaaatgaaagaacgggaagaagcatgggttaaaatagaaaatctagccaaagccaatccccaggtactaaaaaagagaataacatgaaaacgcccagggttacttgaatgtttttataagataggaatatatgtcttcaccatggggggggtctcgatttcactaacgttgtatatgaaaatgtctgcaataaaaagtacttttaaactttgta

SEQ ID NO: 459021 - DNA, 4342 bp, Homo sapiens
cgaaatcatttgtttacagtctggccaaggttgtggcctccagtattccccctaagagatgggatctttgcctaaaagttactgagaaacgaaggctgcaaaaagccggaaaatatcccagcttttaaggcacactgacagccaaacagaacgctctttccgtttgcagtttttttagtgtcattttaagttgcagcttccggccaatcagcgagcttcatgcctgctgacatcacgaaccagccagttccctccagctgcagagagcttcagtttgtctttttttttttaaactaaaatggaggctggtttcttgccttaaggagcccattgcctttcccgctgaagtctagatgttgacatgtaataaagcgggcagcaggatggtggtggatgcggccaactccaatgggcctttccagcccgtggtccttctccatattcgagatgttcctcctgctgatcaagagaagctttttatccagaagttacgtcagtgttgcgtcctctttgactttgtttctgatccactaagtgacctaaagtggaaggaagtaaaacgagctgctttaagtgaaatggtagaatatatcacccataatcggaatgtgatcacagagcctatttacccagaagtagtccatatgtttgcagttaacatgtttcgaacattaccaccttcctccaatcctacgggagcggaatttgacccggaggaagatgaaccaacgttagaagcagcctggcctcatctacagcttgtttatgaatttttcttaagatttttagagtctccagatttccaacctaatatagcgaagaaatatattgatcagaagtttgtattgcagcttttagagctctttgacagtgaagatcctcgggagagagattttcttaaaaccacccttcacagaatctatgggaaattcctaggcttgagagcttacatcagaaaacagataaataatatattttataggtttatttatgaaacagagcatcataatggcatagcagagttactggaaatattgggaagtataattaatggatttgccttaccactaaaagaagagcacaagattttcttattgaaggtgttactacctttgcacaaagtgaaatctctgagtgtctaccatccccagctggcatactgtgtagtgcagtttttagaaaaggacagcaccctcacggaaccagtggtgatggcacttctcaaatactggccaaagactcacagtccaaaagaagtaatgttcttaaacgaattagaagagattttagatgtcattgaaccatcagaatttgtgaagatcatggaacccctcttccggcagttggccaaatgtgtctccagcccacacttccaggtggcagagcgagctctctattactggaataatgaatacatcatgagtttaatcagtgacaacgcagcgaagattctgcccatcatgtttccttccttgtaccgcaactcaaagacccattggaacaagacaatacatggcttgatatacaacgccctgaagctcttcatggagatgaaccaaaagctatttgatgactgtacacaacagttcaaagcagagaaactaaaagagaagctaaaaatgaaagaacgggaagaagcatgggttaaaatagaaaatctagccaaagccaatccccagtacacagtgtatagtcaagccagcaccatgagcattccggttgcaatggagacagatgggcctttatttgaagatgtgcagatgctgagaaagacagtgaaggacgaggctcatcaggcacagaaagatccgaagaaggaccgtcctcttgcacgccgcaagtccgagctgcctcaggacccccacaccaagaaagccttggaagctcactgcagggccgatgagctggcctcccaggacggccgctagcctccggggcgccgcgtcggggccgggcccgccagttcttttccggattctgtagaaaatacatacttcctgtgccataccaatcagttacactcaaagctttcttggaccccgttccgtaggcaataacgtgcgtccgcctcagcgcgagattaggagttcaaacaatggtgacttcccagagcccgctggcagagccgcgggttgacgacggtgtcctcgcagtgtcgccgccaccccagcgtagtccaagtcagactatttcacaaagtcagagcgataggaaagcaccctgcccttcatcttcatgttctcccaaatggaacttaggatcttttaacataggtggttctgtgataacatcagtgttttccaaatcaaaggaacgctttaaaaaataggacctattttttaagactttacagcctttgaaatggtttccacgtgattgttacgccagcagttctcgttttgtttgtttttcaatctcagtgaaatggctctttgctttcgagttctcacgcaacgtactgggcaaatgacaatcctcagccgctggtattttctaaggggtctcttcactttgatgagtgacatgaacaccgtgtctccttctcttgtgtgtacctaaagccatatttccaagtctgtggtactccaggattccaggagtaagcctgtagaagagatttattttaaaagagattgctctgaaatttatcttaaaagagcttgctctgtctaccttgacagaaattggagttttaaaattatgtgttaatatttttatttgcagatttcgtttccgtcaacttaaacattgttgcccttcaacaaggctcttgaattaataaaattatagtctctaagaattccacattttatggaaagttagagcaaaatcattttgagttaagccagttcttagcctaatgcaaactgcagcgcctttaagcataaagtaacacaacagcattgcacggggccggcactgccgctgccttcactgaaggctgcagtgctgttctgagagcttggaggaggcaccagcgaggatgacgtttagtggagctctttctgttgaaaagagctcacgttatcaacaccttgtaaggaaaatacagtgtctgagttttcatcggtcttcacatgctgctatatattccacagagttccttgcatgtactgagcttttgttttagatggaatagcacaaggagaaaaatctttaaacttagtgctttgtctattctttatttctctcagggtggccagtattttgacttatttatcctgcttgaaagctacttgagatgtgtactgctattctaaacacgtgatctagtttctttcatctctggcataagattatataacttaatgttaagtgtcttgaggcataaaagacaaaatgtggcttattttaggatctgttttttcatcgaggtctcgggtatcctttcaaagatagtgagaagcagacactgctccttgtgcagctctggtacctcctgcccactgctgtcacttcaagccactggcaatgcttctgtcctcgtgtcttggaggaaaatcacctggggggaggggacttcttgtggtaagagcaagtgcaggtatgaaatgcgaagattgccccagctaaaagtggacaagtccgctttgtgagatgaatacttcctgagaaacttgacaagtatctctccattttaccattatgaaaactatcattaaaaaaaacagtttagatgccttctccttttgagggaaaaagggtgctttttattgtataaagcagcgtcttatgtattttgatataccattgtttgaacttccgtctttagctgatagattctcaaatatccttgattttggatgttcagtatgtttgtgagagaggtttctgggaagactctctttttgccctcgggaaaaagcaaaatatcaatgtttgggtgactgtgtaaagctcagtgtgtaagaacatctttttgtctaggttttctttctgctctttattgaagacaaacactcaccaaaaagaaaaataaaagttttcagagaaactaattttctttggcaagagtattacttaatattttggcctcctaaagtttccctagttagtactcggactcctgtgctaattgtcagcttacatatcattgtatagagactgtttattctgtaccaaactgatttcaaaagtactacattgaaaataaaccggtgactgtttttcttcataaagttctgcgtttggcatcttcactctttccaaaatgtatctgtacatcagaaatgtcactattccaagtgtctttttagtgtggctttagtatggcttccttttaatattgtacatacattgtatctttgttttatggtaataagtaataaaaatgtagacttca

SEQ ID NO: 459022 - DNA, 1830 bp, Homo sapiens
cgaaatcatttgtttacagtctggccaaggttgtggcctccagtattccccctaagagatgggatctttgcctaaaagttactgagaaacgaaggctgcaaaaagccggaaaatatcccagcttttaaggcacactgacagccaaacagaacgctctttccgtttgcagtttttttagtgtcattttaagttgcagcttccggccaatcagcgagcttcatgcctgctgacatcacgaaccagccagttccctccagctgcagagagcttcagtttgtctttttttttttaaactaaaatggaggctggtttcttgccttaaggagcccattgcctttcccgctgaagtctagatgttgacatgtaataaagcgggcagcaggatggtggtggatgcggccaactccaatgggcctttccagcccgtggtccttctccatattcgagatgttcctcctgctgatcaagagaagctttttatccagaagttacgtcagtgttgcgtcctctttgactttgtttctgatccactaagtgacctaaagtggaaggaagtaaaacgagctgctttaagtgaaatggtagaatatatcacccataatcggaatgtgatcacagagcctatttacccagaagtagtccatatgtttgcagttaacatgtttcgaacattaccaccttcctccaatcctacgggagcggaatttgacccggaggaagatgaaccaacgttagaagcagcctggcctcatctacagcttgtttatgaatttttcttaagatttttagagtctccagatttccaacctaatatagcgaagaaatatattgatcagaagtttgtattgcagcttttagagctctttgacagtgaagatcctcgggagagagattttcttaaaaccacccttcacagaatctatgggaaattcctaggcttgagagcttacatcagaaaacagataaataatatattttataggtttatttatgaaacagagcatcataatggcatagcagagttactggaaatattgggaagtataattaatggatttgccttaccactaaaagaagagcacaagattttcttattgaaggtgttactacctttgcacaaagtgaaatctctgagtgtctaccatccccagctggcatactgtgtagtgcagtttttagaaaaggacagcaccctcacggaaccagtggtgatggcacttctcaaatactggccaaagactcacagtccaaaagaagtaatgttcttaaacgaattagaagagattttagatgtcattgaaccatcagaatttgtgaagatcatggaacccctcttccggcagttggccaaatgtgtctccagcccacacttccaggtggcagagcgagctctctattactggaataatgaatacatcatgagtttaatcagtgacaacgcagcgaagattctgcccatcatgtttccttccttgtaccgcaactcaaagacccattggaacaagacaatacatggcttgatatacaacgccctgaagctcttcatggagatgaaccaaaagctatttgatgactgtacacaacagttcaaagcagagaaactaaaagagaagctaaaaatgaaagaacgggaagaagcatgggttaaaatagaaaatctagccaaagccaatccccaggtactaaaaaagagaataacatgaaaacgcccagggttacttgaatgtttttataagataggaatatatgtcttcaccatggggggggtctcgatttcactaacgttgtatatgaaaatgtctgcaataaaaagtacttttaaactttgta

SEQ ID NO: 459023 - DNA, 1929 bp, Homo sapiens
tttttatgacattatgtttatttttggctacatccagaaaagaatttgataaggcttaaactattaaaacatgtgcaacaggctattaaaggaaacaaaataactagaagccagttaggaggactagttcagcttttgaatggagctattcaacagtttcagaaattttttttacgctactaatgggccagtgggcatagcatctttttaagcttccttccagtttgtggtactaaaaccattgcagatgcataaaggaagatgcttatcatcctgtctgagttgtaagatgggacacaactccttatcatagtacattccttaaataagtacaagaattacagttgacccttgaacgtcacaagtttgaactgcacaggtccacttatatgtggatttttttcaaccaaatgcagattgcaaatgcacaagattcgagacctatgtatacagagggccaacttttcatacgcacgggttctgcgggccgactgtgggacttgaatatgcgtggatttggttgaggctgtgaagctgggcagggtttcagctgagctgaggttggaagtccctgaccttcagctgtggccgcctacggagcagcagggagagcaaacccatggagaaccccgcggcccccaaagcatggacggagctgccagccttctcccctgcccttcttcctctactcccgacctgccagccttctcccctgcccttctgcctctactcccgacctgccaaccttagcctaaaatcagagctgctagaatcacacacactgtcgtagctggttttgtattgtaaatgagtcattctgttattttggaaacttatgtctcatgccaggatctgcagatagttctttttcaaaatattgtttagacaaaataaatttctttaaatataatatctctactttaaatgcctggggtgttgcatgcatttttctaggctagcaaagcttaaagattatttctataatttcagttacatttacctttatagatgggttactctaagtaacaaattaaacacacatggatcttctaactttggctttaaatcctaagaagagataggtaatatataaaagagtattaaaaagaaatggagagtaaaggtatatgtcgggcagatgcagtagaaaagcaagggtcatgacgtcaatgctgggcaaagctaaattgtgaagacaaaacaataatgaaacagggttattcatcacgctaaagcgtacagtccataggatgatataactaccatgaatttggcctaaatgattgaacattgaaacacataaagcgagaactgtaggggattaaagacaaaatcagtgagtgcagtgctggtgggagaggcgcctggacttcttggcccctcacaggtcatgtggtagacataagttgttattactgtgagccagtagagactttcaggtttgatggctggaaaacaaatgctcattttataagtttttttttgttttgtgttttgttttgttttgtttttgagacggagtttcactcttgttgcccaggctggagtgcagtggtgcgatctcggctcaccgcaacctccgccccttgggttcaagcgattctcctgcctcagcctcccaagtagctgggattacagtcatgcaccaccacgcccagctcattttgtatttttttttagtagagatggggtttctccatgtcagtcaggctagtcctcaactcccgatctcaggtgatccgcccacctcagcctcccaaagtgctgggattacaggcgtgagccaccgtgcccgaccctcatggtataagtttttaaacttaatatatactagcttacagaggaaaccgatgtgatttccaaaaatttgaaataattagaaaccttattctcacattataatgcaataaaaatagaaataaacacaca

SEQ ID NO: 459024 - DNA, 1473 bp, Homo sapiens
ccaggttagttgatcttatggtgtcatctagaaaaacaagagatgcagattctgggtcacgaagttgaggctgtgaagctgggcagggtttcagctgagctgaggttggaagtccctgaccttcagctgtggccgcctacggagcagcagggagagcaaacccatggagaaccccgcggcccccaaagcatggacggagctgccagccttctcccctgcccttcttcctctactcccgacctgccagccttctcccctgcccttctgcctctactcccgacctgccaaccttagcctaaaatcagagctgctagaatcacacacactgtcgtagctggttttgtattgtaaatgagtcattctgttattttggaaacttatgtctcatgccaggatctgcagatagttctttttcaaaatattgtttagacaaaataaatttctttaaatataatatctctactttaaatgcctggggtgttgcatgcatttttctaggctagcaaagcttaaagattatttctataatttcagttacatttacctttatagatgggttactctaagtaacaaattaaacacacatggatcttctaactttggctttaaatcctaagaagagataggtaatatataaaagagtattaaaaagaaatggagagtaaaggtatatgtcgggcagatgcagtagaaaagcaagggtcatgacgtcaatgctgggcaaagctaaattgtgaagacaaaacaataatgaaacagggttattcatcacgctaaagcgtacagtccataggatgatataactaccatgaatttggcctaaatgattgaacattgaaacacataaagcgagaactgtaggggattaaagacaaaatcagtgagtgcagtgctggtgggagaggcgcctggacttcttggcccctcacaggtcatgtggtagacataagttgttattactgtgagccagtagagactttcaggtttgatggctggaaaacaaatgctcattttataagtttttttttgttttgtgttttgttttgttttgtttttgagacggagtttcactcttgttgcccaggctggagtgcagtggtgcgatctcggctcaccgcaacctccgccccttgggttcaagcgattctcctgcctcagcctcccaagtagctgggattacagtcatgcaccaccacgcccagctcattttgtatttttttttagtagagatggggtttctccatgtcagtcaggctagtcctcaactcccgatctcaggtgatccgcccacctcagcctcccaaagtgctgggattacaggcgtgagccaccgtgcccgaccctcatggtataagtttttaaacttaatatatactagcttacagaggaaaccgatgtgatttccaaaaatttgaaataattagaaaccttattctcacattataatgcaataaaaatagaaataaacacaca

SEQ ID NO: 459025 - DNA, 608 bp, Homo sapiens
ctccttttacagtactggtccctttacactgtactgcatactcgttttttcagtggatatatgagcttcttgtcaaaattatgtgggtcccatgaagaaacatctaaccaggggaagggggaaggattgagacataagacgtacttatataagatttcttttaagaattccaatcttggacatgttaaatttttttatattttctcatgtttaaatctcagttcgtttttcatgctgtgctcagcacgtaagtgtggggaaatggagcaggggggctgcgggaggagccgctggctgggctcaacatgcctgtgccttttccccttcagtgtgttcttgtgtctgatgcatctctaacacagatgacattttactgtttttcagagagaagctaaaaatgaaagaacgggaagaagcatgggttaaaatagaaaatctagccaaagccaatccccaggtactaaaaaagagaataacatgaaaacgcccagggttacttgaatgtttttataagataggaatatatgtcttcaccatggggggggtctcgatttcactaacgttgtatatgaaaatgtctgcaataaaaagtacttttaaactttgta

SEQ ID NO: 459026 - DNA, 672 bp, Homo sapiens
cgaaatcatttgtttacagtctggccaaggttgtggcctccagtattccccctaagagatgggatctttgcctaaaagttactgagaaacgaaggctgcaaaaagccggaaaatatcccagcttttaaggcacactgacagccaaacagaacgctctttccgtttgcagtttttttagtgtcattttaagttgcagcttccggccaatcagcgagcttcatgcctgctgacatcacgaaccagccagttccctccagctgcagagagcttcagtttgtctttttttttttaaactaaaatggaggctggtttcttgccttaaggagcccattgcctttcccgctgaagtctagatgttgacatgtaataaagcgggcagcaggatggtggtggatgcggccaactccaatgggcctttccagcccgtggtccttctccatattcgaggtaagttattgtgtgtttcactgaatcggaaccttccgtgggtagttaataaatggctattgtgcttcagataagaaaagcaggaagtcctttctagcagaattcaccccatttcgctgcagacttaaccagaggaggttgggtgtgtcactgcagtttggcattttacgaactacttacagaatttgaggcttgaaagaggccttgcatgcatagttcaaagct

SEQ ID NO: 459027 - DNA, 528 bp, Homo sapiens
tccagcaagccatccacttgtgtctttcaggtggcagagcgagctctctattactggaataatgaatacatcatgagtttaatcagtgacaacgcagcgaagattctgcccatcatgtttccttccttgtaccgcaactcaaagacccattggaacaagacaatacatggcttgatatacaacgccctgaagctcttcatggagatgaaccaaaagctatttgatgactgtacacaacagttcaaagcagagaaactaaaagagaagctaaaaatgaaagaacgggaagaagcatgggttaaaatagaaaatctagccaaagccaatccccaggtactaaaaaagagaataacatgaaaacgcccagggttacttgaatgtttttataagataggaatatatgtcttcaccatggggggggtctcggcacaacttcgtatgggcactcggcgtgtggcaacaacttcgtccatactgatttgcggccagagcctgagtctggatttacggcgttgcaggtaccgactg

SEQ ID NO: 459028 - DNA, 871 bp, Homo sapiens
cattgattaagctgttttatgctcattttattttctctttcaaagctctgtgttgccattattaaaattaatttttctgtcctcagggaataagatgaaaagaaactgacatttataggaaatcaagtattgccattattgtcctctttataattttgtcttaactatatttgttcaagtttcaatgtttttaattcagtttctgagcaaggtcgtttttggctactgtcagctggagacagtgagtggagtggcctctgtggctatgtgagagccactgtgaagaaagtctcgggatgtgtggctgtcagaaaacaagtaacgcggaatgagcaggccttgcattttagaccttagggatcctgtgcgatgtgggactgttggaatatggagcagcctgagagtggagaggcgagggctcagcaggaatgcgtgctcccaggctcaccgtgcggttttctttataggacaatacatggcttgatatacaacgccctgaagctcttcatggagatgaaccaaaagctatttgatgactgtacacaacagttcaaagcagagaaactaaagtgagttgttcctttcacaagttactgtttccaggatttttttcttaatcctaagtaaacctcttccactgttttgtcctaaaacggtattcttcactcgaaagcaaaaccaagcctttcatacttggaaagcaaattaaaactgtgttataataacgtattttgaaagaacaggtgtttaaaggtagctattctccccccttgtattgccagattaatcatctttgcaaaaagtgcttatgtaagcaagaatttaacattcagaattttttcttttcttgggctataatgggcttaaaggc

SEQ ID NO: 459029 - DNA, 595 bp, Homo sapiens
ggcggccgcgggggcgcgacggccggggcgggggcgctgctgctgcgggggcaggcggcggcaggggcggcggcggcggcggcggcccgctccagccatgccgaataaaaacaagaaggagaaagaatcaccaaaagcagggaagagtggaaaaagttcaaaagaaggacaagacacagtagaatcagagtgctactgtctaagagctggagctacagagcttgaaattaccactgaaaacactgaaatgttgggcccttcactgcttcctcataaggataccagaggcaacctggcatattaagcttgacacttggcagatcactgtgtaaattgtttttcaggaatacaagttgggacacttctgttcatttgacctttgagttgacccttaaattttattattgttttttttcccctcagtcttcagctcactgcttcacttctagttccacccacttaccaaatatgattgactcatgcaggtgaattaaaccattattgcacactttttccctctcctctctctcagtattactcttaacttgaatattttaacctgaacaatttaaataggcttgacattcccatgctg

SEQ ID NO: 459030 - DNA, 504 bp, Homo sapiens
actcactcactaatatttagaaatcacccacttggtggttggctctgtgcttagtgctaagaactggtcgtgttataggtgctgtgggtgcgtgtctgcgctggcttcaggaggagggagcaggccctgtggggcccagcaaggcctcccaggagaagcagtgtgttagctgaagtttaatgaactaattggtggtcctgggatgcagttgggaagatgggatgattcagcctgttggggtatgtgttgggggtggttgttgcactgtggtgagaaaattcctggaaaagggtgtatgtcaaaagggtgtaagtagcatccctttatgactgatgaaaggagagcagccgagagcagttaagtggaaggcaagacgcagcagtggcttctcacgccatcttcgtcactacacaaggggaagttgggctaagaataaatttgttttggttccaggatgaaactcaagagatacagaagaaactgaaagtgatacttttggcagag

SEQ ID NO: 459031 - DNA, 260 bp, Homo sapiens
caaaattagatatattctttttattcgtaatgatatagcatgaagttcttgcggggtaggagagagaggtattcatctgaaaactggctctgttttagtgtagacatttgtctacggggaaacagtaggaaagcatcaagaaatatttcttgatgtgtacaattgaagtgatgtttacaatgtagtgaaaaaaaaacctatgcacgcatgttcctgattttaataaagctctgcaaagatttccttcctcattctttgct

SEQ ID NO: 459032 - DNA, 4535 bp, Homo sapiens
cgaaatcatttgtttacagtctggccaaggttgtggcctccagtattccccctaagagatgggatctttgcctaaaagttactgagaaacgaaggctgcaaaaagccggaaaatatcccagcttttaaggcacactgacagccaaacagaacgctctttccgtttgcagtttttttagtgtcattttaagttgcagcttccggccaatcagcgagcttcatgcctgctgacatcacgaaccagccagttccctccagctgcagagagcttcagtttgtctttttttttttaaactaaaatggaggctggtttcttgccttaaggagcccattgcctttcccgctgaagtctagatgttgacatgtaataaagcgggcagcaggatggtggtggatgcggccaactccaatgggcctttccagcccgtggtccttctccatattcgagatgttcctcctgctgatcaagagaagctttttatccagaagttacgtcagtgttgcgtcctctttgactttgtttctgatccactaagtgacctaaagtggaaggaagtaaaacgagctgctttaagtgaaatggtagaatatatcacccataatcggaatgtgatcacagagcctatttacccagaagtagtccatatgtttgcagttaacatgtttcgaacattaccaccttcctccaatcctacgggagcggaatttgacccggaggaagatgaaccaacgttagaagcagcctggcctcatctacagcttgtttatgaatttttcttaagatttttagagtctccagatttccaacctaatatagcgaagaaatatattgatcagaagtttgtattgcagcttttagagctctttgacagtgaagatcctcgggagagagattttcttaaaaccacccttcacagaatctatgggaaattcctaggcttgagagcttacatcagaaaacagataaataatatattttataggtttatttatgaaacagagcatcataatggcatagcagagttactggaaatattgggaagtataattaatggatttgccttaccactaaaagaagagcacaagattttcttattgaaggtgttactacctttgcacaaagtgaaatctctgagtgtctaccatccccagctggcatactgtgtagtgcagtttttagaaaaggacagcaccctcacggaaccagtggtgatggcacttctcaaatactggccaaagactcacagtccaaaagaagtaatgttcttaaacgaattagaagagattttagatgtcattgaaccatcagaatttgtgaagatcatggaacccctcttccggcagttggccaaatgtgtctccagcccacacttccaggtggcagagcgagctctctattactggaataatgaatacatcatgagtttaatcagtgacaacgcagcgaagattctgcccatcatgtttccttccttgtaccgcaactcaaagacccattggaacaagacaatacatggcttgatatacaacgccctgaagctcttcatggagatgaaccaaaagctatttgatgactgtacacaacagttcaaagcagagaaactaaaagagaagctaaaaatgaaagaacgggaagaagcatgggttaaaatagaaaatctagccaaagccaatccccaggcacagaaagatccgaagaaggaccgtcctcttgcacgccgcaagtccgagctgcctcaggacccccacaccaagaaagccttggaagctcactgcagggccgatgagctggcctcccaggacggccgctagcctccggggcgccgcgtcggggccgggcccgccagttcttttccggattctgtagaaaatacatacttcctgtgccataccaatcagttacactcaaagctttcttggaccccgttccgtaggcaataacgtgcgtccgcctcagcgcgagattaggagttcaaacaatggtgacttcccagagcccgctggcagagccgcgggttgacgacggtgtcctcgcagtgtcgccgccaccccagcgtagtccaagtcagactatttcacaaagtcagagcgataggaaagcaccctgcccttcatcttcatgttctcccaaatggaacttaggatcttttaacataggtggttctgtgataacatcagtgttttccaaatcaaaggaacgctttaaaaaataggacctattttttaagactttacagcctttgaaatggtttccacgtgattgttacgccagcagttctcgttttgtttgtttttcaatctcagtgaaatggctctttgctttcgagttctcacgcaacgtactgggcaaatgacaatcctcagccgctggtattttctaaggggtctcttcactttgatgagtgacatgaacaccgtgtctccttctcttgtgtgtacctaaagccatatttccaagtctgtggtactccaggattccaggagtaagcctgtagaagagatttattttaaaagagattgctctgaaatttatcttaaaagagcttgctctgtctaccttgacagaaattggagttttaaaattatgtgttaatatttttatttgcagatttcgtttccgtcaacttaaacattgttgcccttcaacaaggctcttgaattaataaaattatagtctctaagaattccacattttatggaaagttagagcaaaatcattttgagttaagccagttcttagcctaatgcaaactgcagcgcctttaagcataaagtaacacaacagcattgcacggggccggcactgccgctgccttcactgaaggctgcagtgctgttctgagagcttggaggaggcaccagcgaggatgacgtttagtggagctctttctgttgaaaagagctcacgttatcaacaccttgtaaggaaaatacagtgtctgagttttcatcggtcttcacatgctgctatatattccacagagttccttgcatgtactgagcttttgttttagatggaatagcacaaggagaaaaatctttaaacttagtgctttgtctattctttatttctctcagggtggccagtattttgacttatttatcctgcttgaaagctacttgagatgtgtactgctattctaaacacgtgatctagtttctttcatctctggcataagattatataacttaatgttaagtgtcttgaggcataaaagacaaaatgtggcttattttaggatctgttttttcatcgaggtctcgggtatcctttcaaagatagtgagaagcagacactgctccttgtgcagctctggtacctcctgcccactgctgtcacttcaagccactggcaatgcttctgtcctcgtgtcttggaggaaaatcacctggggggaggggacttcttgtggtaagagcaagtgcaggtatgaaatgcgaagattgccccagctaaaagtggacaagtccgctttgtgagatgaatacttcctgagaaacttgacaagtatctctccattttaccattatgaaaactatcattaaaaaaaacagtttagatgccttctccttttgagggaaaaagggtgctttttattgtataaagcagcgtcttatgtattttgatataccattgtttgaacttccgtctttagctgatagattctcaaatatccttgattttggatgttcagtatgtttgtgagagaggtttctgggaagactctctttttgccctcgggaaaaagcaaaatatcaatgtttgggtgactgtgtaaagctcagtgtgtaagaacatctttttgtctaggttttctttctgctctttattgaagacaaacactcaccaaaaagaaaaataaaagttttcagagaaactaattttctttggcaagagtattacttaatattttggcctcctaaagtttccctagttagtactcggactcctgtgctaattgtcagcttacatatcattgtatagagactgtttattctgtaccaaactgatttcaaaagtactacattgaaaataaaccggtgactgtttttcttcataaagttctgcgtttggcatcttcactctttccaaaatgtatctgtacatcagaaatgtcactattccaagtgtctttttagtgtggctttagtatggcttccttttaatattgtacatacattgtatctttgttttatggtaataagtaataaaaatgtagacttcatattttgtacaaaatgtcctatgtacagaataaaaaagttcatagaaacagcaaatataggtaagtggcacaattatttttctttagaaaatatctgtaactttatgcattagtgaaatgttaagtaccgacatattttttaacattttgtaattcaaaactttttgttttgacattgtttatgaagagaaacttcatacacttgccatttaatatgctcttttatctaattttcaaaaactctaaaaaacggtgtatcatatggactaaataaagaacatgtgaattttattgctcatcatgaaactaa

SEQ ID NO: 459033 - DNA, 4189 bp, Homo sapiens
ggcggccgcgggggcgcgacggccggggcgggggcgctgctgctgcgggggcaggcggcggcaggggcggcggcggcggcggcggcccgctccagccatgccgaataaaaacaagaaggagaaagaatcaccaaaagcagggaagagtggaaaaagttcaaaagaaggacaagacacagtagaatcagagcaaatttccgtcaggaaaaacagccttgttgctgtcccgtctacagtatctgctaaaataaaagtaccagtctctcagcccatagtgaagaaagacaaacggcaaaattcttcaaggtttagcgcaagcaataatagagaacttcaaaaactaccatccttaaaagatgttcctcctgctgatcaagagaagctttttatccagaagttacgtcagtgttgcgtcctctttgactttgtttctgatccactaagtgacctaaagtggaaggaagtaaaacgagctgctttaagtgaaatggtagaatatatcacccataatcggaatgtgatcacagagcctatttacccagaagtagtccatatgtttgcagttaacatgtttcgaacattaccaccttcctccaatcctacgggagcggaatttgacccggaggaagatgaaccaacgttagaagcagcctggcctcatctacagcttgtttatgaatttttcttaagatttttagagtctccagatttccaacctaatatagcgaagaaatatattgatcagaagtttgtattgcagcttttagagctctttgacagtgaagatcctcgggagagagattttcttaaaaccacccttcacagaatctatgggaaattcctaggcttgagagcttacatcagaaaacagataaataatatattttataggtttatttatgaaacagagcatcataatggcatagcagagttactggaaatattgggaagtataattaatggatttgccttaccactaaaagaagagcacaagattttcttattgaaggtgttactacctttgcacaaagtgaaatctctgagtgtctaccatccccagctggcatactgtgtagtgcagtttttagaaaaggacagcaccctcacggaaccagtggtgatggcacttctcaaatactggccaaagactcacagtccaaaagaagtaatgttcttaaacgaattagaagagattttagatgtcattgaaccatcagaatttgtgaagatcatggaacccctcttccggcagttggccaaatgtgtctccagcccacacttccaggtggcagagcgagctctctattactggaataatgaatacatcatgagtttaatcagtgacaacgcagcgaagattctgcccatcatgtttccttccttgtaccgcaactcaaagacccattggaacaagacaatacatggcttgatatacaacgccctgaagctcttcatggagatgaaccaaaagctatttgatgactgtacacaacagttcaaagcagagaaactaaaagagaagctaaaaatgaaagaacgggaagaagcatgggttaaaatagaaaatctagccaaagccaatccccaggcacagaaagatccgaagaaggaccgtcctcttgcacgccgcaagtccgagctgcctcaggacccccacaccaagaaagccttggaagctcactgcagggccgatgagctggcctcccaggacggccgctagcctccggggcgccgcgtcggggccgggcccgccagttcttttccggattctgtagaaaatacatacttcctgtgccataccaatcagttacactcaaagctttcttggaccccgttccgtaggcaataacgtgcgtccgcctcagcgcgagattaggagttcaaacaatggtgacttcccagagcccgctggcagagccgcgggttgacgacggtgtcctcgcagtgtcgccgccaccccagcgtagtccaagtcagactatttcacaaagtcagagcgataggaaagcaccctgcccttcatcttcatgttctcccaaatggaacttaggatcttttaacataggtggttctgtgataacatcagtgttttccaaatcaaaggaacgctttaaaaaataggacctattttttaagactttacagcctttgaaatggtttccacgtgattgttacgccagcagttctcgttttgtttgtttttcaatctcagtgaaatggctctttgctttcgagttctcacgcaacgtactgggcaaatgacaatcctcagccgctggtattttctaaggggtctcttcactttgatgagtgacatgaacaccgtgtctccttctcttgtgtgtacctaaagccatatttccaagtctgtggtactccaggattccaggagtaagcctgtagaagagatttattttaaaagagattgctctgaaatttatcttaaaagagcttgctctgtctaccttgacagaaattggagttttaaaattatgtgttaatatttttatttgcagatttcgtttccgtcaacttaaacattgttgcccttcaacaaggctcttgaattaataaaattatagtctctaagaattccacattttatggaaagttagagcaaaatcattttgagttaagccagttcttagcctaatgcaaactgcagcgcctttaagcataaagtaacacaacagcattgcacggggccggcactgccgctgccttcactgaaggctgcagtgctgttctgagagcttggaggaggcaccagcgaggatgacgtttagtggagctctttctgttgaaaagagctcacgttatcaacaccttgtaaggaaaatacagtgtctgagttttcatcggtcttcacatgctgctatatattccacagagttccttgcatgtactgagcttttgttttagatggaatagcacaaggagaaaaatctttaaacttagtgctttgtctattctttatttctctcagggtggccagtattttgacttatttatcctgcttgaaagctacttgagatgtgtactgctattctaaacacgtgatctagtttctttcatctctggcataagattatataacttaatgttaagtgtcttgaggcataaaagacaaaatgtggcttattttaggatctgttttttcatcgaggtctcgggtatcctttcaaagatagtgagaagcagacactgctccttgtgcagctctggtacctcctgcccactgctgtcacttcaagccactggcaatgcttctgtcctcgtgtcttggaggaaaatcacctggggggaggggacttcttgtggtaagagcaagtgcaggtatgaaatgcgaagattgccccagctaaaagtggacaagtccgctttgtgagatgaatacttcctgagaaacttgacaagtatctctccattttaccattatgaaaactatcattaaaaaaaacagtttagatgccttctccttttgagggaaaaagggtgctttttattgtataaagcagcgtcttatgtattttgatataccattgtttgaacttccgtctttagctgatagattctcaaatatccttgattttggatgttcagtatgtttgtgagagaggtttctgggaagactctctttttgccctcgggaaaaagcaaaatatcaatgtttgggtgactgtgtaaagctcagtgtgtaagaacatctttttgtctaggttttctttctgctctttattgaagacaaacactcaccaaaaagaaaaataaaagttttcagagaaactaattttctttggcaagagtattacttaatattttggcctcctaaagtttccctagttagtactcggactcctgtgctaattgtcagcttacatatcattgtatagagactgtttattctgtaccaaactgatttcaaaagtactacattgaaaataaaccggtgactgtttttcttcataaagttctgcgtttggcatcttcactctttccaaaatgtatctgtacatcagaaatgtcactattccaagtgtctttttagtgtggctttagtatggcttccttttaatattgtacatacattgtatctttgttttatggtaataagtaataaaaatgtagacttcatattttgtacaaaatgtcctatgtacagaataaaaaagttcatagaaacagcaaa

SEQ ID NO: 459034 - DNA, 4106 bp, Homo sapiens
tgcggagggcgggaccaaccaggaaaggacgggactgtcgggaatcaccaaaagcagggaagagtggaaaaagttcaaaagaaggacaagacacagtagaatcagagcaaatttccgtcaggaaaaacagccttgttgctgtcccgtctacagtatctgctaaaataaaagtaccagtctctcagcccatagtgaagaaagacaaacggcaaaattcttcaaggtttagcgcaagcaataatagagaacttcaaaaactaccatccttaaaagatgttcctcctgctgatcaagagaagctttttatccagaagttacgtcagtgttgcgtcctctttgactttgtttctgatccactaagtgacctaaagtggaaggaagtaaaacgagctgctttaagtgaaatggtagaatatatcacccataatcggaatgtgatcacagagcctatttacccagaagtagtccatatgtttgcagttaacatgtttcgaacattaccaccttcctccaatcctacgggagcggaatttgacccggaggaagatgaaccaacgttagaagcagcctggcctcatctacagcttgtttatgaatttttcttaagatttttagagtctccagatttccaacctaatatagcgaagaaatatattgatcagaagtttgtattgcagcttttagagctctttgacagtgaagatcctcgggagagagattttcttaaaaccacccttcacagaatctatgggaaattcctaggcttgagagcttacatcagaaaacagataaataatatattttataggtttatttatgaaacagagcatcataatggcatagcagagttactggaaatattgggaagtataattaatggatttgccttaccactaaaagaagagcacaagattttcttattgaaggtgttactacctttgcacaaagtgaaatctctgagtgtctaccatccccagctggcatactgtgtagtgcagtttttagaaaaggacagcaccctcacggaaccagtggtgatggcacttctcaaatactggccaaagactcacagtccaaaagaagtaatgttcttaaacgaattagaagagattttagatgtcattgaaccatcagaatttgtgaagatcatggaacccctcttccggcagttggccaaatgtgtctccagcccacacttccaggtggcagagcgagctctctattactggaataatgaatacatcatgagtttaatcagtgacaacgcagcgaagattctgcccatcatgtttccttccttgtaccgcaactcaaagacccattggaacaagacaatacatggcttgatatacaacgccctgaagctcttcatggagatgaaccaaaagctatttgatgactgtacacaacagttcaaagcagagaaactaaaagagaagctaaaaatgaaagaacgggaagaagcatgggttaaaatagaaaatctagccaaagccaatccccaggcacagaaagatccgaagaaggaccgtcctcttgcacgccgcaagtccgagctgcctcaggacccccacaccaagaaagccttggaagctcactgcagggccgatgagctggcctcccaggacggccgctagcctccggggcgccgcgtcggggccgggcccgccagttcttttccggattctgtagaaaatacatacttcctgtgccataccaatcagttacactcaaagctttcttggaccccgttccgtaggcaataacgtgcgtccgcctcagcgcgagattaggagttcaaacaatggtgacttcccagagcccgctggcagagccgcgggttgacgacggtgtcctcgcagtgtcgccgccaccccagcgtagtccaagtcagactatttcacaaagtcagagcgataggaaagcaccctgcccttcatcttcatgttctcccaaatggaacttaggatcttttaacataggtggttctgtgataacatcagtgttttccaaatcaaaggaacgctttaaaaaataggacctattttttaagactttacagcctttgaaatggtttccacgtgattgttacgccagcagttctcgttttgtttgtttttcaatctcagtgaaatggctctttgctttcgagttctcacgcaacgtactgggcaaatgacaatcctcagccgctggtattttctaaggggtctcttcactttgatgagtgacatgaacaccgtgtctccttctcttgtgtgtacctaaagccatatttccaagtctgtggtactccaggattccaggagtaagcctgtagaagagatttattttaaaagagattgctctgaaatttatcttaaaagagcttgctctgtctaccttgacagaaattggagttttaaaattatgtgttaatatttttatttgcagatttcgtttccgtcaacttaaacattgttgcccttcaacaaggctcttgaattaataaaattatagtctctaagaattccacattttatggaaagttagagcaaaatcattttgagttaagccagttcttagcctaatgcaaactgcagcgcctttaagcataaagtaacacaacagcattgcacggggccggcactgccgctgccttcactgaaggctgcagtgctgttctgagagcttggaggaggcaccagcgaggatgacgtttagtggagctctttctgttgaaaagagctcacgttatcaacaccttgtaaggaaaatacagtgtctgagttttcatcggtcttcacatgctgctatatattccacagagttccttgcatgtactgagcttttgttttagatggaatagcacaaggagaaaaatctttaaacttagtgctttgtctattctttatttctctcagggtggccagtattttgacttatttatcctgcttgaaagctacttgagatgtgtactgctattctaaacacgtgatctagtttctttcatctctggcataagattatataacttaatgttaagtgtcttgaggcataaaagacaaaatgtggcttattttaggatctgttttttcatcgaggtctcgggtatcctttcaaagatagtgagaagcagacactgctccttgtgcagctctggtacctcctgcccactgctgtcacttcaagccactggcaatgcttctgtcctcgtgtcttggaggaaaatcacctggggggaggggacttcttgtggtaagagcaagtgcaggtatgaaatgcgaagattgccccagctaaaagtggacaagtccgctttgtgagatgaatacttcctgagaaacttgacaagtatctctccattttaccattatgaaaactatcattaaaaaaaacagtttagatgccttctccttttgagggaaaaagggtgctttttattgtataaagcagcgtcttatgtattttgatataccattgtttgaacttccgtctttagctgatagattctcaaatatccttgattttggatgttcagtatgtttgtgagagaggtttctgggaagactctctttttgccctcgggaaaaagcaaaatatcaatgtttgggtgactgtgtaaagctcagtgtgtaagaacatctttttgtctaggttttctttctgctctttattgaagacaaacactcaccaaaaagaaaaataaaagttttcagagaaactaattttctttggcaagagtattacttaatattttggcctcctaaagtttccctagttagtactcggactcctgtgctaattgtcagcttacatatcattgtatagagactgtttattctgtaccaaactgatttcaaaagtactacattgaaaataaaccggtgactgtttttcttcataaagttctgcgtttggcatcttcactctttccaaaatgtatctgtacatcagaaatgtcactattccaagtgtctttttagtgtggctttagtatggcttccttttaatattgtacatacattgtatctttgttttatggtaataagtaataaaaatgtagacttcatattttgtacaaaatgtcctatgtacagaataaaaaagttcatagaaacagcaaa

SEQ ID NO: 459035 - DNA, 2017 bp, Homo sapiens
cgaaatcatttgtttacagtctggccaaggttgtggcctccagtattccccctaagagatgggatctttgcctaaaagttactgagaaacgaaggctgcaaaaagccggaaaatatcccagcttttaaggcacactgacagccaaacagaacgctctttccgtttgcagtttttttagtgtcattttaagttgcagcttccggccaatcagcgagcttcatgcctgctgacatcacgaaccagccagttccctccagctgcagagagcttcagtttgtctttttttttttaaactaaaatggaggctggtttcttgccttaaggagcccattgcctttcccgctgaagtctagatgttgacatgtaataaagcgggcagcaggatggtggtggatgcggccaactccaatgggcctttccagcccgtggtccttctccatattcgagatgttcctcctgctgatcaagagaagctttttatccagaagttacgtcagtgttgcgtcctctttgactttgtttctgatccactaagtgacctaaagtggaaggaagtaaaacgagctgctttaagtgaaatggtagaatatatcacccataatcggaatgtgatcacagagcctatttacccagaagtagtccatatgtttgcagttaacatgtttcgaacattaccaccttcctccaatcctacgggagcggaatttgacccggaggaagatgaaccaacgttagaagcagcctggcctcatctacagcttgtttatgaatttttcttaagatttttagagtctccagatttccaacctaatatagcgaagaaatatattgatcagaagtttgtattgcagcttttagagctctttgacagtgaagatcctcgggagagagattttcttaaaaccacccttcacagaatctatgggaaattcctaggcttgagagcttacatcagaaaacagataaataatatattttataggtttatttatgaaacagagcatcataatggcatagcagagttactggaaatattgggaagtataattaatggatttgccttaccactaaaagaagagcacaagattttcttattgaaggtgttactacctttgcacaaagtgaaatctctgagtgtctaccatccccagctggcatactgtgtagtgcagtttttagaaaaggacagcaccctcacggaaccagtggtgatggcacttctcaaatactggccaaagactcacagtccaaaagaagtaatgttcttaaacgaattagaagagattttagatgtcattgaaccatcagaatttgtgaagatcatggaacccctcttccggcagttggccaaatgtgtctccagcccacacttccaggtggcagagcgagctctctattactggaataatgaatacatcatgagtttaatcagtgacaacgcagcgaagattctgcccatcatgtttccttccttgtaccgcaactcaaagacccattggaacaagacaatacatggcttgatatacaacgccctgaagctcttcatggagatgaaccaaaagctatttgatgactgtacacaacagttcaaagcagagaaactaaaagagaagctaaaaatgaaagaacgggaagaagcatgggttaaaatagaaaatctagccaaagccaatccccaggtactaaaaaagagaataacatgaaaacgcccagggttacttgaatgtttttataagataggaatatatgtcttcaccatggggggggtctcgatttcactaacgttgtatatgaaaatgtctgcaataaaaagtacttttaaactttgtacaacagataatagcactagataacagcaaaacaacttgttgggggcgccgggcgcagagaaattttaaacctcggttgggggccggcccgtgtgtaatcgcacggtgcaaccggtccagaggaccgggctgaacgggggggtccaccaaaaacgcgggccggtttgacacacaggggcgggcagggc

SEQ ID NO: 459036 - DNA, 4072 bp, Homo sapiens
actcactcactaatatttagaaatcacccacttggtggttggctctgtgcttagtgctaagaactggtcgtgttataggtgctgtgggtgcgtgtctgcgctggcttcaggaggagggagcaggccctgtggggcccagcaaggcctcccaggagaagcagtgtgttagctgaagtttaatgaactaattggtggtcctgggatgcagttgggaagatgggatgattcagcctgttgggatgttcctcctgctgatcaagagaagctttttatccagaagttacgtcagtgttgcgtcctctttgactttgtttctgatccactaagtgacctaaagtggaaggaagtaaaacgagctgctttaagtgaaatggtagaatatatcacccataatcggaatgtgatcacagagcctatttacccagaagtagtccatatgtttgcagttaacatgtttcgaacattaccaccttcctccaatcctacgggagcggaatttgacccggaggaagatgaaccaacgttagaagcagcctggcctcatctacagcttgtttatgaatttttcttaagatttttagagtctccagatttccaacctaatatagcgaagaaatatattgatcagaagtttgtattgcagcttttagagctctttgacagtgaagatcctcgggagagagattttcttaaaaccacccttcacagaatctatgggaaattcctaggcttgagagcttacatcagaaaacagataaataatatattttataggtttatttatgaaacagagcatcataatggcatagcagagttactggaaatattgggaagtataattaatggatttgccttaccactaaaagaagagcacaagattttcttattgaaggtgttactacctttgcacaaagtgaaatctctgagtgtctaccatccccagctggcatactgtgtagtgcagtttttagaaaaggacagcaccctcacggaaccagtggtgatggcacttctcaaatactggccaaagactcacagtccaaaagaagtaatgttcttaaacgaattagaagagattttagatgtcattgaaccatcagaatttgtgaagatcatggaacccctcttccggcagttggccaaatgtgtctccagcccacacttccaggtggcagagcgagctctctattactggaataatgaatacatcatgagtttaatcagtgacaacgcagcgaagattctgcccatcatgtttccttccttgtaccgcaactcaaagacccattggaacaagacaatacatggcttgatatacaacgccctgaagctcttcatggagatgaaccaaaagctatttgatgactgtacacaacagttcaaagcagagaaactaaaagagaagctaaaaatgaaagaacgggaagaagcatgggttaaaatagaaaatctagccaaagccaatccccaggcacagaaagatccgaagaaggaccgtcctcttgcacgccgcaagtccgagctgcctcaggacccccacaccaagaaagccttggaagctcactgcagggccgatgagctggcctcccaggacggccgctagcctccggggcgccgcgtcggggccgggcccgccagttcttttccggattctgtagaaaatacatacttcctgtgccataccaatcagttacactcaaagctttcttggaccccgttccgtaggcaataacgtgcgtccgcctcagcgcgagattaggagttcaaacaatggtgacttcccagagcccgctggcagagccgcgggttgacgacggtgtcctcgcagtgtcgccgccaccccagcgtagtccaagtcagactatttcacaaagtcagagcgataggaaagcaccctgcccttcatcttcatgttctcccaaatggaacttaggatcttttaacataggtggttctgtgataacatcagtgttttccaaatcaaaggaacgctttaaaaaataggacctattttttaagactttacagcctttgaaatggtttccacgtgattgttacgccagcagttctcgttttgtttgtttttcaatctcagtgaaatggctctttgctttcgagttctcacgcaacgtactgggcaaatgacaatcctcagccgctggtattttctaaggggtctcttcactttgatgagtgacatgaacaccgtgtctccttctcttgtgtgtacctaaagccatatttccaagtctgtggtactccaggattccaggagtaagcctgtagaagagatttattttaaaagagattgctctgaaatttatcttaaaagagcttgctctgtctaccttgacagaaattggagttttaaaattatgtgttaatatttttatttgcagatttcgtttccgtcaacttaaacattgttgcccttcaacaaggctcttgaattaataaaattatagtctctaagaattccacattttatggaaagttagagcaaaatcattttgagttaagccagttcttagcctaatgcaaactgcagcgcctttaagcataaagtaacacaacagcattgcacggggccggcactgccgctgccttcactgaaggctgcagtgctgttctgagagcttggaggaggcaccagcgaggatgacgtttagtggagctctttctgttgaaaagagctcacgttatcaacaccttgtaaggaaaatacagtgtctgagttttcatcggtcttcacatgctgctatatattccacagagttccttgcatgtactgagcttttgttttagatggaatagcacaaggagaaaaatctttaaacttagtgctttgtctattctttatttctctcagggtggccagtattttgacttatttatcctgcttgaaagctacttgagatgtgtactgctattctaaacacgtgatctagtttctttcatctctggcataagattatataacttaatgttaagtgtcttgaggcataaaagacaaaatgtggcttattttaggatctgttttttcatcgaggtctcgggtatcctttcaaagatagtgagaagcagacactgctccttgtgcagctctggtacctcctgcccactgctgtcacttcaagccactggcaatgcttctgtcctcgtgtcttggaggaaaatcacctggggggaggggacttcttgtggtaagagcaagtgcaggtatgaaatgcgaagattgccccagctaaaagtggacaagtccgctttgtgagatgaatacttcctgagaaacttgacaagtatctctccattttaccattatgaaaactatcattaaaaaaaacagtttagatgccttctccttttgagggaaaaagggtgctttttattgtataaagcagcgtcttatgtattttgatataccattgtttgaacttccgtctttagctgatagattctcaaatatccttgattttggatgttcagtatgtttgtgagagaggtttctgggaagactctctttttgccctcgggaaaaagcaaaatatcaatgtttgggtgactgtgtaaagctcagtgtgtaagaacatctttttgtctaggttttctttctgctctttattgaagacaaacactcaccaaaaagaaaaataaaagttttcagagaaactaattttctttggcaagagtattacttaatattttggcctcctaaagtttccctagttagtactcggactcctgtgctaattgtcagcttacatatcattgtatagagactgtttattctgtaccaaactgatttcaaaagtactacattgaaaataaaccggtgactgtttttcttcataaagttctgcgtttggcatcttcactctttccaaaatgtatctgtacatcagaaatgtcactattccaagtgtctttttagtgtggctttagtatggcttccttttaatattgtacatacattgtatctttgttttatggtaataagtaataaaaatgtagacttcatattttgtacaaaatgtcctatgtacagaataaaaaagttcatagaaacagcaaa

SEQ ID NO: 459037 - DNA, 3777 bp, Homo sapiens
gcctgttctgctcagttgctccctgtggcctcggccagaatggtggtctcttcctctgtggcatgtctgtgactcttgggcagcaggcctcttccagagggacggctgtttcctctcccccaagacctacagcctcgtctctggtttgcagttaacatgtttcgaacattaccaccttcctccaatcctacgggagcggaatttgacccggaggaagatgaaccaacgttagaagcagcctggcctcatctacagcttgtttatgaatttttcttaagatttttagagtctccagatttccaacctaatatagcgaagaaatatattgatcagaagtttgtattgcagcttttagagctctttgacagtgaagatcctcgggagagagattttcttaaaaccacccttcacagaatctatgggaaattcctaggcttgagagcttacatcagaaaacagataaataatatattttataggtttatttatgaaacagagcatcataatggcatagcagagttactggaaatattgggaagtataattaatggatttgccttaccactaaaagaagagcacaagattttcttattgaaggtgttactacctttgcacaaagtgaaatctctgagtgtctaccatccccagctggcatactgtgtagtgcagtttttagaaaaggacagcaccctcacggaaccagtggtgatggcacttctcaaatactggccaaagactcacagtccaaaagaagtaatgttcttaaacgaattagaagagattttagatgtcattgaaccatcagaatttgtgaagatcatggaacccctcttccggcagttggccaaatgtgtctccagcccacacttccaggtggcagagcgagctctctattactggaataatgaatacatcatgagtttaatcagtgacaacgcagcgaagattctgcccatcatgtttccttccttgtaccgcaactcaaagacccattggaacaagacaatacatggcttgatatacaacgccctgaagctcttcatggagatgaaccaaaagctatttgatgactgtacacaacagttcaaagcagagaaactaaaagagaagctaaaaatgaaagaacgggaagaagcatgggttaaaatagaaaatctagccaaagccaatccccaggcacagaaagatccgaagaaggaccgtcctcttgcacgccgcaagtccgagctgcctcaggacccccacaccaagaaagccttggaagctcactgcagggccgatgagctggcctcccaggacggccgctagcctccggggcgccgcgtcggggccgggcccgccagttcttttccggattctgtagaaaatacatacttcctgtgccataccaatcagttacactcaaagctttcttggaccccgttccgtaggcaataacgtgcgtccgcctcagcgcgagattaggagttcaaacaatggtgacttcccagagcccgctggcagagccgcgggttgacgacggtgtcctcgcagtgtcgccgccaccccagcgtagtccaagtcagactatttcacaaagtcagagcgataggaaagcaccctgcccttcatcttcatgttctcccaaatggaacttaggatcttttaacataggtggttctgtgataacatcagtgttttccaaatcaaaggaacgctttaaaaaataggacctattttttaagactttacagcctttgaaatggtttccacgtgattgttacgccagcagttctcgttttgtttgtttttcaatctcagtgaaatggctctttgctttcgagttctcacgcaacgtactgggcaaatgacaatcctcagccgctggtattttctaaggggtctcttcactttgatgagtgacatgaacaccgtgtctccttctcttgtgtgtacctaaagccatatttccaagtctgtggtactccaggattccaggagtaagcctgtagaagagatttattttaaaagagattgctctgaaatttatcttaaaagagcttgctctgtctaccttgacagaaattggagttttaaaattatgtgttaatatttttatttgcagatttcgtttccgtcaacttaaacattgttgcccttcaacaaggctcttgaattaataaaattatagtctctaagaattccacattttatggaaagttagagcaaaatcattttgagttaagccagttcttagcctaatgcaaactgcagcgcctttaagcataaagtaacacaacagcattgcacggggccggcactgccgctgccttcactgaaggctgcagtgctgttctgagagcttggaggaggcaccagcgaggatgacgtttagtggagctctttctgttgaaaagagctcacgttatcaacaccttgtaaggaaaatacagtgtctgagttttcatcggtcttcacatgctgctatatattccacagagttccttgcatgtactgagcttttgttttagatggaatagcacaaggagaaaaatctttaaacttagtgctttgtctattctttatttctctcagggtggccagtattttgacttatttatcctgcttgaaagctacttgagatgtgtactgctattctaaacacgtgatctagtttctttcatctctggcataagattatataacttaatgttaagtgtcttgaggcataaaagacaaaatgtggcttattttaggatctgttttttcatcgaggtctcgggtatcctttcaaagatagtgagaagcagacactgctccttgtgcagctctggtacctcctgcccactgctgtcacttcaagccactggcaatgcttctgtcctcgtgtcttggaggaaaatcacctggggggaggggacttcttgtggtaagagcaagtgcaggtatgaaatgcgaagattgccccagctaaaagtggacaagtccgctttgtgagatgaatacttcctgagaaacttgacaagtatctctccattttaccattatgaaaactatcattaaaaaaaacagtttagatgccttctccttttgagggaaaaagggtgctttttattgtataaagcagcgtcttatgtattttgatataccattgtttgaacttccgtctttagctgatagattctcaaatatccttgattttggatgttcagtatgtttgtgagagaggtttctgggaagactctctttttgccctcgggaaaaagcaaaatatcaatgtttgggtgactgtgtaaagctcagtgtgtaagaacatctttttgtctaggttttctttctgctctttattgaagacaaacactcaccaaaaagaaaaataaaagttttcagagaaactaattttctttggcaagagtattacttaatattttggcctcctaaagtttccctagttagtactcggactcctgtgctaattgtcagcttacatatcattgtatagagactgtttattctgtaccaaactgatttcaaaagtactacattgaaaataaaccggtgactgtttttcttcataaagttctgcgtttggcatcttcactctttccaaaatgtatctgtacatcagaaatgtcactattccaagtgtctttttagtgtggctttagtatggcttccttttaatattgtacatacattgtatctttgttttatggtaataagtaataaaaatgtagacttcatattttgtacaaaatgtcctatgtacagaataaaaaagttcatagaaacagcaaa

SEQ ID NO: 459038 - DNA, 2086 bp, Homo sapiens
cgaaatcatttgtttacagtctggccaaggttgtggcctccagtattccccctaagagatgggatctttgcctaaaagttactgagaaacgaaggctgcaaaaagccggaaaatatcccagcttttaaggcacactgacagccaaacagaacgctctttccgtttgcagtttttttagtgtcattttaagttgcagcttccggccaatcagcgagcttcatgcctgctgacatcacgaaccagccagttccctccagctgcagagagcttcagtttgtctttttttttttaaactaaaatggaggctggtttcttgccttaaggagcccattgcctttcccgctgaagtctagatgttgacatgtaataaagcgggcagcaggatggtggtggatgcggccaactccaatgggcctttccagcccgtggtccttctccatattcgagatgttcctcctgctgatcaagagaagctttttatccagaagttacgtcagtgttgcgtcctctttgactttgtttctgatccactaagtgacctaaagtggaaggaagtaaaacgagctgctttaagtgaaatggtagaatatatcacccataatcggaatgtgatcacagagcctatttacccagaagtagtccatatgtttgcagttaacatgtttcgaacattaccaccttcctccaatcctacgggagcggaatttgacccggaggaagatgaaccaacgttagaagcagcctggcctcatctacagcttgtttatgaatttttcttaagatttttagagtctccagatttccaacctaatatagcgaagaaatatattgatcagaagtttgtattgcagcttttagagctctttgacagtgaagatcctcgggagagagattttcttaaaaccacccttcacagaatctatgggaaattcctaggcttgagagcttacatcagaaaacagataaataatatattttataggtttatttatgaaacagagcatcataatggcatagcagagttactggaaatattgggaagtataattaatggatttgccttaccactaaaagaagagcacaagattttcttattgaaggtgttactacctttgcacaaagtgaaatctctgagtgtctaccatccccagctggcatactgtgtagtgcagtttttagaaaaggacagcaccctcacggaaccagtggtgatggcacttctcaaatactggccaaagactcacagtccaaaagaagtaatgttcttaaacgaattagaagagattttagatgtcattgaaccatcagaatttgtgaagatcatggaacccctcttccggcagttggccaaatgtgtctccagcccacacttccaggtggcagagcgagctctctattactggaataatgaatacatcatgagtttaatcagtgacaacgcagcgaagattctgcccatcatgtttccttccttgtaccgcaactcaaagacccattggaacaagacaatacatggcttgatatacaacgccctgaagctcttcatggagatgaaccaaaagctatttgatgactgtacacaacagttcaaagcagagaaactaaaagagaagctaaaaatgaaagaacgggaagaagcatgggttaaaatagaaaatctagccaaagccaatccccagtacacagtgtatagtcaagccagcaccatgagcattccggttgcaatggagacagatgggcctttatttgaagatgtgcagatgctgagaaagacagtgaaggacgaggctcatcagggtcttgctctgatacccaggctggaatgcagtggcacaatcttggctcactgcagcctcggcctcctggactcaagcaatccgcccacttcagcctcccaagcagcagtgactaccggcaccaccacactcagctgatttttgtatttttagcagagatggagttttaacatgttggctaggctggtctcaaactcctggtctcaagtgatctgcctgccttggcctcccaaagtgctgggattatgggcatgagccaccgcgcccagccaataaacttttcttaagtt

SEQ ID NO: 459039 - DNA, 2049 bp, Homo sapiens
cgaaatcatttgtttacagtctggccaaggttgtggcctccagtattccccctaagagatgggatctttgcctaaaagttactgagaaacgaaggctgcaaaaagccggaaaatatcccagcttttaaggcacactgacagccaaacagaacgctctttccgtttgcagtttttttagtgtcattttaagttgcagcttccggccaatcagcgagcttcatgcctgctgacatcacgaaccagccagttccctccagctgcagagagcttcagtttgtctttttttttttaaactaaaatggaggctggtttcttgccttaaggagcccattgcctttcccgctgaagtctagatgttgacatgtaataaagcgggcagcaggatggtggtggatgcggccaactccaatgggcctttccagcccgtggtccttctccatattcgagatgttcctcctgctgatcaagagaagctttttatccagaagttacgtcagtgttgcgtcctctttgactttgtttctgatccactaagtgacctaaagtggaaggaagtaaaacgagctgctttaagtgaaatggtagaatatatcacccataatcggaatgtgatcacagagcctatttacccagaagtagtccatatgtttgcagttaacatgtttcgaacattaccaccttcctccaatcctacgggagcggaatttgacccggaggaagatgaaccaacgttagaagcagcctggcctcatctacagcttgtttatgaatttttcttaagatttttagagtctccagatttccaacctaatatagcgaagaaatatattgatcagaagtttgtattgcagcttttagagctctttgacagtgaagatcctcgggagagagattttcttaaaaccacccttcacagaatctatgggaaattcctaggcttgagagcttacatcagaaaacagataaataatatattttataggtttatttatgaaacagagcatcataatggcatagcagagttactggaaatattgggaagtataattaatggatttgccttaccactaaaagaagagcacaagattttcttattgaaggtgttactacctttgcacaaagtgaaatctctgagtgtctaccatccccagctggcatactgtgtagtgcagtttttagaaaaggacagcaccctcacggaaccagtggtgatggcacttctcaaatactggccaaagactcacagtccaaaagaagtaatgttcttaaacgaattagaagagattttagatgtcattgaaccatcagaatttgtgaagatcatggaacccctcttccggcagttggccaaatgtgtctccagcccacacttccaggtggcagagcgagctctctattactggaataatgaatacatcatgagtttaatcagtgacaacgcagcgaagattctgcccatcatgtttccttccttgtaccgcaactcaaagacccattggaacaagacaatacatggcttgatatacaacgccctgaagctcttcatggagatgaaccaaaagctatttgatgactgtacacaacagttcaaagcagagaaactaaaagagaagctaaaaatgaaagaacgggaagaagcatgggttaaaatagaaaatctagccaaagccaatccccagcacagaaagatccgaagaaggaccatcctcttcgacttcctccagaatttgcgccatttccacttccccatgatgtactctgggagtttgctgcaccagattcccacacaccacctcctttgtttgtgttaacttgaaagttagtgcccataggaccatttacgccaggctgcattagagttgcattcacagtgtcaccattagcttggccattagggcctgaacatttgtctccagagtaattagaaccataggcaccccatgtagtaccataagagcctccactttttgactctccattgctaaggtgagaaagggaagtgccttcataactgatggagcctgcaactcagatgcttcttaacgggat

SEQ ID NO: 459040 - DNA, 3205 bp, Homo sapiens
tatactaaaattggaacgatacagagaagattagcatggcccctgcgcaaggatgacacgcaaattcgtgaagcgttccatatttttagagattttagatgtcattgaaccatcagaatttgtgaagatcatggaacccctcttccggcagttggccaaatgtgtctccagcccacacttccaggtggcagagcgagctctctattactggaataatgaatacatcatgagtttaatcagtgacaacgcagcgaagattctgcccatcatgtttccttccttgtaccgcaactcaaagacccattggaacaagacaatacatggcttgatatacaacgccctgaagctcttcatggagatgaaccaaaagctatttgatgactgtacacaacagttcaaagcagagaaactaaaagagaagctaaaaatgaaagaacgggaagaagcatgggttaaaatagaaaatctagccaaagccaatccccagtacacagtgtatagtcaagccagcaccatgagcattccggttgcaatggagacagatgggcctttatttgaagatgtgcagatgctgagaaagacagtgaaggacgaggctcatcaggcacagaaagatccgaagaaggaccgtcctcttgcacgccgcaagtccgagctgcctcaggacccccacaccaagaaagccttggaagctcactgcagggccgatgagctggcctcccaggacggccgctagcctccggggcgccgcgtcggggccgggcccgccagttcttttccggattctgtagaaaatacatacttcctgtgccataccaatcagttacactcaaagctttcttggaccccgttccgtaggcaataacgtgcgtccgcctcagcgcgagattaggagttcaaacaatggtgacttcccagagcccgctggcagagccgcgggttgacgacggtgtcctcgcagtgtcgccgccaccccagcgtagtccaagtcagactatttcacaaagtcagagcgataggaaagcaccctgcccttcatcttcatgttctcccaaatggaacttaggatcttttaacataggtggttctgtgataacatcagtgttttccaaatcaaaggaacgctttaaaaaataggacctattttttaagactttacagcctttgaaatggtttccacgtgattgttacgccagcagttctcgttttgtttgtttttcaatctcagtgaaatggctctttgctttcgagttctcacgcaacgtactgggcaaatgacaatcctcagccgctggtattttctaaggggtctcttcactttgatgagtgacatgaacaccgtgtctccttctcttgtgtgtacctaaagccatatttccaagtctgtggtactccaggattccaggagtaagcctgtagaagagatttattttaaaagagattgctctgaaatttatcttaaaagagcttgctctgtctaccttgacagaaattggagttttaaaattatgtgttaatatttttatttgcagatttcgtttccgtcaacttaaacattgttgcccttcaacaaggctcttgaattaataaaattatagtctctaagaattccacattttatggaaagttagagcaaaatcattttgagttaagccagttcttagcctaatgcaaactgcagcgcctttaagcataaagtaacacaacagcattgcacggggccggcactgccgctgccttcactgaaggctgcagtgctgttctgagagcttggaggaggcaccagcgaggatgacgtttagtggagctctttctgttgaaaagagctcacgttatcaacaccttgtaaggaaaatacagtgtctgagttttcatcggtcttcacatgctgctatatattccacagagttccttgcatgtactgagcttttgttttagatggaatagcacaaggagaaaaatctttaaacttagtgctttgtctattctttatttctctcagggtggccagtattttgacttatttatcctgcttgaaagctacttgagatgtgtactgctattctaaacacgtgatctagtttctttcatctctggcataagattatataacttaatgttaagtgtcttgaggcataaaagacaaaatgtggcttattttaggatctgttttttcatcgaggtctcgggtatcctttcaaagatagtgagaagcagacactgctccttgtgcagctctggtacctcctgcccactgctgtcacttcaagccactggcaatgcttctgtcctcgtgtcttggaggaaaatcacctggggggaggggacttcttgtggtaagagcaagtgcaggtatgaaatgcgaagattgccccagctaaaagtggacaagtccgctttgtgagatgaatacttcctgagaaacttgacaagtatctctccattttaccattatgaaaactatcattaaaaaaaacagtttagatgccttctccttttgagggaaaaagggtgctttttattgtataaagcagcgtcttatgtattttgatataccattgtttgaacttccgtctttagctgatagattctcaaatatccttgattttggatgttcagtatgtttgtgagagaggtttctgggaagactctctttttgccctcgggaaaaagcaaaatatcaatgtttgggtgactgtgtaaagctcagtgtgtaagaacatctttttgtctaggttttctttctgctctttattgaagacaaacactcaccaaaaagaaaaataaaagttttcagagaaactaattttctttggcaagagtattacttaatattttggcctcctaaagtttccctagttagtactcggactcctgtgctaattgtcagcttacatatcattgtatagagactgtttattctgtaccaaactgatttcaaaagtactacattgaaaataaaccggtgactgtttttcttcataaagttctgcgtttggcatcttcactctttccaaaatgtatctgtacatcagaaatgtcactattccaagtgtctttttagtgtggctttagtatggcttccttttaatattgtacatacattgtatctttgttttatggtaataagtaataaaaatgtagacttcatattttgtacaaaatgtcctatgtacagaataaaaaagttcatagaaacagcaaa

SEQ ID NO: 459041 - DNA, 1621 bp, Homo sapiens
cgaaatcatttgtttacagtctggccaaggttgtggcctccagtattccccctaagagatgggatctttgcctaaaagttactgagaaacgaaggctgcaaaaagccggaaaatatcccagcttttaaggcacactgacagccaaacagaacgctctttccgtttgcagtttttttagtgtcattttaagttgcagcttccggccaatcagcgagcttcatgcctgctgacatcacgaaccagccagttccctccagctgcagagagcttcagtttgtctttttttttttaaactaaaatggaggctggtttcttgccttaaggagcccattgcctttcccgctgaagtctagatgttgacatgtaataaagcgggcagcaggatggtggtggatgcggccaactccaatgggcctttccagcccgtggtccttctccatattcgagatgttcctcctgctgatcaagagaagctttttatccagaagttacgtcagtgttgcgtcctctttgactttgtttctgatccactaagtgacctaaagtggaaggaagtaaaacgagctgctttaagtgaaatggtagaatatatcacccataatcggaatgtgatcacagagcctatttacccagaagtagtccatatgtttgcagttaacatgtttcgaacattaccaccttcctccaatcctacgggagcggaatttgacccggaggaagatgaaccaacgttagaagcagcctggcctcatctacagcttgtttatgaatttttcttaagatttttagagtctccagatttccaacctaatatagcgaagaaatatattgatcagaagtttgtattgcagcttttagagctctttgacagtgaagatcctcgggagagagattttcttaaaaccacccttcacagaatctatgggaaattcctaggcttgagagcttacatcagaaaacagataaataatatattttataggtttatttatgaaacagagcatcataatggcatagcagagttactggaaatattgggaagtataattaatggatttgccttaccactaaaagaagagcacaagattttcttattgaaggtgttactacctttgcacaaagtgaaatctctgagtgtctaccatccccagctggcatactgtgtagtgcagtttttagaaaaggacagcaccctcacggaaccagtggtgatggcacttctcaaatactggccaaagactcacagtccaaaagaagtaatgttcttaaacgaattagaagagattttagatgtcattgaaccatcagaatttgtgaagatcatggaacccctcttccggcagttggccaaatgtgtctccagcccacacttccaggtggcagagcgagctctctattactggaataatgaatacatcatgagtttaatcagtgacaacgcagcgaagattctgcccatcatgtttccttccttgtaccgcaactcaaagacccattggaacaagtaagaaagaactggctgccatctttttcagtcattttaaaatatggcacgttttactgctacttcagtaagaataaatatcagaattttaaatatcaattaaaaaacaagaaggtc

SEQ ID NO: 459042 - DNA, 1825 bp, Homo sapiens
  misc_feature (996)..(996): n is a, c, g, or t
  misc_feature (1009)..(1011): n is a, c, g, or t
  misc_feature (1014)..(1014): n is a, c, g, or t
  misc_feature (1024)..(1024): n is a, c, g, or t
  misc_feature (1033)..(1033): n is a, c, g, or t
cgaaatcatttgtttacagtctggccaaggttgtggcctccagtattccccctaagagatgggatctttgcctaaaagttactgagaaacgaaggctgcaaaaagccggaaaatatcccagcttttaaggcacactgacagccaaacagaacgctctttccgtttgcagtttttttagtgtcattttaagttgcagcttccggccaatcagcgagcttcatgcctgctgacatcacgaaccagccagttccctccagctgcagagagcttcagtttgtctttttttttttaaactaaaatggaggctggtttcttgccttaaggagcccattgcctttcccgctgaagtctagatgttgacatgtaataaagcgggcagcaggatggtggtggatgcggccaactccaatgggcctttccagcccgtggtccttctccatattcgagatgttcctcctgctgatcaagagaagctttttatccagaagttacgtcagtgttgcgtcctctttgactttgtttctgatccactaagtgacctaaagtggaaggaagtaaaacgagctgctttaagtgaaatggtagaatatatcacccataatcggaatgtgatcacagagcctatttacccagaagtagtccatatgtttgcagttaacatgtttcgaacattaccaccttcctccaatcctacgggagcggaatttgacccggaggaagatgaaccaacgttagaagcagcctggcctcatctacagcttgtttatgaatttttcttaagatttttagagtctccagatttccaacctaatatagcgaagaaatatattgatcagaagtttgtattgcagcttttagagctctttgacagtgaagatcctcgggagagagattttcttaaaaccacccttcacagaatctatgggaaattcctaggcttgagagcttacatcagaaaacagataaataatatattttatagccactccatgaaangagcatcatatgnnntangcaggttacnggaaatatngggatataattaatggatttgccttaccactaaaagaagagcacaagattttcttattgaaggtgttactacctttgcacaaagtgaaatctctgagtgtctaccatccccagctggcatactgtgtagtgcagtttttagaaaaggacagcaccctcacggaaccagtggtgatggcacttctcaaatactggccaaagactcacagtccaaaagaagtaatgttcttaaacgaattagaagagattttagatgtcattgaaccatcagaatttgtgaagatcatggaacccctcttccggcagttggccaaatgtgtctccagcccacacttccaggtggcagagcgagctctctattactggaataatgaatacatcatgagtttaatcagtgacaacgcagcgaagattctgcccatcatgtttccttccttgtaccgcaactcaaagacccattggaacaagacaatacatggcttgatatacaacgccctgaagctcttcatggagatgaaccaaaagctatttgatgactgtacacaacagttcaaagcagagaaactaaaagagaagctaaaaatgaaagaacgggaagaagcatgggttaaaatagaaaatctagccaaagccaatccccaggtactaaaaaagagaataacatgaaaacgcccagggttacttgaatgtttttataagataggaatatatgtcttcaccatggggggggtctcgatttcactaacgttgtatatgaaaatgtctgcaataaaaagtacttttaaactttgta

SEQ ID NO: 459043 - DNA, 1457 bp, Homo sapiens
cgaaatcatttgtttacagtctggccaaggttgtggcctccagtattccccctaagagatgggatctttgcctaaaagttactgagaaacgaaggctgcaaaaagccggaaaatatcccagcttttaaggcacactgacagccaaacagaacgctctttccgtttgcagtttttttagtgtcattttaagttgcagcttccggccaatcagcgagcttcatgcctgctgacatcacgaaccagccagttccctccagctgcagagagcttcagtttgtctttttttttttaaactaaaatggaggctggtttcttgccttaaggagcccattgcctttcccgctgaagtctagatgttgacatgtaataaagcgggcagcaggatggtggtggatgcggccaactccaatgggcctttccagcccgtggtccttctccatattcgagatgttcctcctgctgatcaagagaagctttttatccagaagttacgtcagtgttgcgtcctctttgactttgtttctgatccactaagtgacctaaagtggaaggaagtaaaacgagctgctttaagtgaaatggtagaatatatcacccataatcggaatgtgatcacagagcctatttacccagaagtagtccatatgtttgcagttaacatgtttcgaacattaccaccttcctccaatcctacgggagcggaatttgacccggaggaagatgaaccaacgttagaagcagcctggcctcatctacagcttgtttatgaatttttcttaagatttttagagtctccagatttccaacctaatatagcgaagaaatatattgatcagaagtttgtattgcagcttttagagctctttgacagtgaagatcctcgggagagagattttcttaaaaccacccttcacagaatctatgggaaattcctaggcttgagagcttacatcagaaaacagataaataatatattttataggtttatttatgaaacagagcatcataatggcatagcagagttactggaaatattgggaagtataattaatggatttgccttaccactaaaagaagagcacaagattttcttattgaaggtgttactacctttgcacaaagtgaaatctctgagtgtctaccatccccaggtggcatactgtgtagtgcagttttagagcaggaccgcacctcatgaaccaggggtgttgcgacttctcaaatactggccaagactcactgtccaagcgaagtaaggtcttcaccgactcaacacgtttagatggtcttgcaccttcgggattgtgaggtctggaaccctcttcggagcggccaactgtttccggccacttccatgtgggaggacctctatacgggaagaacatctccgcacgcgcacgagattgctagtctcgtacgacaacctggactcatggtcacgggcctcgaccctgagg

SEQ ID NO: 459044 - DNA, 979 bp, Homo sapiens
attctacagggagaaagagatagccaatacataggaataaatatatacaaggtatcatgtagtgataattgctgtggagaaaaataaagcgggggaggggacttcttgtggtaagagcaagtgcaggtatgaaatgcgaagattgccccagctaaaagtggacaagtccgctttgtgagatgaatacttcctgagaaacttgacaagtatctctccattttaccattatgaaaactatcattaaaaaaaacagtttagatgccttctccttttgagggaaaaagggtgctttttattgtataaagcagcgtcttatgtattttgatataccattgtttgaacttccgtctttagctgatagattctcaaatatccttgattttggatgttcagtatgtttgtgagagaggtttctgggaagactctctttttgccctcgggaaaaagcaaaatatcaatgtttgggtgactgtgtaaagctcagtgtgtaagaacatctttttgtctaggttttctttctgctctttattgaagacaaacactcaccaaaaagaaaaataaaagttttcagagaaactaattttctttggcaagagtattacttaatattttggcctcctaaagtttccctagttagtactcggactcctgtgctaattgtcagcttacatatcattgtatagagactgtttattctgtaccaaactgatttcaaaagtactacattgaaaataaaccggtgactgtttttcttcataaagttctgcgtttggcatcttcactctttccaaaatgtatctgtacatcagaaatgtcactattccaagtgtctttttagtgtggctttagtatggcttccttttaatattgtacatacattgtatctttgttttatggtaataagtaataaaaatgtagacttcatattttgtacaaaatgtcctatgtacagaataaaaaagttcatagaaacagcaaa

SEQ ID NO: 459045 - DNA, 1682 bp, Homo sapiens
tgcggagggcgggaccaaccaggaaaggacgggactgtcgggaatcaccaaaagcagggaagagtggaaaaagttcaaaagaaggacaagacacagtagaatcagagcaaatttccgtcaggaaaaacagccttgttgctgtcccgtctacagtatctgctaaaataaaagtaccagtctctcagcccatagtgaagaaagacaaacggcaaaattcttcaaggtttagcgcaagcaataatagagaacttcaaaaactaccatccttaaaagttgaggctgtgaagctgggcagggtttcagctgagctgaggttggaagtccctgaccttcagctgtggccgcctacggagcagcagggagagcaaacccatggagaaccccgcggcccccaaagcatggacggagctgccagccttctcccctgcccttcttcctctactcccgacctgccagccttctcccctgcccttctgcctctactcccgacctgccaaccttagcctaaaatcagagctgctagaatcacacacactgtcgtagctggttttgtattgtaaatgagtcattctgttattttggaaacttatgtctcatgccaggatctgcagatagttctttttcaaaatattgtttagacaaaataaatttctttaaatataatatctctactttaaatgcctggggtgttgcatgcatttttctaggctagcaaagcttaaagattatttctataatttcagttacatttacctttatagatgggttactctaagtaacaaattaaacacacatggatcttctaactttggctttaaatcctaagaagagataggtaatatataaaagagtattaaaaagaaatggagagtaaaggtatatgtcgggcagatgcagtagaaaagcaagggtcatgacgtcaatgctgggcaaagctaaattgtgaagacaaaacaataatgaaacagggttattcatcacgctaaagcgtacagtccataggatgatataactaccatgaatttggcctaaatgattgaacattgaaacacataaagcgagaactgtaggggattaaagacaaaatcagtgagtgcagtgctggtgggagaggcgcctggacttcttggcccctcacaggtcatgtggtagacataagttgttattactgtgagccagtagagactttcaggtttgatggctggaaaacaaatgctcattttataagtttttttttgttttgtgttttgttttgttttgtttttgagacggagtttcactcttgttgcccaggctggagtgcagtggtgcgatctcggctcaccgcaacctccgccccttgggttcaagcgattctcctgcctcagcctcccaagtagctgggattacagtcatgcaccaccacgcccagctcattttgtatttttttttagtagagatggggtttctccatgtcagtcaggctagtcctcaactcccgatctcaggtgatccgcccacctcagcctcccaaagtgctgggattacaggcgtgagccaccgtgcccgaccctcatggtataagtttttaaacttaatatatactagcttacagaggaaaccgatgtgatttccaaaaatttgaaataattagaaaccttattctcacattataatgcaataaaaatagaaataaacacaca

SEQ ID NO: 459046 - DNA, 482 bp, Homo sapiens
gtaaggttgtacttttagggtttgtggttatggatgaaattaacttatctgagccttacattgtctcactaggcacagtgcccacttgttccgtggcacagccccagagctcctgttgaaggaacagactccaggactgactttccacttgattttcggagctcgcacatcccgagagattcatgttcaagctgcattttagacatagctggcaagagtattttcgtggtaaacgtaaacttactattggtaaagattcttaatgagtaattcttaggatttagtacaaaattagatatattctttttattcgtaatgatatagcatgaagttcttgcggggtaggagagagaggtattcatctgaaaactggctctgttttagtgtagacatttgtctacggggaaacagtaggaaagcatcaagaaatatttcttgatgtgtacaattgaagtgatgtttacaatgtagtgaaaaaaaaa

SEQ ID NO: 459047 - DNA, 4059 bp, Homo sapiens
cgaaatcatttgtttacagtctggccaaggttgtggcctccagtattccccctaagagatgggatctttgcctaaaagttactgagaaacgaaggctgcaaaaagccggaaaatatcccagcttttaaggcacactgacagccaaacagaacgctctttccgtttgcagtttttttagtgtcattttaagttgcagcttccggccaatcagcgagcttcatgcctgctgacatcacgaaccagccagttccctccagctgcagagagcttcagtttgtctttttttttttaaactaaaatggaggctggtttcttgccttaaggagcccattgcctttcccgctgaagtctagatgttgacatgtaataaagcgggcagcaggatggtggtggatgcggccaactccaatgggcctttccagcccgtggtccttctccatattcgagatgttcctcctgctgatcaagagaagctttttatccagaagttacgtcagtgttgcgtcctctttgactttgtttctgatccactaagtgacctaaagtggaaggaagtaaaacgagctgctttaagtgaaatggtagaatatatcacccataatcggaatgtgatcacagagcctatttacccagaagtagtccatatgtttgcagttaacatgtttcgaacattaccaccttcctccaatcctacgggagcggaatttgacccggaggaagatgaaccaacgttagaagcagcctggcctcatctacagcttgtttatgaatttttcttaagatttttagagtctccagatttccaacctaatatagcgaagaaatatattgatcagaagtttgtattgcagcttttagagctctttgacagtgaagatcctcgggagagagattttcttaaaaccacccttcacagaatctatgggaaattcctaggcttgagagcttacatcagaaaacagataaataatatattttataggtttatttatgaaacagagcatcataatggcatagcagagttactggaaatattgggaagtataattaatggatttgccttaccactaaaagaagagcacaagattttcttattgaaggtgttactacctttgcacaaagtgaaatctctgagtgtctaccatccccagctggcatactgtgtagtgcagtttttagaaaaggacagcaccctcacggaaccagtggtgatggcacttctcaaatactggccaaagactcacagtccaaaagaagtaatgttcttaaacgaattagaagagattttagatgtcattgaaccatcagaatttgtgaagatcatggaacccctcttccggcagttggccaaatgtgtctccagcccacacttccaggtggcagagcgagctctctattactggaataatgaatacatcatgagtttaatcagtgacaacgcagcgaagattctgcccatcatgtttccttccttgtaccgcaactcaaagacccattggaacaagacaatacatggcttgatatacaacgccctgaagctcttcatggagatgaaccaaaagctatttgatgactgtacacaacagttcaaagcagagaaactaaaagagaagctaaaaatgaaagaacgggaagaagcatgggttaaaatagaaaatctagccaaagccaatccccaggcacagaaagatccgaagaaggaccgtcctcttgcacgccgcaagtccgagctgcctcaggacccccacaccaagaaagccttggaagctcactgcagggccgatgagctggcctcccaggacggccgctagcctccggggcgccgcgtcggggccgggcccgccagttcttttccggattctgtagaaaatacatacttcctgtgccataccaatcagttacactcaaagctttcttggaccccgttccgtaggcaataacgtgcgtccgcctcagcgcgagattaggagttcaaacaatggtgacttcccagagcccgctggcagagccgcgggttgacgacggtgtcctcgcagtgtcgccgccaccccagcgtagtccaagtcagactatttcacaaagtcagagcgataggaaagcaccctgcccttcatcttcatgttctcccaaatggaacttaggatcttttaacataggtggttctgtgataacatcagtgttttccaaatcaaaggaacgctttaaaaaataggacctattttttaagactttacagcctttgaaatggtttccacgtgattgttacgccagcagttctcgttttgtttgtttttcaatctcagtgaaatggctctttgctttcgagttctcacgcaacgtactgggcaaatgacaatcctcagccgctggtattttctaaggggtctcttcactttgatgagtgacatgaacaccgtgtctccttctcttgtgtgtacctaaagccatatttccaagtctgtggtactccaggattccaggagtaagcctgtagaagagatttattttaaaagagattgctctgaaatttatcttaaaagagcttgctctgtctaccttgacagaaattggagttttaaaattatgtgttaatatttttatttgcagatttcgtttccgtcaacttaaacattgttgcccttcaacaaggctcttgaattaataaaattatagtctctaagaattccacattttatggaaagttagagcaaaatcattttgagttaagccagttcttagcctaatgcaaactgcagcgcctttaagcataaagtaacacaacagcattgcacggggccggcactgccgctgccttcactgaaggctgcagtgctgttctgagagcttggaggaggcaccagcgaggatgacgtttagtggagctctttctgttgaaaagagctcacgttatcaacaccttgtaaggaaaatacagtgtctgagttttcatcggtcttcacatgctgctatatattccacagagttccttgcatgtactgagcttttgttttagatggaatagcacaaggagaaaaatctttaaacttagtgctttgtctattctttatttctctcagggtggccagtattttgacttatttatcctgcttgaaagctacttgagatgtgtactgctattctaaacacgtgatctagtttctttcatctctggcataagattatataacttaatgttaagtgtcttgaggcataaaagacaaaatgtggcttattttaggatctgttttttcatcgaggtctcgggtatcctttcaaagatagtgagaagcagacactgctccttgtgcagctctggtacctcctgcccactgctgtcacttcaagccactggcaatgcttctgtcctcgtgtcttggaggaaaatcacctggggggaggggacttcttgtggtaagagcaagtgcaggtatgaaatgcgaagattgccccagctaaaagtggacaagtccgctttgtgagatgaatacttcctgagaaacttgacaagtatctctccattttaccattatgaaaactatcattaaaaaaaacagtttagatgccttctccttttgagggaaaaagggtgctttttattgtataaagcagcgtcttatgtattttgatataccattgtttgaacttccgtctttagctgatagattctcaaatatccttgattttggatgttcagtatgtttgtgagagaggtttctgggaagactctctttttgccctcgggaaaaagcaaaatatcaatgtttgggtgactgtgtaaagctcagtgtgtaagaacatctttttgtctaggttttctttctgctctttattgaagacaaacactcaccaaaaagaaaaataaaagttttcagagaaactaattttctttggcaagagtattacttaatattttggcctcctaaagtttccctagttagtactcggactcctgtgctaattgtcagcttacatatcattgtatagagactgtttattctgtaccaaactgatttcaaaagtactacattgaaaataaaccggtgactgtttttcttcata

SEQ ID NO: 459048 - DNA, 1856 bp, Homo sapiens
cgaaatcatttgtttacagtctggccaaggttgtggcctccagtattccccctaagagatgggatctttgcctaaaagttactgagaaacgaaggctgcaaaaagccggaaaatatcccagcttttaaggcacactgacagccaaacagaacgctctttccgtttgcagtttttttagtgtcattttaagttgcagcttccggccaatcagcgagcttcatgcctgctgacatcacgaaccagccagttccctccagctgcagagagcttcagtttgtctttttttttttaaactaaaatggaggctggtttcttgccttaaggagcccattgcctttcccgctgaagtctagatgttgacatgtaataaagcgggcagcaggatggtggtggatgcggccaactccaatgggcctttccagcccgtggtccttctccatattcgagttgaggctgtgaagctgggcagggtttcagctgagctgaggttggaagtccctgaccttcagctgtggccgcctacggagcagcagggagagcaaacccatggagaaccccgcggcccccaaagcatggacggagctgccagccttctcccctgcccttcttcctctactcccgacctgccagccttctcccctgcccttctgcctctactcccgacctgccaaccttagcctaaaatcagagctgctagaatcacacacactgtcgtagctggttttgtattgtaaatgagtcattctgttattttggaaacttatgtctcatgccaggatctgcagatagttctttttcaaaatattgtttagacaaaataaatttctttaaatataatatctctactttaaatgcctggggtgttgcatgcatttttctaggctagcaaagcttaaagattatttctataatttcagttacatttacctttatagatgggttactctaagtaacaaattaaacacacatggatcttctaactttggctttaaatcctaagaagagataggtaatatataaaagagtattaaaaagaaatggagagtaaaggtatatgtcgggcagatgcagtagaaaagcaagggtcatgacgtcaatgctgggcaaagctaaattgtgaagacaaaacaataatgaaacagggttattcatcacgctaaagcgtacagtccataggatgatataactaccatgaatttggcctaaatgattgaacattgaaacacataaagcgagaactgtaggggattaaagacaaaatcagtgagtgcagtgctggtgggagaggcgcctggacttcttggcccctcacaggtcatgtggtagacataagttgttattactgtgagccagtagagactttcaggtttgatggctggaaaacaaatgctcattttataagtttttttttgttttgtgttttgttttgttttgtttttgagacggagtttcactcttgttgcccaggctggagtgcagtggtgcgatctcggctcaccgcaacctccgccccttgggttcaagcgattctcctgcctcagcctcccaagtagctgggattacagtcatgcaccaccacgcccagctcattttgtatttttttttagtagagatggggtttctccatgtcagtcaggctagtcctcaactcccgatctcaggtgatccgcccacctcagcctcccaaagtgctgggattacaggcgtgagccaccgtgcccgaccctcatggtataagtttttaaacttaatatatactagcttacagaggaaaccgatgtgatttccaaaaatttgaaataattagaaaccttattctcacattataatgcaataaaaatagaaataaacacaca

SEQ ID NO: 459049 - DNA, 695 bp, Homo sapiens
ggcggccgcgggggcgcgacggccggggcgggggcgctgctgctgcgggggcaggcggcggcaggggcggcggcggcggcggcggcccgctccagccatgccgaataaaaacaagaaggagaaagaatcaccaaaagcagggaagagtggaaaaagttcaaaagaaggacaagacacagtagaatcagagcaaatttccgtcaggaaaaacagccttgttgctgtcccgtctacagtatctgctaaaataaaagtaccagtctctcagcccatagtgaagaaagacaaacggcaaaattcttcaaggtttagcgcaagcaataatagagaacttcaaaaactaccatccttaaaagatgttcctcctgctgatcaagagaagctttttatccagaagttacgtcagtgttgcgtcctctttgactttgtttctgatccactaagtgacctaaagtggaaggaagtaaaacgagctgctttaagtgaaatggtagaatatatcacccataatcggaatgtgatcacagagcctatttacccagaagtagtccatatgtgccagttaacagggtttcgaaacatttacccacttttcttccaatccttcggggagcgggaatttggacccggggggaagaaggaacccaaccgttgaaaagaaaccctggccctctattaaccgctttggtttatta

SEQ ID NO: 459050 - DNA, 4280 bp, Homo sapiens
cgaaatcatttgtttacagtctggccaaggttgtggcctccagtattccccctaagagatgggatctttgcctaaaagttactgagaaacgaaggctgcaaaaagccggaaaatatcccagcttttaaggcacactgacagccaaacagaacgctctttccgtttgcagtttttttagtgtcattttaagttgcagcttccggccaatcagcgagcttcatgcctgctgacatcacgaaccagccagttccctccagctgcagagagcttcagtttgtctttttttttttaaactaaaatggaggctggtttcttgccttaaggagcccattgcctttcccgctgaagtctagatgttgacatgtaataaagcgggcagcaggatggtggtggatgcggccaactccaatgggcctttccagcccgtggtccttctccatattcgagatgttcctcctgctgatcaagagaagctttttatccagaagttacgtcagtgttgcgtcctctttgactttgtttctgatccactaagtgacctaaagtggaaggaagtaaaacgagctgctttaagtgaaatggtagaatatatcacccataatcggaatgtgatcacagagcctatttacccagaagtagtccatatgtttgcagttaacatgtttcgaacattaccaccttcctccaatcctacgggagcggaatttgacccggaggaagatgaaccaacgttagaagcagcctggcctcatctacagcttgtttatgaatttttcttaagatttttagagtctccagatttccaacctaatatagcgaagaaatatattgatcagaagtttgtattgcagcttttagagctctttgacagtgaagatcctcgggagagagattttcttaaaaccacccttcacagaatctatgggaaattcctaggcttgagagcttacatcagaaaacagataaataatatattttataggtttatttatgaaacagagcatcataatggcatagcagagttactggaaatattgggaagtataattaatggatttgccttaccactaaaagaagagcacaagattttcttattgaaggtgttactacctttgcacaaagtgaaatctctgagtgtctaccatccccagctggcatactgtgtagtgcagtttttagaaaaggacagcaccctcacggaaccagtggtgatggcacttctcaaatactggccaaagactcacagtccaaaagaagtaatgttcttaaacgaattagaagagattttagatgtcattgaaccatcagaatttgtgaagatcatggaacccctcttccggcagttggccaaatgtgtctccagcccacacttccaggtggcagagcgagctctctattactggaataatgaatacatcatgagtttaatcagtgacaacgcagcgaagattctgcccatcatgtttccttccttgtaccgcaactcaaagacccattggaacaagacaatacatggcttgatatacaacgccctgaagctcttcatggagatgaaccaaaagctatttgatgactgtacacaacagttcaaagcagagaaactaaaagagaagctaaaaatgaaagaacgggaagaagcatgggttaaaatagaaaatctagccaaagccaatccccaggcacagaaagatccgaagaaggaccgtcctcttgcacgccgcaagtccgagctgcctcaggacccccacaccaagaaagccttggaagctcactgcagggccgatgagctggcctcccaggacggccgctagcctccggggcgccgcgtcggggccgggcccgccagttcttttccggattctgtagaaaatacatacttcctgtgccataccaatcagttacactcaaagctttcttggaccccgttccgtaggcaataacgtgcgtccgcctcagcgcgagattaggagttcaaacaatggtgacttcccagagcccgctggcagagccgcgggttgacgacggtgtcctcgcagtgtcgccgccaccccagcgtagtccaagtcagactatttcacaaagtcagagcgataggaaagcaccctgcccttcatcttcatgttctcccaaatggaacttaggatcttttaacataggtggttctgtgataacatcagtgttttccaaatcaaaggaacgctttaaaaaataggacctattttttaagactttacagcctttgaaatggtttccacgtgattgttacgccagcagttctcgttttgtttgtttttcaatctcagtgaaatggctctttgctttcgagttctcacgcaacgtactgggcaaatgacaatcctcagccgctggtattttctaaggggtctcttcactttgatgagtgacatgaacaccgtgtctccttctcttgtgtgtacctaaagccatatttccaagtctgtggtactccaggattccaggagtaagcctgtagaagagatttattttaaaagagattgctctgaaatttatcttaaaagagcttgctctgtctaccttgacagaaattggagttttaaaattatgtgttaatatttttatttgcagatttcgtttccgtcaacttaaacattgttgcccttcaacaaggctcttgaattaataaaattatagtctctaagaattccacattttatggaaagttagagcaaaatcattttgagttaagccagttcttagcctaatgcaaactgcagcgcctttaagcataaagtaacacaacagcattgcacggggccggcactgccgctgccttcactgaaggctgcagtgctgttctgagagcttggaggaggcaccagcgaggatgacgtttagtggagctctttctgttgaaaagagctcacgttatcaacaccttgtaaggaaaatacagtgtctgagttttcatcggtcttcacatgctgctatatattccacagagttccttgcatgtactgagcttttgttttagatggaatagcacaaggagaaaaatctttaaacttagtgctttgtctattctttatttctctcagggtggccagtattttgacttatttatcctgcttgaaagctacttgagatgtgtactgctattctaaacacgtgatctagtttctttcatctctggcataagattatataacttaatgttaagtgtcttgaggcataaaagacaaaatgtggcttattttaggatctgttttttcatcgaggtctcgggtatcctttcaaagatagtgagaagcagacactgctccttgtgcagctctggtacctcctgcccactgctgtcacttcaagccactggcaatgcttctgtcctcgtgtcttggaggaaaatcacctggggggaggggacttcttgtggtaagagcaagtgcaggtatgaaatgcgaagattgccccagctaaaagtggacaagtccgctttgtgagatgaatacttcctgagaaacttgacaagtatctctccattttaccattatgaaaactatcattaaaaaaaacagtttagatgccttctccttttgagggaaaaagggtgctttttattgtataaagcagcgtcttatgtattttgatataccattgtttgaacttccgtctttagctgatagattctcaaatatccttgattttggatgttcagtatgtttgtgagagaggtttctgggaagactctctttttgccctcgggaaaaagcaaaatatcaatgtttgggtgactgtgtaaagctcagtgtgtaagaacatctttttgtctaggttttctttctgctctttattgaagacaaacactcaccaaaaagaaaaataaaagttttcagagaaactaattttctttggcaagagtattacttaatattttggcctcctaaagtttccctagttagtactcggactcctgtgctaattgtcagcttacatatcattgtatagagactgtttattctgtaccaaactgatttcaaaagtactacattgaaaataaaccggtgactgtttttcttcataaagttctgcgtttggcatcttcactctttccaaaatgtatctgtacatcagaaatgtcactattccaagtgtctttttagtgtggctttagtatggcttccttttaatattgtacatacattgtatctttgttttatggtaataagtaataaaaatgtagacttcatattttgtacaaaatgtcctatgtacagaataaaaaagttcatagaaacagcaaa

SEQ ID NO: 459051 - DNA, 4419 bp, Homo sapiens
cgaaatcatttgtttacagtctggccaaggttgtggcctccagtattccccctaagagatgggatctttgcctaaaagttactgagaaacgaaggctgcaaaaagccggaaaatatcccagcttttaaggcacactgacagccaaacagaacgctctttccgtttgcagtttttttagtgtcattttaagttgcagcttccggccaatcagcgagcttcatgcctgctgacatcacgaaccagccagttccctccagctgcagagagcttcagtttgtctttttttttttaaactaaaatggaggctggtttcttgccttaaggagcccattgcctttcccgctgaagtctagatgttgacatgtaataaagcgggcagcaggatggtggtggatgcggccaactccaatgggcctttccagcccgtggtccttctccatattcgagatgttcctcctgctgatcaagagaagctttttatccagaagttacgtcagtgttgcgtcctctttgactttgtttctgatccactaagtgacctaaagtggaaggaagtaaaacgagctgctttaagtgaaatggtagaatatatcacccataatcggaatgtgatcacagagcctatttacccagaagtagtccatatgtttgcagttaacatgtttcgaacattaccaccttcctccaatcctacgggagcggaatttgacccggaggaagatgaaccaacgttagaagcagcctggcctcatctacagcttgtttatgaatttttcttaagatttttagagtctccagatttccaacctaatatagcgaagaaatatattgatcagaagtttgtattgcagcttttagagctctttgacagtgaagatcctcgggagagagattttcttaaaaccacccttcacagaatctatgggaaattcctaggcttgagagcttacatcagaaaacagataaataatatattttataggtttatttatgaaacagagcatcataatggcatagcagagttactggaaatattgggaagtataattaatggatttgccttaccactaaaagaagagcacaagattttcttattgaaggtgttactacctttgcacaaagtgaaatctctgagtgtctaccatccccagctggcatactgtgtagtgcagtttttagaaaaggacagcaccctcacggaaccagtggtgatggcacttctcaaatactggccaaagactcacagtccaaaagaagtaatgttcttaaacgaattagaagagattttagatgtcattgaaccatcagaatttgtgaagatcatggaacccctcttccggcagttggccaaatgtgtctccagcccacacttccaggtggcagagcgagctctctattactggaataatgaatacatcatgagtttaatcagtgacaacgcagcgaagattctgcccatcatgtttccttccttgtaccgcaactcaaagacccattggaacaagacaatacatggcttgatatacaacgccctgaagctcttcatggagatgaaccaaaagctatttgatgactgtacacaacagttcaaagcagagaaactaaaagagaagctaaaaatgaaagaacgggaagaagcatgggttaaaatagaaaatctagccaaagccaatccccaggcacagaaagatccgaagaaggaccgtcctcttgcacgccgcaagtccgagctgcctcaggacccccacaccaagaaagccttggaagctcactgcagggccgatgagctggcctcccaggacggccgctagcctccggggcgccgcgtcggggccgggcccgccagttcttttccggattctgtagaaaatacatacttcctgtgccataccaatcagttacactcaaagctttcttggaccccgttccgtaggcaataacgtgcgtccgcctcagcgcgagattaggagttcaaacaatggtgacttcccagagcccgctggcagagccgcgggttgacgacggtgtcctcgcagtgtcgccgccaccccagcgtagtccaagtcagactatttcacaaagtcagagcgataggaaagcaccctgcccttcatcttcatgttctcccaaatggaacttaggatcttttaacataggtggttctgtgataacatcagtgttttccaaatcaaaggaacgctttaaaaaataggacctattttttaagactttacagcctttgaaatggtttccacgtgattgttacgccagcagttctcgttttgtttgtttttcaatctcagtgaaatggctctttgctttcgagttctcacgcaacgtactgggcaaatgacaatcctcagccgctggtattttctaaggggtctcttcactttgatgagtgacatgaacaccgtgtctccttctcttgtgtgtacctaaagccatatttccaagtctgtggtactccaggattccaggagtaagcctgtagaagagatttattttaaaagagattgctctgaaatttatcttaaaagagcttgctctgtctaccttgacagaaattggagttttaaaattatgtgttaatatttttatttgcagatttcgtttccgtcaacttaaacattgttgcccttcaacaaggctcttgaattaataaaattatagtctctaagaattccacattttatggaaagttagagcaaaatcattttgagttaagccagttcttagcctaatgcaaactgcagcgcctttaagcataaagtaacacaacagcattgcacggggccggcactgccgctgccttcactgaaggctgcagtgctgttctgagagcttggaggaggcaccagcgaggatgacgtttagtggagctctttctgttgaaaagagctcacgttatcaacaccttgtaaggaaaatacagtgtctgagttttcatcggtcttcacatgctgctatatattccacagagttccttgcatgtactgagcttttgttttagatggaatagcacaaggagaaaaatctttaaacttagtgctttgtctattctttatttctctcagggtggccagtattttgacttatttatcctgcttgaaagctacttgagatgtgtactgctattctaaacacgtgatctagtttctttcatctctggcataagattatataacttaatgttaagtgtcttgaggcataaaagacaaaatgtggcttattttaggatctgttttttcatcgaggtctcgggtatcctttcaaagatagtgagaagcagacactgctccttgtgcagctctggtacctcctgcccactgctgtcacttcaagccactggcaatgcttctgtcctcgtgtcttggaggaaaatcacctggggggaggggacttcttgtggtaagagcaagtgcaggtatgaaatgcgaagattgccccagctaaaagtggacaagtccgctttgtgagatgaatacttcctgagaaacttgacaagtatctctccattttaccattatgaaaactatcattaaaaaaaacagtttagatgccttctccttttgagggaaaaagggtgctttttattgtataaagcagcgtcttatgtattttgatataccattgtttgaacttccgtctttagctgatagattctcaaatatccttgattttggatgttcagtatgtttgtgagagaggtttctgggaagactctctttttgccctcgggaaaaagcaaaatatcaatgtttgggtgactgtgtaaagctcagtgtgtaagaacatctttttgtctaggttttctttctgctctttattgaagacaaacactcaccaaaaagaaaaataaaagttttcagagaaactaattttctttggcaagagtattacttaatattttggcctcctaaagtttccctagttagtactcggactcctgtgctaattgtcagcttacatatcattgtatagagactgtttattctgtaccaaactgatttcaaaagtactacattgaaaataaaccggtgactgtttttcttcataaagttctgcgtttggcatcttcactctttccaaaatgtatctgtacatcagaaatgtcactattccaagtgtctttttagtgtggctttagtatggcttccttttaatattgtacatacattgtatctttgttttatggtaataagtaataaaaatgtagacttcatattttgtacaaaatgtcctatgtacagaataaaaaagttcatagaaacagcaaaaaaaaaaaaaaagaaaaaagaaaacaaggaaaatagagagcagatagcggcaaggacaacgagggaagagagacacaggcgaacgagagaaggaagacgaattaggcgtgcgcgcacgcagagcaacagaggaggctcg

SEQ ID NO: 459052 - DNA, 4135 bp, Homo sapiens
gaccaaccagggaggggcgggctgtcggatgggcgggacctcgcgggaggagctgcggaaagctgagctggaatcaccaaaagcagggaagagtggaaaaagttcaaaagaaggacaagacacagtagaatcagagcaaatttccgtcaggaaaaacagccttgttgctgtcccgtctacagtatctgctaaaataaaagtaccagtctctcagcccatagtgaagaaagacaaacggcaaaattcttcaaggtttagcgcaagcaataatagagaacttcaaaaactaccatccttaaaagatgttcctcctgctgatcaagagaagctttttatccagaagttacgtcagtgttgcgtcctctttgactttgtttctgatccactaagtgacctaaagtggaaggaagtaaaacgagctgctttaagtgaaatggtagaatatatcacccataatcggaatgtgatcacagagcctatttacccagaagtagtccatatgtttgcagttaacatgtttcgaacattaccaccttcctccaatcctacgggagcggaatttgacccggaggaagatgaaccaacgttagaagcagcctggcctcatctacagcttgtttatgaatttttcttaagatttttagagtctccagatttccaacctaatatagcgaagaaatatattgatcagaagtttgtattgcagcttttagagctctttgacagtgaagatcctcgggagagagattttcttaaaaccacccttcacagaatctatgggaaattcctaggcttgagagcttacatcagaaaacagataaataatatattttataggtttatttatgaaacagagcatcataatggcatagcagagttactggaaatattgggaagtataattaatggatttgccttaccactaaaagaagagcacaagattttcttattgaaggtgttactacctttgcacaaagtgaaatctctgagtgtctaccatccccagctggcatactgtgtagtgcagtttttagaaaaggacagcaccctcacggaaccagtggtgatggcacttctcaaatactggccaaagactcacagtccaaaagaagtaatgttcttaaacgaattagaagagattttagatgtcattgaaccatcagaatttgtgaagatcatggaacccctcttccggcagttggccaaatgtgtctccagcccacacttccaggtggcagagcgagctctctattactggaataatgaatacatcatgagtttaatcagtgacaacgcagcgaagattctgcccatcatgtttccttccttgtaccgcaactcaaagacccattggaacaagacaatacatggcttgatatacaacgccctgaagctcttcatggagatgaaccaaaagctatttgatgactgtacacaacagttcaaagcagagaaactaaaagagaagctaaaaatgaaagaacgggaagaagcatgggttaaaatagaaaatctagccaaagccaatccccaggcacagaaagatccgaagaaggaccgtcctcttgcacgccgcaagtccgagctgcctcaggacccccacaccaagaaagccttggaagctcactgcagggccgatgagctggcctcccaggacggccgctagcctccggggcgccgcgtcggggccgggcccgccagttcttttccggattctgtagaaaatacatacttcctgtgccataccaatcagttacactcaaagctttcttggaccccgttccgtaggcaataacgtgcgtccgcctcagcgcgagattaggagttcaaacaatggtgacttcccagagcccgctggcagagccgcgggttgacgacggtgtcctcgcagtgtcgccgccaccccagcgtagtccaagtcagactatttcacaaagtcagagcgataggaaagcaccctgcccttcatcttcatgttctcccaaatggaacttaggatcttttaacataggtggttctgtgataacatcagtgttttccaaatcaaaggaacgctttaaaaaataggacctattttttaagactttacagcctttgaaatggtttccacgtgattgttacgccagcagttctcgttttgtttgtttttcaatctcagtgaaatggctctttgctttcgagttctcacgcaacgtactgggcaaatgacaatcctcagccgctggtattttctaaggggtctcttcactttgatgagtgacatgaacaccgtgtctccttctcttgtgtgtacctaaagccatatttccaagtctgtggtactccaggattccaggagtaagcctgtagaagagatttattttaaaagagattgctctgaaatttatcttaaaagagcttgctctgtctaccttgacagaaattggagttttaaaattatgtgttaatatttttatttgcagatttcgtttccgtcaacttaaacattgttgcccttcaacaaggctcttgaattaataaaattatagtctctaagaattccacattttatggaaagttagagcaaaatcattttgagttaagccagttcttagcctaatgcaaactgcagcgcctttaagcataaagtaacacaacagcattgcacggggccggcactgccgctgccttcactgaaggctgcagtgctgttctgagagcttggaggaggcaccagcgaggatgacgtttagtggagctctttctgttgaaaagagctcacgttatcaacaccttgtaaggaaaatacagtgtctgagttttcatcggtcttcacatgctgctatatattccacagagttccttgcatgtactgagcttttgttttagatggaatagcacaaggagaaaaatctttaaacttagtgctttgtctattctttatttctctcagggtggccagtattttgacttatttatcctgcttgaaagctacttgagatgtgtactgctattctaaacacgtgatctagtttctttcatctctggcataagattatataacttaatgttaagtgtcttgaggcataaaagacaaaatgtggcttattttaggatctgttttttcatcgaggtctcgggtatcctttcaaagatagtgagaagcagacactgctccttgtgcagctctggtacctcctgcccactgctgtcacttcaagccactggcaatgcttctgtcctcgtgtcttggaggaaaatcacctggggggaggggacttcttgtggtaagagcaagtgcaggtatgaaatgcgaagattgccccagctaaaagtggacaagtccgctttgtgagatgaatacttcctgagaaacttgacaagtatctctccattttaccattatgaaaactatcattaaaaaaaacagtttagatgccttctccttttgagggaaaaagggtgctttttattgtataaagcagcgtcttatgtattttgatataccattgtttgaacttccgtctttagctgatagattctcaaatatccttgattttggatgttcagtatgtttgtgagagaggtttctgggaagactctctttttgccctcgggaaaaagcaaaatatcaatgtttgggtgactgtgtaaagctcagtgtgtaagaacatctttttgtctaggttttctttctgctctttattgaagacaaacactcaccaaaaagaaaaataaaagttttcagagaaactaattttctttggcaagagtattacttaatattttggcctcctaaagtttccctagttagtactcggactcctgtgctaattgtcagcttacatatcattgtatagagactgtttattctgtaccaaactgatttcaaaagtactacattgaaaataaaccggtgactgtttttcttcataaagttctgcgtttggcatcttcactctttccaaaatgtatctgtacatcagaaatgtcactattccaagtgtctttttagtgtggctttagtatggcttccttttaatattgtacatacattgtatctttgttttatggtaataagtaataaaaatgtagacttcatattttgtacaaaatgtcctatgtacagaataaaaaagttcatagaaacagcaaa

SEQ ID NO: 459053 - DNA, 4436 bp, Homo sapiens
cgaaatcatttgtttacagtctggccaaggttgtggcctccagtattccccctaagagatgggatctttgcctaaaagttactgagaaacgaaggctgcaaaaagccggaaaatatcccagcttttaaggcacactgacagccaaacagaacgctctttccgtttgcagtttttttagtgtcattttaagttgcagcttccggccaatcagcgagcttcatgcctgctgacatcacgaaccagccagttccctccagctgcagagagcttcagtttgtctttttttttttaaactaaaatggaggctggtttcttgccttaaggagcccattgcctttcccgctgaagtctagatgttgacatgtaataaagcgggcagcaggatggtggtggatgcggccaactccaatgggcctttccagcccgtggtccttctccatattcgaggcacagtgcccacttgttccgtggcacagccccagagctcctgttgaaggaacagactccaggactgactttccacttgattttcggagctcgcacatcccgagagattcatgttcaagctgcattttagacatagctggcaagagtattttcgtgatgttcctcctgctgatcaagagaagctttttatccagaagttacgtcagtgttgcgtcctctttgactttgtttctgatccactaagtgacctaaagtggaaggaagtaaaacgagctgctttaagtgaaatggtagaatatatcacccataatcggaatgtgatcacagagcctatttacccagaagtagtccatatgtttgcagttaacatgtttcgaacattaccaccttcctccaatcctacgggagcggaatttgacccggaggaagatgaaccaacgttagaagcagcctggcctcatctacagcttgtttatgaatttttcttaagatttttagagtctccagatttccaacctaatatagcgaagaaatatattgatcagaagtttgtattgcagcttttagagctctttgacagtgaagatcctcgggagagagattttcttaaaaccacccttcacagaatctatgggaaattcctaggcttgagagcttacatcagaaaacagataaataatatattttataggtttatttatgaaacagagcatcataatggcatagcagagttactggaaatattgggaagtataattaatggatttgccttaccactaaaagaagagcacaagattttcttattgaaggtgttactacctttgcacaaagtgaaatctctgagtgtctaccatccccagctggcatactgtgtagtgcagtttttagaaaaggacagcaccctcacggaaccagtggtgatggcacttctcaaatactggccaaagactcacagtccaaaagaagtaatgttcttaaacgaattagaagagattttagatgtcattgaaccatcagaatttgtgaagatcatggaacccctcttccggcagttggccaaatgtgtctccagcccacacttccaggtggcagagcgagctctctattactggaataatgaatacatcatgagtttaatcagtgacaacgcagcgaagattctgcccatcatgtttccttccttgtaccgcaactcaaagacccattggaacaagacaatacatggcttgatatacaacgccctgaagctcttcatggagatgaaccaaaagctatttgatgactgtacacaacagttcaaagcagagaaactaaaagagaagctaaaaatgaaagaacgggaagaagcatgggttaaaatagaaaatctagccaaagccaatccccaggcacagaaagatccgaagaaggaccgtcctcttgcacgccgcaagtccgagctgcctcaggacccccacaccaagaaagccttggaagctcactgcagggccgatgagctggcctcccaggacggccgctagcctccggggcgccgcgtcggggccgggcccgccagttcttttccggattctgtagaaaatacatacttcctgtgccataccaatcagttacactcaaagctttcttggaccccgttccgtaggcaataacgtgcgtccgcctcagcgcgagattaggagttcaaacaatggtgacttcccagagcccgctggcagagccgcgggttgacgacggtgtcctcgcagtgtcgccgccaccccagcgtagtccaagtcagactatttcacaaagtcagagcgataggaaagcaccctgcccttcatcttcatgttctcccaaatggaacttaggatcttttaacataggtggttctgtgataacatcagtgttttccaaatcaaaggaacgctttaaaaaataggacctattttttaagactttacagcctttgaaatggtttccacgtgattgttacgccagcagttctcgttttgtttgtttttcaatctcagtgaaatggctctttgctttcgagttctcacgcaacgtactgggcaaatgacaatcctcagccgctggtattttctaaggggtctcttcactttgatgagtgacatgaacaccgtgtctccttctcttgtgtgtacctaaagccatatttccaagtctgtggtactccaggattccaggagtaagcctgtagaagagatttattttaaaagagattgctctgaaatttatcttaaaagagcttgctctgtctaccttgacagaaattggagttttaaaattatgtgttaatatttttatttgcagatttcgtttccgtcaacttaaacattgttgcccttcaacaaggctcttgaattaataaaattatagtctctaagaattccacattttatggaaagttagagcaaaatcattttgagttaagccagttcttagcctaatgcaaactgcagcgcctttaagcataaagtaacacaacagcattgcacggggccggcactgccgctgccttcactgaaggctgcagtgctgttctgagagcttggaggaggcaccagcgaggatgacgtttagtggagctctttctgttgaaaagagctcacgttatcaacaccttgtaaggaaaatacagtgtctgagttttcatcggtcttcacatgctgctatatattccacagagttccttgcatgtactgagcttttgttttagatggaatagcacaaggagaaaaatctttaaacttagtgctttgtctattctttatttctctcagggtggccagtattttgacttatttatcctgcttgaaagctacttgagatgtgtactgctattctaaacacgtgatctagtttctttcatctctggcataagattatataacttaatgttaagtgtcttgaggcataaaagacaaaatgtggcttattttaggatctgttttttcatcgaggtctcgggtatcctttcaaagatagtgagaagcagacactgctccttgtgcagctctggtacctcctgcccactgctgtcacttcaagccactggcaatgcttctgtcctcgtgtcttggaggaaaatcacctggggggaggggacttcttgtggtaagagcaagtgcaggtatgaaatgcgaagattgccccagctaaaagtggacaagtccgctttgtgagatgaatacttcctgagaaacttgacaagtatctctccattttaccattatgaaaactatcattaaaaaaaacagtttagatgccttctccttttgagggaaaaagggtgctttttattgtataaagcagcgtcttatgtattttgatataccattgtttgaacttccgtctttagctgatagattctcaaatatccttgattttggatgttcagtatgtttgtgagagaggtttctgggaagactctctttttgccctcgggaaaaagcaaaatatcaatgtttgggtgactgtgtaaagctcagtgtgtaagaacatctttttgtctaggttttctttctgctctttattgaagacaaacactcaccaaaaagaaaaataaaagttttcagagaaactaattttctttggcaagagtattacttaatattttggcctcctaaagtttccctagttagtactcggactcctgtgctaattgtcagcttacatatcattgtatagagactgtttattctgtaccaaactgatttcaaaagtactacattgaaaataaaccggtgactgtttttcttcataaagttctgcgtttggcatcttcactctttccaaaatgtatctgtacatcagaaatgtcactattccaagtgtctttttagtgtggctttagtatggcttccttttaatattgtacatacattgtatctttgttttatggtaataagtaataaaaatgtagacttcatattttgtacaaaatgtcctatgtacagaataaaaaagttcatagaaacagcaaa

SEQ ID NO: 459054 - DNA, 3957 bp, Homo sapiens
ggcggccgcgggggcgcgacggccggggcgggggcgctgctgctgcgggggcaggcggcggcaggggcggcggcggcggcggcggcccgctccagccatgccgaataaaaacaagaaggagaaaatgttcctcctgctgatcaagagaagctttttatccagaagttacgtcagtgttgcgtcctctttgactttgtttctgatccactaagtgacctaaagtggaaggaagtaaaacgagctgctttaagtgaaatggtagaatatatcacccataatcggaatgtgatcacagagcctatttacccagaagtagtccatatgtttgcagttaacatgtttcgaacattaccaccttcctccaatcctacgggagcggaatttgacccggaggaagatgaaccaacgttagaagcagcctggcctcatctacagcttgtttatgaatttttcttaagatttttagagtctccagatttccaacctaatatagcgaagaaatatattgatcagaagtttgtattgcagcttttagagctctttgacagtgaagatcctcgggagagagattttcttaaaaccacccttcacagaatctatgggaaattcctaggcttgagagcttacatcagaaaacagataaataatatattttataggtttatttatgaaacagagcatcataatggcatagcagagttactggaaatattgggaagtataattaatggatttgccttaccactaaaagaagagcacaagattttcttattgaaggtgttactacctttgcacaaagtgaaatctctgagtgtctaccatccccagctggcatactgtgtagtgcagtttttagaaaaggacagcaccctcacggaaccagtggtgatggcacttctcaaatactggccaaagactcacagtccaaaagaagtaatgttcttaaacgaattagaagagattttagatgtcattgaaccatcagaatttgtgaagatcatggaacccctcttccggcagttggccaaatgtgtctccagcccacacttccaggtggcagagcgagctctctattactggaataatgaatacatcatgagtttaatcagtgacaacgcagcgaagattctgcccatcatgtttccttccttgtaccgcaactcaaagacccattggaacaagacaatacatggcttgatatacaacgccctgaagctcttcatggagatgaaccaaaagctatttgatgactgtacacaacagttcaaagcagagaaactaaaagagaagctaaaaatgaaagaacgggaagaagcatgggttaaaatagaaaatctagccaaagccaatccccaggcacagaaagatccgaagaaggaccgtcctcttgcacgccgcaagtccgagctgcctcaggacccccacaccaagaaagccttggaagctcactgcagggccgatgagctggcctcccaggacggccgctagcctccggggcgccgcgtcggggccgggcccgccagttcttttccggattctgtagaaaatacatacttcctgtgccataccaatcagttacactcaaagctttcttggaccccgttccgtaggcaataacgtgcgtccgcctcagcgcgagattaggagttcaaacaatggtgacttcccagagcccgctggcagagccgcgggttgacgacggtgtcctcgcagtgtcgccgccaccccagcgtagtccaagtcagactatttcacaaagtcagagcgataggaaagcaccctgcccttcatcttcatgttctcccaaatggaacttaggatcttttaacataggtggttctgtgataacatcagtgttttccaaatcaaaggaacgctttaaaaaataggacctattttttaagactttacagcctttgaaatggtttccacgtgattgttacgccagcagttctcgttttgtttgtttttcaatctcagtgaaatggctctttgctttcgagttctcacgcaacgtactgggcaaatgacaatcctcagccgctggtattttctaaggggtctcttcactttgatgagtgacatgaacaccgtgtctccttctcttgtgtgtacctaaagccatatttccaagtctgtggtactccaggattccaggagtaagcctgtagaagagatttattttaaaagagattgctctgaaatttatcttaaaagagcttgctctgtctaccttgacagaaattggagttttaaaattatgtgttaatatttttatttgcagatttcgtttccgtcaacttaaacattgttgcccttcaacaaggctcttgaattaataaaattatagtctctaagaattccacattttatggaaagttagagcaaaatcattttgagttaagccagttcttagcctaatgcaaactgcagcgcctttaagcataaagtaacacaacagcattgcacggggccggcactgccgctgccttcactgaaggctgcagtgctgttctgagagcttggaggaggcaccagcgaggatgacgtttagtggagctctttctgttgaaaagagctcacgttatcaacaccttgtaaggaaaatacagtgtctgagttttcatcggtcttcacatgctgctatatattccacagagttccttgcatgtactgagcttttgttttagatggaatagcacaaggagaaaaatctttaaacttagtgctttgtctattctttatttctctcagggtggccagtattttgacttatttatcctgcttgaaagctacttgagatgtgtactgctattctaaacacgtgatctagtttctttcatctctggcataagattatataacttaatgttaagtgtcttgaggcataaaagacaaaatgtggcttattttaggatctgttttttcatcgaggtctcgggtatcctttcaaagatagtgagaagcagacactgctccttgtgcagctctggtacctcctgcccactgctgtcacttcaagccactggcaatgcttctgtcctcgtgtcttggaggaaaatcacctggggggaggggacttcttgtggtaagagcaagtgcaggtatgaaatgcgaagattgccccagctaaaagtggacaagtccgctttgtgagatgaatacttcctgagaaacttgacaagtatctctccattttaccattatgaaaactatcattaaaaaaaacagtttagatgccttctccttttgagggaaaaagggtgctttttattgtataaagcagcgtcttatgtattttgatataccattgtttgaacttccgtctttagctgatagattctcaaatatccttgattttggatgttcagtatgtttgtgagagaggtttctgggaagactctctttttgccctcgggaaaaagcaaaatatcaatgtttgggtgactgtgtaaagctcagtgtgtaagaacatctttttgtctaggttttctttctgctctttattgaagacaaacactcaccaaaaagaaaaataaaagttttcagagaaactaattttctttggcaagagtattacttaatattttggcctcctaaagtttccctagttagtactcggactcctgtgctaattgtcagcttacatatcattgtatagagactgtttattctgtaccaaactgatttcaaaagtactacattgaaaataaaccggtgactgtttttcttcataaagttctgcgtttggcatcttcactctttccaaaatgtatctgtacatcagaaatgtcactattccaagtgtctttttagtgtggctttagtatggcttccttttaatattgtacatacattgtatctttgttttatggtaataagtaataaaaatgtagacttcatattttgtacaaaatgtcctatgtacagaataaaaaagttcatagaaacagcaaa

SEQ ID NO: 459055 - DNA, 4011 bp, Homo sapiens
  misc_feature (615)..(615): n is a, c, g, or t
  misc_feature (628)..(630): n is a, c, g, or t
  misc_feature (633)..(633): n is a, c, g, or t
  misc_feature (643)..(643): n is a, c, g, or t
  misc_feature (652)..(652): n is a, c, g, or t
cacatgaagccgttctagcatgctggagtgtgatggccgtctcgaagaaaagcgcccatgtgatgtatgttcctcctgctgatcaagagaagctttttatccagaagttacgtcagtgttgcgtcctctttgactttgtttctgatccactaagtgacctaaagtggaaggaagtaaaacgagctgctttaagtgaaatggtagaatatatcacccataatcggaatgtgatcacagagcctatttacccagaagtagtccatatgtttgcagttaacatgtttcgaacattaccaccttcctccaatcctacgggagcggaatttgacccggaggaagatgaaccaacgttagaagcagcctggcctcatctacagcttgtttatgaatttttcttaagatttttagagtctccagatttccaacctaatatagcgaagaaatatattgatcagaagtttgtattgcagcttttagagctctttgacagtgaagatcctcgggagagagattttcttaaaaccacccttcacagaatctatgggaaattcctaggcttgagagcttacatcagaaaacagataaataatatattttatagccactccatgaaangagcatcatatgnnntangcaggttacnggaaatatngggatataattaatggatttgccttaccactaaaagaagagcacaagattttcttattgaaggtgttactacctttgcacaaagtgaaatctctgagtgtctaccatccccagctggcatactgtgtagtgcagtttttagaaaaggacagcaccctcacggaaccagtggtgatggcacttctcaaatactggccaaagactcacagtccaaaagaagtaatgttcttaaacgaattagaagagattttagatgtcattgaaccatcagaatttgtgaagatcatggaacccctcttccggcagttggccaaatgtgtctccagcccacacttccaggtggcagagcgagctctctattactggaataatgaatacatcatgagtttaatcagtgacaacgcagcgaagattctgcccatcatgtttccttccttgtaccgcaactcaaagacccattggaacaagacaatacatggcttgatatacaacgccctgaagctcttcatggagatgaaccaaaagctatttgatgactgtacacaacagttcaaagcagagaaactaaaagagaagctaaaaatgaaagaacgggaagaagcatgggttaaaatagaaaatctagccaaagccaatccccagtacacagtgtatagtcaagccagcaccatgagcattccggttgcaatggagacagatgggcctttatttgaagatgtgcagatgctgagaaagacagtgaaggacgaggctcatcaggcacagaaagatccgaagaaggaccgtcctcttgcacgccgcaagtccgagctgcctcaggacccccacaccaagaaagccttggaagctcactgcagggccgatgagctggcctcccaggacggccgctagcctccggggcgccgcgtcggggccgggcccgccagttcttttccggattctgtagaaaatacatacttcctgtgccataccaatcagttacactcaaagctttcttggaccccgttccgtaggcaataacgtgcgtccgcctcagcgcgagattaggagttcaaacaatggtgacttcccagagcccgctggcagagccgcgggttgacgacggtgtcctcgcagtgtcgccgccaccccagcgtagtccaagtcagactatttcacaaagtcagagcgataggaaagcaccctgcccttcatcttcatgttctcccaaatggaacttaggatcttttaacataggtggttctgtgataacatcagtgttttccaaatcaaaggaacgctttaaaaaataggacctattttttaagactttacagcctttgaaatggtttccacgtgattgttacgccagcagttctcgttttgtttgtttttcaatctcagtgaaatggctctttgctttcgagttctcacgcaacgtactgggcaaatgacaatcctcagccgctggtattttctaaggggtctcttcactttgatgagtgacatgaacaccgtgtctccttctcttgtgtgtacctaaagccatatttccaagtctgtggtactccaggattccaggagtaagcctgtagaagagatttattttaaaagagattgctctgaaatttatcttaaaagagcttgctctgtctaccttgacagaaattggagttttaaaattatgtgttaatatttttatttgcagatttcgtttccgtcaacttaaacattgttgcccttcaacaaggctcttgaattaataaaattatagtctctaagaattccacattttatggaaagttagagcaaaatcattttgagttaagccagttcttagcctaatgcaaactgcagcgcctttaagcataaagtaacacaacagcattgcacggggccggcactgccgctgccttcactgaaggctgcagtgctgttctgagagcttggaggaggcaccagcgaggatgacgtttagtggagctctttctgttgaaaagagctcacgttatcaacaccttgtaaggaaaatacagtgtctgagttttcatcggtcttcacatgctgctatatattccacagagttccttgcatgtactgagcttttgttttagatggaatagcacaaggagaaaaatctttaaacttagtgctttgtctattctttatttctctcagggtggccagtattttgacttatttatcctgcttgaaagctacttgagatgtgtactgctattctaaacacgtgatctagtttctttcatctctggcataagattatataacttaatgttaagtgtcttgaggcataaaagacaaaatgtggcttattttaggatctgttttttcatcgaggtctcgggtatcctttcaaagatagtgagaagcagacactgctccttgtgcagctctggtacctcctgcccactgctgtcacttcaagccactggcaatgcttctgtcctcgtgtcttggaggaaaatcacctggggggaggggacttcttgtggtaagagcaagtgcaggtatgaaatgcgaagattgccccagctaaaagtggacaagtccgctttgtgagatgaatacttcctgagaaacttgacaagtatctctccattttaccattatgaaaactatcattaaaaaaaacagtttagatgccttctccttttgagggaaaaagggtgctttttattgtataaagcagcgtcttatgtattttgatataccattgtttgaacttccgtctttagctgatagattctcaaatatccttgattttggatgttcagtatgtttgtgagagaggtttctgggaagactctctttttgccctcgggaaaaagcaaaatatcaatgtttgggtgactgtgtaaagctcagtgtgtaagaacatctttttgtctaggttttctttctgctctttattgaagacaaacactcaccaaaaagaaaaataaaagttttcagagaaactaattttctttggcaagagtattacttaatattttggcctcctaaagtttccctagttagtactcggactcctgtgctaattgtcagcttacatatcattgtatagagactgtttattctgtaccaaactgatttcaaaagtactacattgaaaataaaccggtgactgtttttcttcataaagttctgcgtttggcatcttcactctttccaaaatgtatctgtacatcagaaatgtcactattccaagtgtctttttagtgtggctttagtatggcttccttttaatattgtacatacattgtatctttgttttatggtaataagtaataaaaatgtagacttcatattttgtacaaaatgtcctatgtacagaataaaaaagttcatagaaacagcaaa

SEQ ID NO: 459056 - DNA, 1908 bp, Homo sapiens
cgaaatcatttgtttacagtctggccaaggttgtggcctccagtattccccctaagagatgggatctttgcctaaaagttactgagaaacgaaggctgcaaaaagccggaaaatatcccagcttttaaggcacactgacagccaaacagaacgctctttccgtttgcagtttttttagtgtcattttaagttgcagcttccggccaatcagcgagcttcatgcctgctgacatcacgaaccagccagttccctccagctgcagagagcttcagtttgtctttttttttttaaactaaaatggaggctggtttcttgccttaaggagcccattgcctttcccgctgaagtctagatgttgacatgtaataaagcgggcagcaggatggtggtggatgcggccaactccaatgggcctttccagcccgtggtccttctccatattcgagatgttcctcctgctgatcaagagaagctttttatccagaagttacgtcagtgttgcgtcctctttgactttgtttctgatccactaagtgacctaaagtggaaggaagtaaaacgagctgctttaagtgaaatggtagaatatatcacccataatcggaatgtgatcacagagcctatttacccagaagtagtccatatgtttgcagttaacatgtttcgaacattaccaccttcctccaatcctacgggagcggaatttgacccggaggaagatgaaccaacgttagaagcagcctggcctcatctacagcttgtttatgaatttttcttaagatttttagagtctccagatttccaacctaatatagcgaagaaatatattgatcagaagtttgtattgcagcttttagagctctttgacagtgaagatcctcgggagagagattttcttaaaaccacccttcacagaatctatgggaaattcctaggcttgagagcttacatcagaaaacagataaataatatattttataggtttatttatgaaacagagcatcataatggcatagcagagttactggaaatattgggaagtataattaatggatttgccttaccactaaaagaagagcacaagattttcttattgaaggtgttactacctttgcacaaagtgaaatctctgagtgtctaccatccccagctggcatactgtgtagtgcagtttttagaaaaggacagcaccctcacggaaccagtggtgatggcacttctcaaatactggccaaagactcacagtccaaaagaagtaatgttcttaaacgaattagaagagattttagatgtcattgaaccatcagaatttgtgaagatcatggaacccctcttccggcagttggccaaatgtgtctccagcccacacttccaggtggcagagcgagctctctattactggaataatgaatacatcatgagtttaatcagtgacaacgcagcgaagattctgcccatcatgtttccttccttgtaccgcaactcaaagacccattggaacaagacaatacatggcttgatatacaacgccctgaagctcttcatggagatgaaccaaaagctatttgatgactgtacacaacagttcaaagcagagaaactaaagtgagttgttcctttcacaagttactgtttccaggatttttttcttaatcctaagtaaacctcttccactgttttgtcctaaaacggtattcttcactcgaaagcaaaaccaagcctttcatacttggaaagcaaattaaaactgtgttataataacgtattttgaaagaacaggtgtttaaaggtagctattctccccccttgtattgccagattaatcatctttgcaaaaagtgcttatgtaagcaagaatttaacattcagaattttttcttttcttgggctataatgggcttaaaggc

SEQ ID NO: 459057 - DNA, 1702 bp, Homo sapiens
cgaaatcatttgtttacagtctggccaaggttgtggcctccagtattccccctaagagatgggatctttgcctaaaagttactgagaaacgaaggctgcaaaaagccggaaaatatcccagcttttaaggcacactgacagccaaacagaacgctctttccgtttgcagtttttttagtgtcattttaagttgcagcttccggccaatcagcgagcttcatgcctgctgacatcacgaaccagccagttccctccagctgcagagagcttcagtttgtctttttttttttaaactaaaatggaggctggtttcttgccttaaggagcccattgcctttcccgctgaagtctagatgttgacatgtaataaagcgggcagcaggatggtggtggatgcggccaactccaatgggcctttccagcccgtggtccttctccatattcgagatgttcctcctgctgatcaagagaagctttttatccagaagttacgtcagtgttgcgtcctctttgactttgtttctgatccactaagtgacctaaagtggaaggaagtaaaacgagctgctttaagtgaaatggtagaatatatcacccataatcggaatgtgatcacagagcctatttacccagaagtagtccatatgtttgcagttaacatgtttcgaacattaccaccttcctccaatcctacgggagcggaatttgacccggaggaagatgaaccaacgttagaagcagcctggcctcatctacagcttgtttatgaatttttcttaagatttttagagtctccagatttccaacctaatatagcgaagaaatatattgatcagaagtttgtattgcagcttttagagctctttgacagtgaagatcctcgggagagagattttcttaaaaccacccttcacagaatctatgggaaattcctaggcttgagagcttacatcagaaaacagataaataatatattttataggtttatttatgaaacagagcatcataatggcatagcagagttactggaaatattgggaagtataattaatggatttgccttaccactaaaagaagagcacaagattttcttattgaaggtgttactacctttgcacaaagtgaaatctctgagtgtctaccatccccagctggcatactgtgtagtgcagtttttagaaaaggacagcaccctcacggaaccagtggtgatggcacttctcaaatactggccaaagactcacagtccaaaagaagtaatgttcttaaacgaattagaagagattttagatgtcattgaaccatcagaatttgtgaagatcatggaacccctcttccggcagttggccaaatgtgtctccagcccacacttccaggacaatacatggcttgatatacaacgccctgaagctcttcatggagatgaaccaaaagctatttgatgactgtacacaacagttcaaagcagagaaactaaaagagaagctaaaaatgaaagaacgggaagaagcatgggttaaaatagaaaatctagccaaagccaatccccaggtactaaaaaagagaataacatgaaaacgcccagggttacttgaatgtttttataagataggaatatatgtcttcaccatggggggggtctcgatttcactaacgttgtatatgaaaatgtctgcaataaaaagtacttttaaactttgta

SEQ ID NO: 459058 - DNA, 3175 bp, Homo sapiens
ctccttttacagtactggtccctttacactgtactgcatactcgttttttcagtggatatatgagcttcttgtcaaaattatgtgggtcccatgaagaaacatctaaccaggggaagggggaaggattgagacataagacgtacttatataagatttcttttaagaattccaatcttggacatgttaaatttttttatattttctcatgtttaaatctcagttcgtttttcatgctgtgctcagcacgtaagtgtggggaaatggagcaggggggctgcgggaggagccgctggctgggctcaacatgcctgtgccttttccccttcagtgtgttcttgtgtctgatgcatctctaacacagatgacattttactgtttttcagagagaagctaaaaatgaaagaacgggaagaagcatgggttaaaatagaaaatctagccaaagccaatccccagtacacagtgtatagtcaagccagcaccatgagcattccggttgcaatggagacagatgggcctttatttgaagatgtgcagatgctgagaaagacagtgaaggacgaggctcatcaggcacagaaagatccgaagaaggaccgtcctcttgcacgccgcaagtccgagctgcctcaggacccccacaccaagaaagccttggaagctcactgcagggccgatgagctggcctcccaggacggccgctagcctccggggcgccgcgtcggggccgggcccgccagttcttttccggattctgtagaaaatacatacttcctgtgccataccaatcagttacactcaaagctttcttggaccccgttccgtaggcaataacgtgcgtccgcctcagcgcgagattaggagttcaaacaatggtgacttcccagagcccgctggcagagccgcgggttgacgacggtgtcctcgcagtgtcgccgccaccccagcgtagtccaagtcagactatttcacaaagtcagagcgataggaaagcaccctgcccttcatcttcatgttctcccaaatggaacttaggatcttttaacataggtggttctgtgataacatcagtgttttccaaatcaaaggaacgctttaaaaaataggacctattttttaagactttacagcctttgaaatggtttccacgtgattgttacgccagcagttctcgttttgtttgtttttcaatctcagtgaaatggctctttgctttcgagttctcacgcaacgtactgggcaaatgacaatcctcagccgctggtattttctaaggggtctcttcactttgatgagtgacatgaacaccgtgtctccttctcttgtgtgtacctaaagccatatttccaagtctgtggtactccaggattccaggagtaagcctgtagaagagatttattttaaaagagattgctctgaaatttatcttaaaagagcttgctctgtctaccttgacagaaattggagttttaaaattatgtgttaatatttttatttgcagatttcgtttccgtcaacttaaacattgttgcccttcaacaaggctcttgaattaataaaattatagtctctaagaattccacattttatggaaagttagagcaaaatcattttgagttaagccagttcttagcctaatgcaaactgcagcgcctttaagcataaagtaacacaacagcattgcacggggccggcactgccgctgccttcactgaaggctgcagtgctgttctgagagcttggaggaggcaccagcgaggatgacgtttagtggagctctttctgttgaaaagagctcacgttatcaacaccttgtaaggaaaatacagtgtctgagttttcatcggtcttcacatgctgctatatattccacagagttccttgcatgtactgagcttttgttttagatggaatagcacaaggagaaaaatctttaaacttagtgctttgtctattctttatttctctcagggtggccagtattttgacttatttatcctgcttgaaagctacttgagatgtgtactgctattctaaacacgtgatctagtttctttcatctctggcataagattatataacttaatgttaagtgtcttgaggcataaaagacaaaatgtggcttattttaggatctgttttttcatcgaggtctcgggtatcctttcaaagatagtgagaagcagacactgctccttgtgcagctctggtacctcctgcccactgctgtcacttcaagccactggcaatgcttctgtcctcgtgtcttggaggaaaatcacctggggggaggggacttcttgtggtaagagcaagtgcaggtatgaaatgcgaagattgccccagctaaaagtggacaagtccgctttgtgagatgaatacttcctgagaaacttgacaagtatctctccattttaccattatgaaaactatcattaaaaaaaacagtttagatgccttctccttttgagggaaaaagggtgctttttattgtataaagcagcgtcttatgtattttgatataccattgtttgaacttccgtctttagctgatagattctcaaatatccttgattttggatgttcagtatgtttgtgagagaggtttctgggaagactctctttttgccctcgggaaaaagcaaaatatcaatgtttgggtgactgtgtaaagctcagtgtgtaagaacatctttttgtctaggttttctttctgctctttattgaagacaaacactcaccaaaaagaaaaataaaagttttcagagaaactaattttctttggcaagagtattacttaatattttggcctcctaaagtttccctagttagtactcggactcctgtgctaattgtcagcttacatatcattgtatagagactgtttattctgtaccaaactgatttcaaaagtactacattgaaaataaaccggtgactgtttttcttcataaagttctgcgtttggcatcttcactctttccaaaatgtatctgtacatcagaaatgtcactattccaagtgtctttttagtgtggctttagtatggcttccttttaatattgtacatacattgtatctttgttttatggtaataagtaataaaaatgtagacttcatattttgtacaaaatgtcctatgtacagaataaaaaagttcatagaaacagcaaa

SEQ ID NO: 459059 - DNA, 916 bp, Homo sapiens
cgaaatcatttgtttacagtctggccaaggttgtggcctccagtattccccctaagagatgggatctttgcctaaaagttactgagaaacgaaggctgcaaaaagccggaaaatatcccagcttttaaggcacactgacagccaaacagaacgctctttccgtttgcagtttttttagtgtcattttaagttgcagcttccggccaatcagcgagcttcatgcctgctgacatcacgaaccagccagttccctccagctgcagagagcttcagtttgtctttttttttttaaactaaaatggaggctggtttcttgccttaaggagcccattgcctttcccgctgaagtctagatgttgacatgtaataaagcgggcagcaggatggtggtggatgcggccaactccaatgggcctttccagcccgtggtccttctccatattcgagatgttcctcctgctgatcaagagaagctttttatccagaagttacgtcagtgttgcgtcctctttgactttgtttctgatccactaagtgacctaaagtggaaggaagtaaaacgagctgctttaagtgaaatggtagaatatatcacccataatcggaatgtgatcacagagcctatttacccagaagtagtccatatgtttgcagttaacatgtttcgaacattaccaccttcctccaatcctacgggagcggaatttgacccggaggaagatgaaccaacgttagaagcagcctggcctcatctacagccttgtttatgcatttttcttgagatttttagattctcccatgatatcccacctcatatagcagaaagccaatactcttgatcagaacttttcctcgctgcattctcagagctcttgaccaatcaagatccccgggtgagaacttctcccagccaccc

SEQ ID NO: 459060 - DNA, 3023 bp, Homo sapiens
ggtgcaattattgtcattgttgttatttatcatcatcagtatcattacaaaggctcagctggaaggcctgaagtgcccattatacacatagggaaactgaggcccagagaggggtcaaggcttgcacagagttgcccctgggggaaggaggcaggactcggactctggcctcagtttccccacctgagaaacaggccacataactctagtgacctcctgggggaagggcagtcaggcccttgggtggggcttaggcttgaccactggccacctgaggtaccttggaactctggccctgagtgcctcgctattctctgccttctgtgtgtcactgtgccccatgagtgcctccaatgtccttctgtattcccaccctctaccacactgttcccaatctgtgtttttagggtgctcgcttgtcccccaccctctgccctctgtcctatctcctgactgatacctgtattacctctcaccgggccctcaatgccccagcctcatgacctactcttcctggactgtctgtgctcccagccagccttgtcccatcaccccagccttgtatgtgcaccttcagggcccctgtccctctgacacccccatcctgccccccacaggaacctgctgtacgtgtacccgcacagcctcaacttcagcagccgccagggctccgtgcgcaaccttgctgtgcgagtgcagtacatgacaggcgaggaccccagccaggctctgccggtcagtggctgtgccccagggaaggggggtagggcatcccccatgggtccctcatgaatccactctcccaggtcatctttggcaagtccagctgcagtgaatttacccgcgaggccttcacaccggtggtctaccataacaagtatgtagggggacacgtgaggaacttgggggcactcatgggggtaggaggatgtcccttatatatacacataaggcagcatcgatgggaagatgggggacaggaagaagagaggtagaggctcccagagtgctaatgagggaagctgaggcagacagcagagacagtggggcctagcagcaataagggcgtggcatggcagaggtgatggggcagacagtggggaccccagcccccagcagatcccccagcccgattctgccaggtcccccgagttctacgaggagttcaagctgcatcttccagcctgcgtgacagagaaccatcacctgctgttcaccttctaccatgtcagctgccagccccggccgggcactgccctggagacacccgtgggctttactgtgagccgtcccctccctccctccccctgagccctcctcgtcccccaacctggccgcagacctgacctccagcctctccccagtggatcccactgctgcagcacgggcgcctgaggaccggccccttctgtctcccagtgtctgtggaccagccgccgcccagctattccgtgctcacacccgatgtatgtgccctggagctcctgcctgccaatgcactgtccccagaagcactcccgagtcacctgccttccttcctgtcaatcctgggaggcttgttatcctctactggtgcctccagggcccccgtgtagctcattattcccctattaatgcctctctgtgtcctacatgtcctccccaaagattcccattgcctctctgctccattcccactttagccaccctgactgccttcctgatcactgtcccctgccctcgtagtaccttatcattccccatgaatgcaccattgttaatgaccctaggcctcaaatcctcctatcctgtttcctgacctactcaatgaatattcattcaccctgtgtctccattctctgcccccgtcttggcatgtggatttccagcctgcccagtggaccctctcagtctactgggaccagggctgggggcagggtgcttggctgcacccccagaccgggctacactcacgctgcagtgtcgcaatggctggggccgctgggtgacctgatcagtcagggagggctgaccagtgcccacctggtgcctccctcccacaggtggcgcttccgggcatgcgctgggtggacggtcacaagggcgtgttcagtgtggagctcacagccgtgtcctctgtgcacccccaggtacggggtgggccgggaaccaagagtcccgccctgctcccctcttgcctgccctacgattgagtaacagttgccgatggccggggaggtctggcctcaggccttggacgtgactttggtcagctggacccagctttaagggaagctgctgattcaggcaggggtggtcttcattccctgaggccccaccctgctcactccacatccctacccaggacccctacctggacaaattcttcaccctggtgcacgtcctggaggagggagccttcccattccggctcaaggacactgtgctgagcgagggcaacgtggagcaggagctgcgggccagtcttgcagcactgcgcctggccagccccgaaccccttgtggccttctcccaccacgtgctggacaagctcgtgcgtctggtcatcaggcccccgatcatcagtggccagattggtaagcgaatgtggcctcagacctcagtttccccatccacatggcttctcagtcctgaggtcctgagggatcttctataagcccatttacctctctggccatttttctcatctgaaaaatgacctccagtcccctgcacccagagaaggtcttctgtgaccctttggcccgggtgcagcggttcacgcctgtcatcccagcactttgggaggccgaggcaggcagatcacctgaggtcgagagtttgagaccagcctgaccaacatggagaaaccccttctctactaaaaatacaaaattagctgggcgtggtggcgcatgcctgtaatcccagctactcgggaggctgaggcaggagaattgcttgaacctgggaggcggaggtgacagtgagccgagatcatgccactggactccagcccgggcaacagagcaagactccatctc

SEQ ID NO: 459061 - DNA, 6358 bp, Homo sapiens
gacgcgaggaccatggctgcctccgagcgccgcgccttcgcgcacaagatcaacaggacggtggccgcagaggtgcggaagcaggtgtcccgggaacgcagtggctccccccactccagcaggcgctgcagcagctccctgggggtcccactgactgaagttgtcgagcccctggactttgaggatgtacttctgagccggccaccagatgctgagcccgggcccctcagggacctggtagaattcccagctgatgacttggagctgctgctgcagccccgggaatgccggaccacggagcccgggatccccaaggatgaaaaactggatgcccaggtgagggccgcggtggagatgtatattgaggactgggtcattgtccacagaaggtatcagtacctgagtgcagcatacagccccgtcaccacagacacacagcgggagcgacagaagggcctcccccgccaggtctttgagcaggatgcttctggagacgagaggtccggccctgaggactcgaatgactcccggcgtggctcgggctccccggaagacacccctcgaagcagtggtgcctctagcatcttcgacctgaggaacctggcagctgactcattgctgccctctctgctagagcgggcggccccagaagatgtggaccggcgcaatgaaacccttcgacggcagcaccggcccccggccctgctcaccctctacccggcacctgacgaggatgaagccgtggaacgctgtagccgcccagagccaccccgcgagcactttggacaaaggatcttggtcaagtgtctgtcgctcaagttcgagattgaaattgagcccatctttgggatcttggctctgtatgatgtgcgggagaaaaagaagatctcggagaacttctacttcgacctgaactcggactccatgaaggggctgcttcgggctcatggcacccaccctgccatctccaccctggcccgctctgccatcttctctgtgacctacccctcacctgacatcttcctggtcatcaagttggagaaggtgcttcagcaaggggacatcagtgagtgctgtgagccttacatggtgttgaaagaagtggacacagccaagaacaaagagaagctagagaagctgcgcctggcggccgagcagttctgcacccgcctgggccgctaccgcatgcccttcgcctggacggccgtgcacttggccaacatcgtgagcagcgctgggcagctggaccgggactctgactcggagggcgagcgccggccagcctggacagaccgccgccgtcgggggccccaggaccgggcgagtagtggggacgacgcctgcagcttctctggcttccgtccagccacgctaactgtcacaaacttctttaagcaggaggctgagcgactcagtgacgaggacctcttcaagttcctggctgacatgaggcgcccgtcgtccctgctgcggcgactacgtcctgtgactgcccagctcaagatcgacatttctccggctcctgaaaatccccacttctgcctctcccctgagctgcttcatatcaagccctacccggaccccaggggccggcccaccaaggagattctggagttccccgcccgcgaagtctatgccccccataccagctacaggaacctgctgtacgtgtacccgcacagcctcaacttcagcagccgccagggctccgtgcgcaaccttgctgtgcgagtgcagtacatgacaggcgaggaccccagccaggctctgccggtcatctttggcaagtccagctgcagtgaatttacccgcgaggccttcacaccggtggtctaccataacaagtcccccgagttctacgaggagttcaagctgcatcttccagcctgcgtgacagagaaccatcacctgctgttcaccttctaccatgtcagctgccagccccggccgggcactgccctggagacacccgtgggctttacttggatcccactgctgcagcacgggcgcctgaggaccggccccttctgtctcccagtgtctgtggaccagccgccgcccagctattccgtgctcacacccgatgtggcgcttccgggcatgcgctgggtggacggtcacaagggcgtgttcagtgtggagctcacagccgtgtcctctgtgcacccccaggacccctacctggacaaattcttcaccctggtgcacgtcctggaggagggagccttcccattccggctcaaggacactgtgctgagcgagggcaacgtggagcaggagctgcgggccagtcttgcagcactgcgcctggccagccccgaaccccttgtggccttctcccaccacgtgctggacaagctcgtgcgtctggtcatcaggcccccgatcatcagtggccagattgtgaacctgggccgtggagcctttgaagcaatggcccatgtagtcagccttgttcaccggagcctggaggcagcccaggatgcccgcggtcactgcccacagctggctgcctacgtccactacgcctttcgccttcctggcactgagcccagcctcccggatggggcccctccagtgacagtgcaggctgccacactggcccgtggctctggtcgccccgcaagcctctacctggcgcgttccaagagcatcagcagcagcaaccctgacctcgccgtggcccctggctctgtggatgacgaggtttcccgcatcctggccagcaagctgcttcacgaggagctggctctgcagtgggtggtcagcagcagtgccgtacgcgaggccatcctccagcacgcctggttcttcttccagctcatggtgaagagtatggcgctgcacctgctgcttggccagcgactagacacaccccgcaagctgcgcttccccggacgcttcctggacgacatcactgccttggtgggctctgtgggcctggaggtcatcacccgtgtccacaaggatgtggagctggccgagcacctcaacgccagcctggctttcttcctcagtgaccttctgtccctggtggaccggggctttgtcttcagcctggtccgggcccactacaagcaggtggccacgcggctccagtcgtcccctaatccagcagccctgctgaccctgcgcatggaattcacccgcatcctgtgcagccacgagcactacgtgaccctcaacctcccctgctgccccctgtcacctccagcctcgccctccccctctgtgtcctccaccacctcccagagctccaccttctccagccaagccccggaccccaaggtgaccagcatgttcgaactgagtggaccattccggcagcagcacttcctagctgggctcctgctgacggagctggcactggccctcgaacctgaggctgaaggggcattcctgttgcacaagaaggccatcagtgctgtgcacagcctgctatgtggccatgacactgacccccgctacgccgaggccactgtgaaggctcgtgtggccgagctgtacctgccactgctatcgattgcacgggataccttgccacggctgcatgactttgctgagggcccaggtcagcggtcaagactggcctcaatgcttgactcagacacagaaggcgaaggggacattgcgggtaccatcaacccctctgtggccatggccattgctggtggccccctagcccctggctcccgggccagcatctcccaggggccaccaacggcttctcgcgcaggctgtgccctctctgctgagtcaagccggaccttgctggcgtgtgtgctgtgggtgctgaaaaacaccgagccggcgctcctgcagcgctgggccactgacctgacactcccccagctgggacgtctgttggacttgctgtacctttgcctggctgcctttgagtacaaggggaaaaaggcctttgaacgcatcaacagcctcacattcaaaaaatctctggatatgaaggcgcggctagaggaagccattctgggtaccatcggagctcgacaagaaatggttcggcgaagtcgtgagaggagcccgtttgggaatccagagaacgtgcgctggcggaagagcgtcacacactggaagcaaacctcagaccgcgtggacaagaccaaggatgaaatggaacacgaggccttggtggaagggaacctggcaaccgaggcaagcctagtggttctggacacactggagatcatcgtgcagacggtgatgctttcagaagcccgggagagcgtcttgggggcagtgctgaaggttgtgctgtacagcctgggcagtgcccagagtgccctcttcttgcagcatggcctggccacccagagggcccttgtgtccaagttcccggagctgctgttcgaggaggacacggagctgtgtgccgacctgtgcctgaggctcctacgacactgtggcagccgcatcagcaccatccgcacgcacgccagcgcctcgctgtacctgctcatgcgacagaacttcgagatcggccacaactttgcccgtgtgaagatgcaggtcaccatgtctctctcgtccctggtggggacgacgcagaacttcagtgaagagcacctgcgacgttcactcaaaaccatcctcacctatgctgaggaggacatggggctgcgggacagcaccttcgcagagcaggtccaggacctgatgttcaacctgcacatgatcctgacggacacggtgaagatgaaggaacaccaggaggaccctgagatgctcatcgacctcatgtacagaattgcccggggctaccagggctcaccggaccttcggctgacctggttgcagaacatggccgggaagcacgcggagctgggcaaccacgccgaggccgcccagtgcatggtgcacgcggccgccctcgtggctgagtacctcgccctgctcgaggaccaccgccacctgcccgtgggctgcgtttccttccagaacatctcatccaatgtgctagaggagtccgccatctccgacgacatcctgtcgcccgacgaggagggcttctgctccgggaagcacttcactgagctggggctggtagggttgctggaacaggcagccggctacttcaccatgggcgggctctacgaggcggtgaatgaggtctacaagaacctcatccccatcctggaagcccaccgtgactacaagaagctggccgcggtgcacggcaaactgcaggaggccttcaccaagatcatgcaccagagttccggctgggagcgcgtgttcgggacgtatttccgcgtgggcttctacggcgcccacttcggtgacctggatgagcaggagtttgtgtacaaggagccatcgatcacgaagctggcagagatctcacaccggctggaggagttctacacggagagatttggcgacgacgtcgttgagattatcaaagactctaaccctgtggacaagtccaagcttgactcacaaaaggcctacatccagatcacgtatgtggaaccgtactttgatacctacgagctcaaggaccgggtgacctactttgaccgcaactatgggcttcgcacattcctgttctgcacgccgttcacgccggatgggcgcgcacacggggagctgcccgagcaacacaagcgtaagacgctgctcagcaccgaccacgccttcccctacatcaagactcgcatccgtgtgtgccaccgggaggagacggtgctgacgccagtggaggtggccatcgaggacatgcagaagaagacacgggagctggcctttgccaccgagcaggacccaccagatgctaagatgctacagatggtgcttcagggctctgtagggcccaccgtgaaccagggtcccctggaggtggcccaggtgtttttagcagagatcccggaagaccccaagctcttccggcatcacaacaaattgcggctctgcttcaaggacttctgcaagaaatgtgaggatgcgctgcggaaaaataaggccctgattgggccggaccagaaggagtaccaccgtgagctggagcgcaactactgccgcctgcgggaggctctgcagcccctgcttacccagcgcctgccccagctgatggcacccaccccacccggcctcaggaactccttgaacagagcaagtttccgaaaggcagacctctgagcccacaaggaccaaagctgtacctagaggaaccagcacccgggcctcagctgtctgtgctgcgaggggagtctgccctggtgcccactgggctgtggggtgaccacactgtacttggggctgggccctctgcccctgtgtccccatctgtgtgcactgatgcttcctcccttttttaatttaaaatggtttttataagcaa

SEQ ID NO: 459062 - DNA, 8010 bp, Homo sapiens
tgcatcaacgcgttggggagctcttaccatattgtcgacctgcaggcggcgcgaattcactagtgattgagctgaggaggagcagaggccagggacccgtgggcctccctccagacctggaaggccacaggcccagccgggaggggaaggagagtccgtgatggcttcagaccccactggtggcagcattctcatctcctgatctgtgcttgatggggaacgcgttgggggaactggggagctgtgggcccttaaagcctcagcactcctggttctcttggccctcggcctatttatttcgttccacaatctggattttcctcatagaaagaatctgtccgctccgctgcctgagttttcccgtccccaatggccccctccctatctttccaggacggtggccgcagaggtgcggaagcaggtgtcccgggaacgcagtggctccccccactccagcaggcgctgcagcagctccctgggggtcccactgactgaagttgtcgagcccctggactttgaggatgtacttctgagccggccaccagatgctgagcccgggcccctcagggacctggtagaattcccagctgatgacttggagctgctgctgcagccccgggaatgccggaccacggagcccgggatccccaaggatgaaaaactggatgcccaggtgagggccgcggtggagatgtatattgaggactgggtcattgtccacagaaggtatcagtacctgagtgcagcatacagccccgtcaccacagacacacagcgggagcgacagaagggcctcccccgccaggtctttgagcaggatgcttctggagacgagaggtccggccctgaggactcgaatgactcccggcgtggctcgggctccccggaagacacccctcgaagcagtggtgcctctagcatcttcgacctgaggaacctggcagctgactcattgctgccctctctgctagagcgggcggccccagaagatgtggaccggcgcaatgaaacccttcgacggcagcaccggcccccggccctgctcaccctctacccggcacctgacgaggatgaagccgtggaacgctgtagccgcccagagccaccccgcgagcactttggacaaaggatcttggtcaagtgtctgtcgctcaagttcgagattgaaattgagcccatctttgggatcttggctctgtatgatgtgcgggagaaaaagaagatctcggagaacttctacttcgacctgaactcggactccatgaaggggctgcttcgggctcatggcacccaccctgccatctccaccctggcccgctctgccatcttctctgtgacctacccctcacctgacatcttcctggtcatcaagttggagaaggtgcttcagcaaggggacatcagtgagtgctgtgagccttacatggtgttgaaagaagtggacacagccaagaacaaagagaagctagagaagctgcgcctggcggccgagcagttctgcacccgcctgggccgctaccgcatgcccttcgcctggacggccgtgcacttggccaacatcgtgagcagcgctgggcagctggaccgggactctgactcggagggcgagcgccggccagcctggacagaccgccgccgtcgggggccccaggaccgggcgagtagtggggacgacgcctgcagcttctctggcttccgtccagccacgctaactgtcacaaacttctttaagcaggaggctgagcgactcagtgacgaggacctcttcaagttcctggctgacatgaggcgcccgtcgtccctgctgcggcgactacgtcctgtgactgcccagctcaagatcgacatttctccggctcctgaaaatccccacttctgcctctcccctgagctgcttcatatcaagccctacccggaccccaggggccggcccaccaaggagattctggagttccccgcccgcgaagtctatgccccccataccagctacaggaacctgctgtacgtgtacccgcacagcctcaacttcagcagccgccagggctccgtgcgcaaccttgctgtgcgagtgcagtacatgacaggcgaggaccccagccaggctctgccggtcagtggctgtgccccagggaaggggggtagggcatcccccatgggtccctcatgaatccactctcccaggtcatctttggcaagtccagctgcagtgaatttacccgcgaggccttcacaccggtggtctaccataacaagtatgtagggggacacgtgaggaacttgggggcactcatgggggtaggaggatgtcccttatatatacacataaggcagcatcgatgggaagatgggggacaggaagaagagaggtagaggctcccagagtgctaatgagggaagctgaggcagacagcagagacagtggggcctagcagcaataagggcgtggcatggcagaggtgatggggcagacagtggggaccccagcccccagcagatcccccagcccgattctgccaggtcccccgagttctacgaggagttcaagctgcatcttccagcctgcgtgacagagaaccatcacctgctgttcaccttctaccatgtcagctgccagccccggccgggcactgccctggagacacccgtgggctttactgtgagccgtcccctccctccctccccctgagccctcctcgtcccccaacctggccgcagacctgacctccagcctctccccagtggatcccactgctgcagcacgggcgcctgaggaccggccccttctgtctcccagtgtctgtggaccagccgccgcccagctattccgtgctcacacccgatgtatgtgccctggagctcctgcctgccaatgcactgtccccagaagcactcccgagtcacctgccttccttcctgtcaatcctgggaggcttgttatcctctactggtgcctccagggcccccgtgtagctcattattcccctattaatgcctctctgtgtcctacatgtcctccccaaagattcccattgcctctctgctccattcccactttagccaccctgactgccttcctgatcactgtcccctgccctcgtagtaccttatcattccccatgaatgcaccattgttaatgaccctaggcctcaaatcctcctatcctgtttcctgacctactcaatgaatattcattcaccctgtgtctccattctctgcccccgtcttggcatgtggatttccagcctgcccagtggaccctctcagtctactgggaccagggctgggggcagggtgcttggctgcacccccagaccgggctacactcacgctgcagtgtcgcaatggctggggccgctgggtgacctgatcagtcagggagggctgaccagtgcccacctggtgcctccctcccacaggtggcgcttccgggcatgcgctgggtggacggtcacaagggcgtgttcagtgtggagctcacagccgtgtcctctgtgcacccccaggtacggggtgggccgggaaccaagagtcccgccctgctcccctcttgcctgccctacgattgagtaacagttgccgatggccggggaggtctggcctcaggccttggacgtgactttggtcagctggacccagctttaagggaagctgctgattcaggcaggggtggtcttcattccctgaggccccaccctgctcactccacatccctacccaggacccctacctggacaaattcttcaccctggtgcacgtcctggaggagggagccttcccattccggctcaaggacactgtgctgagcgagggcaacgtggagcaggagctgcgggccagtcttgcagcactgcgcctggccagccccgaaccccttgtggccttctcccaccacgtgctggacaagctcgtgcgtctggtcatcaggcccccgatcatcagtggccagattgtgaacctgggccgtggagcctttgaagcaatggcccatgtagtcagccttgttcaccggagcctggaggcagcccaggatgcccgcggtcactgcccacagctggctgcctacgtccactacgcctttcgccttcctggcactgagcccagcctcccggatggggcccctccagtgacagtgcaggctgccacactggcccgtggctctggtcgccccgcaagcctctacctggcgcgttccaagagcatcagcagcagcaaccctgacctcgccgtggcccctggctctgtggatgacgaggtttcccgcatcctggccagcaagggcatcgatcgctcacactcctgggtgaattccgcttatgctccaggaggcagtaaggctgtgctgcggcgggcgcccccttattgtggggccgaccccagacagctgcttcacgaggagctggctctgcagtgggtggtcagcagcagtgccgtacgcgaggccatcctccagcacgcctggttcttcttccagctcatggtgaagagtatggcgctgcacctgctgcttggccagcgactagacacaccccgcaagctgcgcttccccggacgcttcctggacgacatcactgccttggtgggctctgtgggcctggaggtcatcacccgtgtccacaaggatgtggagctggccgagcacctcaacgccagcctggctttcttcctcagtgaccttctgtccctggtggaccggggctttgtcttcagcctggtccgggcccactacaagcaggtggccacgcggctccagtcgtcccctaatccagcagccctgctgaccctgcgcatggaattcacccgcatcctgtgcagccacgagcactacgtgaccctcaacctcccctgctgccccctgtcacctccagcctcgccctccccctctgtgtcctccaccacctcccagagctccaccttctccagccaagccccggaccccaaggtgaccagcatgttcgaactgagtggaccattccggcagcagcacttcctagctgggctcctgctgacggagctggcactggccctcgaacctgaggctgaaggggcattcctgttgcacaagaaggccatcagtgctgtgcacagcctgctatgtggccatgacactgacccccgctacgccgaggccactgtgaaggctcgtgtggccgagctgtacctgccactgctatcgattgcacgggataccttgccacggctgcatgactttgctgagggcccaggtcagcggtcaagactggcctcaatgcttgactcagacacagaaggcgaaggggacattgcgggtaccatcaacccctctgtggccatggccattgctggtggccccctagcccctggctcccgggccagcatctcccaggggccaccaacggcttctcgcgcaggctgtgccctctctgctgagtcaagccggaccttgctggcgtgtgtgctgtgggtgctgaaaaacaccgagccggcgctcctgcagcgctgggccactgacctgacactcccccagctgggacgtctgttggacttgctgtacctttgcctggctgcctttgagtacaaggggaaaaaggcctttgaacgcatcaacagcctcacattcaaaaaatctctggatatgaaggcgcggctagaggaagccattctgggtaccatcggagctcgacaagaaatggttcggcgaagtcgtgagaggagcccgtttgggaatccagagaacgtgcgctggcggaagagcgtcacacactggaagcaaacctcagaccgcgtggacaagaccaaggatgaaatggaacacgaggccttggtggaagggaacctggcaaccgaggcaagcctagtggttctggacacactggagatcatcgtgcagacggtgatgctttcagaagcccgggagagcgtcttgggggcagtgctgaaggttgtgctgtacagcctgggcagtgcccagagtgccctcttcttgcagcatggcctggccacccagagggcccttgtgtccaagttcccggagctgctgttcgaggaggacacggagctgtgtgccgacctgtgcctgaggctcctacgacactgtggcagccgcatcagcaccatccgcacgcacgccagcgcctcgctgtacctgctcatgcgacagaacttcgagatcggccacaactttgcccgtgtgaagatgcaggtcaccatgtctctctcgtccctggtggggacgacgcagaacttcagtgaagagcacctgcgacgttcactcaaaaccatcctcacctatgctgaggaggacatggggctgcgggacagcaccttcgcagagcaggtccaggacctgatgttcaacctgcacatgatcctgacggacacggtgaagatgaaggaacaccaggaggaccctgagatgctcatcgacctcatgtacagaattgcccggggctaccagggctcaccggaccttcggctgacctggttgcagaacatggccgggaagcacgcggagctgggcaaccacgccgaggccgcccagtgcatggtgcacgcggccgccctcgtggctgagtacctcgccctgctcgaggaccaccgccacctgcccgtgggctgcgtttccttccagaacatctcatccaatgtgctagaggagtccgccatctccgacgacatcctgtcgcccgacgaggagggcttctgctccgggaagcacttcactgagctggggctggtagggttgctggaacaggcagccggctacttcaccatgggcgggctctacgaggcggtgaatgaggtctacaagaacctcatccccatcctggaagcccaccgtgactacaagaagctggccgcggtgcacggcaaactgcaggaggccttcaccaagatcatgcaccagagttccggctgggagcgcgtgttcgggacgtatttccgcgtgggcttctacggcgcccacttcggtgacctggatgagcaggagtttgtgtacaaggagccatcgatcacgaagctggcagagatctcacaccggctggaggagttctacacggagagatttggcgacgacgtcgttgagattatcaaagactctaaccctgtggacaagtccaagcttgactcacaaaaggcctacatccagatcacgtatgtggaaccgtactttgatacctacgagctcaaggaccgggtgacctactttgaccgcaactatgggcttcgcacattcctgttctgcacgccgttcacgccggatgggcgcgcacacggggagctgcccgagcaacacaagcgtaagacgctgctcagcaccgaccacgccttcccctacatcaagactcgcatccgtgtgtgccaccgggaggagacggtgctgacgccagtggaggtggccatcgaggacatgcagaagaagacacgggagctggcctttgccaccgagcaggacccaccagatgctaagatgctacagatggtgcttcagggctctgtagggcccaccgtgaaccagggtcccctggaggtggcccaggtgtttttagcagagatcccggaagaccccaagctcttccggcatcacaacaaattgcggctctgcttcaaggacttctgcaagaaatgtgaggatgcgctgcggaaaaataaggccctgattgggccggaccagaaggagtaccaccgtgagctggagcgcaactactgccgcctgcgggaggctctgcagcccctgcttacccagcgcctgccccagctgatggcacccaccccacccggcctcaggaactccttgaacagagcaagtttccgaaaggcagacctctgagcccacaaggaccaaagctgtacctagaggaaccagcacccgggcctcagctgtctgtgctgcgaggggagtctgccctggtgcccactgggctgtggggtgaccacactgtacttggggctgggccctctgcccctgtgtccccatctgtgtgcactgatgcttcctcccttttttaatttaaaatggtttttataagcaa

SEQ ID NO: 459063 - DNA, 3336 bp, Homo sapiens
tggcttaggggtgtctctagtagatttcaggatcagcttttcgcctttcttttcaacttcaaaacccacttttttaagtagggatgcatctgccagcccctgttcctccatctttgcaatcagttcatgcagtgccctgatagtcagttcgaatgcccggacttctcccctgctgccccctgtcacctccagcctcgccctccccctctgtgtcctccaccacctcccagagctccaccttctccagccaagccccggaccccaaggtgaccagcatgttcgaactgagtggaccattccggcagcagcacttcctagctgggctcctgctgacggagctggcactggccctcgaacctgaggctgaaggggcattcctgttgcacaagaaggccatcagtgctgtgcacagcctgctatgtggccatgacactgacccccgctacgccgaggccactgtgaaggctcgtgtggccgagctgtacctgccactgctatcgattgcacgggataccttgccacggctgcatgactttgctgagggcccaggtcagcggtcaagactggcctcaatgcttgactcagacacagaaggcgaaggggacattgcgggtaccatcaacccctctgtggccatggccattgctggtggccccctagcccctggctcccgggccagcatctcccaggggccaccaacggcttctcgcgcaggctgtgccctctctgctgagtcaagccggaccttgctggcgtgtgtgctgtgggtgctgaaaaacaccgagccggcgctcctgcagcgctgggccactgacctgacactcccccagctgggacgtctgttggacttgctgtacctttgcctggctgcctttgagtacaaggggaaaaaggcctttgaacgcatcaacagcctcacattcaaaaaatctctggatatgaaggcgcggctagaggaagccattctgggtaccatcggagctcgacaagaaatggttcggcgaagtcgtgagaggagcccgtttgggaatccagagaacgtgcgctggcggaagagcgtcacacactggaagcaaacctcagaccgcgtggacaagaccaaggatgaaatggaacacgaggccttggtggaagggaacctggcaaccgaggcaagcctagtggttctggacacactggagatcatcgtgcagacggtgatgctttcagaagcccgggagagcgtcttgggggcagtgctgaaggttgtgctgtacagcctgggcagtgcccagagtgccctcttcttgcagcatggcctggccacccagagggcccttgtgtccaagttcccggagctgctgttcgaggaggacacggagctgtgtgccgacctgtgcctgaggctcctacgacactgtggcagccgcatcagcaccatccgcacgcacgccagcgcctcgctgtacctgctcatgcgacagaacttcgagatcggccacaactttgcccgtgtgaagatgcaggtcaccatgtctctctcgtccctggtggggacgacgcagaacttcagtgaagagcacctgcgacgttcactcaaaaccatcctcacctatgctgaggaggacatggggctgcgggacagcaccttcgcagagcaggtccaggacctgatgttcaacctgcacatgatcctgacggacacggtgaagatgaaggaacaccaggaggaccctgagatgctcatcgacctcatgtacagaattgcccggggctaccagggctcaccggaccttcggctgacctggttgcagaacatggccgggaagcacgcggagctgggcaaccacgccgaggccgcccagtgcatggtgcacgcggccgccctcgtggctgagtacctcgccctgctcgaggaccaccgccacctgcccgtgggctgcgtttccttccagaacatctcatccaatgtgctagaggagtccgccatctccgacgacatcctgtcgcccgacgaggagggcttctgctccgggaagcacttcactgagctggggctggtagggttgctggaacaggcagccggctacttcaccatgggcgggctctacgaggcggtgaatgaggtctacaagaacctcatccccatcctggaagcccaccgtgactacaagaagctggccgcggtgcacggcaaactgcaggaggccttcaccaagatcatgcaccagagttccggctgggagcgcgtgttcgggacgtatttccgcgtgggcttctacggcgcccacttcggtgacctggatgagcaggagtttgtgtacaaggagccatcgatcacgaagctggcagagatctcacaccggctggaggagttctacacggagagatttggcgacgacgtcgttgagattatcaaagactctaaccctgtggacaagtccaagcttgactcacaaaaggcctacatccagatcacgtatgtggaaccgtactttgatacctacgagctcaaggaccgggtgacctactttgaccgcaactatgggcttcgcacattcctgttctgcacgccgttcacgccggatgggcgcgcacacggggagctgcccgagcaacacaagcgtaagacgctgctcagcaccgaccacgccttcccctacatcaagactcgcatccgtgtgtgccaccgggaggagacggtgctgacgccagtggaggtggccatcgaggacatgcagaagaagacacgggagctggcctttgccaccgagcaggacccaccagatgctaagatgctacagatggtgcttcagggctctgtagggcccaccgtgaaccagggtcccctggaggtggcccaggtgtttttagcagagatcccggaagaccccaagctcttccggcatcacaacaaattgcggctctgcttcaaggacttctgcaagaaatgtgaggatgcgctgcggaaaaataaggccctgattgggccggaccagaaggagtaccaccgtgagctggagcgcaactactgccgcctgcgggaggctctgcagcccctgcttacccagcgcctgccccagctgatggcacccaccccacccggcctcaggaactccttgaacagagcaagtttccgaaaggcagacctctgagcccacaaggaccaaagctgtacctagaggaaccagcacccgggcctcagctgtctgtgctgcgaggggagtctgccctggtgcccactgggctgtggggtgaccacactgtacttggggctgggccctctgcccctgtgtccccatctgtgtgcactgatgcttcctcccttttttaatttaaaatggtttttataagcaa

SEQ ID NO: 459064 - DNA, 6177 bp, Homo sapiens
gacgcgaggaccatggctgcctccgagcgccgcgccttcgcgcacaagatcaacaggacggtggccgcagaggtgcggaagcaggtgtcccgggaacgcagtggctccccccactccagcaggcgctgcagcagctccctgggggtcccactgactgaagttgtcgagcccctggactttgaggatgtacttctgagccggccaccagatgctgagcccgggcccctcagggacctggtagaattcccagctgatgacttggagctgctgctgcagccccgggaatgccggaccacggagcccgggatccccaaggatgaaaaactggatgcccaggtgagggccgcggtggagatgtatattgaggactgggtcattgtccacagaaggtatcagtacctgagtgcagcatacagccccgtcaccacagacacacagcgggagcgacagaagggcctcccccgccaggtctttgagcaggatgcttctggagacgagaggtccggccctgaggactcgaatgactcccggcgtggctcgggctccccggaagacacccctcgaagcagtggtgcctctagcatcttcgacctgaggaacctggcagctgactcattgctgccctctctgctagagcgggcggccccagaagatgtggaccggcgcaatgaaacccttcgacggcagcaccggcccccggccctgctcaccctctacccggcacctgacgaggatgaagccgtggaacgctgtagccgcccagagccaccccgcgagcactttggacaaaggatcttggtcaagtgtctgtcgctcaagttcgagattgaaattgagcccatctttgggatcttggctctgtatgatgtgcgggagaaaaagaagatctcggagaacttctacttcgacctgaactcggactccatgaaggggctgcttcgggctcatggcacccaccctgccatctccaccctggcccgctctgccatcttctctgtgacctacccctcacctgacatcttcctggtcatcaagttggagaaggtgcttcagcaaggggacatcagtgagtgctgtgagccttacatggtgttgaaagaagtggacacagccaagaacaaagagaagctagagaagctgcgcctggcggccgagcagttctgcacccgcctgggccgctaccgcatgcccttcgcctggacggccgtgcacttggccaacatcgtgagcagcgctgggcagctggaccgggactctgactcggagggcgagcgccggccagcctggacagaccgccgccgtcgggggccccaggaccgggcgagtagtggggacgacgcctgcagcttctctggcttccgtccagccacgctaactgtcacaaacttctttaagcaggaggctgagcgactcagtgacgaggacctcttcaagttcctggctgacatgaggcgcccgtcgtccctgctgcggcgactacgtcctgtgactgcccagctcaagatcgacatttctccggctcctgaaaatccccacttctgcctctcccctgagctgcttcatatcaagccctacccggaccccaggggccggcccaccaaggagattctggagttccccgcccgcgaagtctatgccccccataccagctacaggaacctgctgtacgtgtacccgcacagcctcaacttcagcagccgccagggctccgtgcgcaaccttgctgtgcgagtgcagtacatgacaggcgaggaccccagccaggctctgccggtcatctttggcaagtccagctgcagtgaatttacccgcgaggccttcacaccggtggtctaccataacaagtcccccgagttctacgaggagttcaagctgcatcttccagcctgcgtgacagagaaccatcacctgctgttcaccttctaccatgtcagctgccagccccggccgggcactgccctggagacacccgtgggctttacttggatcccactgctgcagcacgggcgcctgaggaccggccccttctgtctcccagtgtctgtggaccagccgccgcccagctattccgtgctcacacccgatgtggcgcttccgggcatgcgctgggtggacggtcacaagggcgtgttcagtgtggagctcacagccgtgtcctctgtgcacccccaggacccctacctggacaaattcttcaccctggtgcacgtcctggaggagggagccttcccattccggctcaaggacactgtgctgagcgagggcaacgtggagcaggagctgcgggccagtcttgcagcactgcgcctggccagccccgaaccccttgtggccttctcccaccacgtgctggacaagctcgtgcgtctggtcatcaggcccccgatcatcagtggccagattgtgaacctgggccgtggagcctttgaagcaatggcccatgtagtcagccttgttcaccggagcctggaggcagcccaggatgcccgcggtcactgcccacagctggctgcctacgtccactacgcctttcgccttcctggcactgagcccagcctcccggatggggcccctccagtgacagtgcaggctgccacactggcccgtggctctggtcgccccgcaagcctctacctggcgcgttccaagagcatcagcagcagcaaccctgacctcgccgtggcccctggctctgtggatgacgaggtttcccgcatcctggccagcaagctgcttcacgaggagctggctctgcagtgggtggtcagcagcagtgccgtacgcgaggccatcctccagcacgcctggttcttcttccagctcatggtgaagagtatggcgctgcacctgctgcttggccagcgactagacacaccccgcaagctgcgcttccccggacgcttcctggacgacatcactgccttggtgggctctgtgggcctggaggtcatcacccgtgtccacaaggatgtggagctggccgagcacctcaacgccagcctggctttcttcctcagtgaccttctgtccctggtggaccggggctttgtcttcagcctggtccgggcccactacaagcaggtggccacgcggctccagtcgtcccctaatccagcagccctgctgaccctgcgcatggaattcacccgcatcctgtgcagccacgagcactacgtgaccctcaacctcccctgctgccccctgtcacctccagcctcgccctccccctctgtgtcctccaccacctcccagagctccaccttctccagccaagccccggaccccaaggtgaccagcatgttcgaactgagtggaccattccggcagcagcacttcctagctgggctcctgctgacggagctggcactggccctcgaacctgaggctgaaggggcattcctgttgcacaagaaggccatcagtgctgtgcacagcctgctatgtggccatgacactgacccccgctacgccgaggccactgtgaaggctcgtgtggccgagctgtacctgccactgctatcgattgcacgggataccttgccacggctgcatgactttgctgagggcccaggtcagcggtcaagactggcctcaatgcttgactcagacacagaaggcgaaggggacattgcgggtaccatcaacccctctgtggccatggccattgctggtggccccctagcccctggctcccgggccagcatctcccaggggccaccaacggcttctcgcgcaggctgtgccctctctgctgagtcaagccggaccttgctggcgtgtgtgctgtgggtgctgaaaaacaccgagccggcgctcctgcagcgctgggccactgacctgacactcccccagctgggacgtctgttggacttgctgtacctttgcctggctgcctttgagtacaaggggaaaaaggcctttgaacgcatcaacagcctcacattcaaaaaatctctggatatgaaggcgcggctagaggaagccattctgggtaccatcggagctcgacaagaaatggttcggcgaagtcgtgagaggagcccgtttgggaatccagagaacgtgcgctggcggaagagcgtcacacactggaagcaaacctcagaccgcgtggacaagaccaaggatgaaatggaacacgaggccttggtggaagggaacctggcaaccgaggcaagcctagtggttctggacacactggagatcatcgtgcagacggtgatgctttcagaagcccgggagagcgtcttgggggcagtgctgaaggttgtgctgtacagcctgggcagtgcccagagtgccctcttcttgcagcatggcctggccacccagagggcccttgtgtccaagttcccggagctgctgttcgaggaggacacggagctgtgtgccgacctgtgcctgaggctcctacgacactgtggcagccgcatcagcaccatccgcacgcacgccagcgcctcgctgtacctgctcatgcgacagaacttcgagatcggccacaactttgcccgtgtgaagatgcaggtcaccatgtctctctcgtccctggtggggacgacgcagaacttcagtgaagagcacctgcgacgttcactcaaaaccatcctcacctatgctgaggaggacatggggctgcgggacagcaccttcgcagagcaggtccaggacctgatgttcaacctgcacatgatcctgacggacacggtgaagatgaaggaacaccaggaggaccctgagatgctcatcgacctcatgtacagaattgcccggggctaccagggctcaccggaccttcggctgacctggttgcagaacatggccgggaagcacgcggagctgggcaaccacgccgaggccgcccagtgcatggtgcacgcggccgccctcgtggctgagtacctcgccctgctcgaggaccaccgccacctgcccgtgggctgcgtttccttccagaacatctcatccaatgtgctagaggagtccgccatctccgacgacatcctgtcgcccgacgaggagggcttctgctccgggaagcacttcactgagctggggctggtagggttgctggaacaggcagccggctacttcaccatgggcgggctctacgaggcggtgaatgaggtctacaagaacctcatccccatcctggaagcccaccgtgactacaagaagctggccgcggtgcacggcaaactgcaggaggccttcaccaagatcatgcaccagagttccggctgggagcgcgtgttcgggacgtatttccgcgtgggcttctacggcgcccacttcggtgacctggatgagcaggagtttgtgtacaaggagccatcgatcacgaagctggcagagatctcacaccggctggaggagttctacacggagagatttggcgacgacgtcgttgagattatcaaagactctaaccctgtggacaagtccaagcttgactcacaaaaggcctacatccagatcacgtatgtggaaccgtactttgatacctacgagctcaaggaccgggtgacctactttgaccgcaactatgggcttcgcacattcctgttctgcacgccgttcacgccggatgggcgcgcacacggggagctgcccgagcaacacaagcgtaagacgctgctcagcaccgaccacgccttcccctacatcaagactcgcatccgtgtgtgccaccgggaggagacggtgctgacgccagtggaggtggccatcgaggacatgcagaagaagacacgggagctggcctttgccaccgagcaggacccaccagatgctaagatgctacagatggtgcttcagggctctgtagggcccaccgtgaaccagggtcccctggaggtggcccaggtgtttttagcagagatcccggaagaccccaagctcttccggcatcacaacaaattgcggctctgcttcaaggacttctgcaagaaatgtgaggatgcgctgcggaaaaataaggccctgattgggccggaccagaaggagtaccaccgtgagctggagcgcaactactgccgcctgcgggacagcaccttcgcagagcaggtccaggacctgatgttcaacctgcacatgatcctgacggacacggtgaagatgaaggaacaccaggatgagcctgagatgttcatcgacctcattacagcactgcccagg

SEQ ID NO: 459065 - DNA, 1259 bp, Homo sapiens
catgtctgccccatcctccccggatcggccttgagttccggctgggagcgcgtgttcgggacgtatttccgcgtgggcttctacggcgcccacttcggtgacctggatgagcaggagtttgtgtacaaggagccatcgatcacgaagctggcagagatctcacaccggctggaggcacgtccttgtggttgggggtggaacggggcatggggctgccttggggctggagtaggggctgtccctgggtggccccgagtcagccctgtgtctccaggagttctacacggagagatttggcgacgacgtcgttgagattatcaaagactctaaccctgtggacaagtccaagcttgactcacaaaaggcctacatccagatcacgtatgtggaaccgtactttgatacctacgagctcaaggaccgggtgacctactttgaccgcaactatgggcttcgcacattcctgttctgcacgccgttcacgccggatgggcgcgcacacggggagctgcccgagcaacacaagcgtaagacgctgctcagcaccgaccacgccttcccctacatcaagactcgcatccgtgtgtgccaccgggaggagacggtgctgacgccagtggaggtggccatcgaggacatgcagaagaagacacgggagctggcctttgccaccgagcaggacccaccagatgctaagatgctacagatggtgcttcagggctctgtagggcccaccgtgaaccagggtcccctggaggtggcccaggtgtttttagcagagatcccggaagaccccaagctcttccggcatcacaacaaattgcggctctgcttcaaggacttctgcaagaaatgtgaggatgcgctgcggaaaaataaggccctgattgggccggaccagaaggagtaccaccgtgagctggagcgcaactactgccgcctgcgggaggctctgcagcccctgcttacccagcgcctgccccagctgatggcacccaccccacccggcctcaggaactccttgaacagagcaagtttccgaaaggcagacctctgagcccacaaggaccaaagctgtacctagaggaaccagcacccgggcctcagctgtctgtgctgcgaggggagtctgccctggtgcccactgggctgtggggtgaccacactgtacttggggctgggccctctgcccctgtgtccccatctgtgtgcactgatgcttcctcccttttttaatttaaaatggtttttataagcaa

SEQ ID NO: 459066 - DNA, 7998 bp, Homo sapiens
tgcatcaacgcgttggggagctcttaccatattgtcgacctgcaggcggcgcgaattcactagtgattgagctgaggaggagcagaggccagggacccgtgggcctccctccagacctggaaggccacaggcccagccgggaggggaaggagagtccgtgatggcttcagaccccactggtggcagcattctcatctcctgatctgtgcttgatggggaacgcgttgggggaactggggagctgtgggcccttaaagcctcagcactcctggttctcttggccctcggcctatttatttcgttccacaatctggattttcctcatagaaagaatctgtccgctccgctgcctgagttttcccgtccccaatggccccctccctatctttccaggacggtggccgcagaggtgcggaagcaggtgtcccgggaacgcagtggctccccccactccagcaggcgctgcagcagctccctgggggtcccactgactgaagttgtcgagcccctggactttgaggatgtacttctgagccggccaccagatgctgagcccgggcccctcagggacctggtagaattcccagctgatgacttggagctgctgctgcagccccgggaatgccggaccacggagcccgggatccccaaggatgaaaaactggatgcccaggtgagggccgcggtggagatgtatattgaggactgggtcattgtccacagaaggtatcagtacctgagtgcagcatacagccccgtcaccacagacacacagcgggagcgacagaagggcctcccccgccaggtctttgagcaggatgcttctggagacgagaggtccggccctgaggactcgaatgactcccggcgtggctcgggctccccggaagacacccctcgaagcagtggtgcctctagcatcttcgacctgaggaacctggcagctgactcattgctgccctctctgctagagcgggcggccccagaagatgtggaccggcgcaatgaaacccttcgacggcagcaccggcccccggccctgctcaccctctacccggcacctgacgaggatgaagccgtggaacgctgtagccgcccagagccaccccgcgagcactttggacaaaggatcttggtcaagtgtctgtcgctcaagttcgagattgaaattgagcccatctttgggatcttggctctgtatgatgtgcgggagaaaaagaagatctcggagaacttctacttcgacctgaactcggactccatgaaggggctgcttcgggctcatggcacccaccctgccatctccaccctggcccgctctgccatcttctctgtgacctacccctcacctgacatcttcctggtcatcaagttggagaaggtgcttcagcaaggggacatcagtgagtgctgtgagccttacatggtgttgaaagaagtggacacagccaagaacaaagagaagctagagaagctgcgcctggcggccgagcagttctgcacccgcctgggccgctaccgcatgcccttcgcctggacggccgtgcacttggccaacatcgtgagcagcgctgggcagctggaccgggactctgactcggagggcgagcgccggccagcctggacagaccgccgccgtcgggggccccaggaccgggcgagtagtggggacgacgcctgcagcttctctggcttccgtccagccacgctaactgtcacaaacttctttaagcaggaggctgagcgactcagtgacgaggacctcttcaagttcctggctgacatgaggcgcccgtcgtccctgctgcggcgactacgtcctgtgactgcccagctcaagatcgacatttctccggctcctgaaaatccccacttctgcctctcccctgagctgcttcatatcaagccctacccggaccccaggggccggcccaccaaggagattctggagttccccgcccgcgaagtctatgccccccataccagctacaggaacctgctgtacgtgtacccgcacagcctcaacttcagcagccgccagggctccgtgcgcaaccttgctgtgcgagtgcagtacatgacaggcgaggaccccagccaggctctgccggtcagtggctgtgccccagggaaggggggtagggcatcccccatgggtccctcatgaatccactctcccaggtcatctttggcaagtccagctgcagtgaatttacccgcgaggccttcacaccggtggtctaccataacaagtatgtagggggacacgtgaggaacttgggggcactcatgggggtaggaggatgtcccttatatatacacataaggcagcatcgatgggaagatgggggacaggaagaagagaggtagaggctcccagagtgctaatgagggaagctgaggcagacagcagagacagtggggcctagcagcaataagggcgtggcatggcagaggtgatggggcagacagtggggaccccagcccccagcagatcccccagcccgattctgccaggtcccccgagttctacgaggagttcaagctgcatcttccagcctgcgtgacagagaaccatcacctgctgttcaccttctaccatgtcagctgccagccccggccgggcactgccctggagacacccgtgggctttactgtgagccgtcccctccctccctccccctgagccctcctcgtcccccaacctggccgcagacctgacctccagcctctccccagtggatcccactgctgcagcacgggcgcctgaggaccggccccttctgtctcccagtgtctgtggaccagccgccgcccagctattccgtgctcacacccgatgtatgtgccctggagctcctgcctgccaatgcactgtccccagaagcactcccgagtcacctgccttccttcctgtcaatcctgggaggcttgttatcctctactggtgcctccagggcccccgtgtagctcattattcccctattaatgcctctctgtgtcctacatgtcctccccaaagattcccattgcctctctgctccattcccactttagccaccctgactgccttcctgatcactgtcccctgccctcgtagtaccttatcattccccatgaatgcaccattgttaatgaccctaggcctcaaatcctcctatcctgtttcctgacctactcaatgaatattcattcaccctgtgtctccattctctgcccccgtcttggcatgtggatttccagcctgcccagtggaccctctcagtctactgggaccagggctgggggcagggtgcttggctgcacccccagaccgggctacactcacgctgcagtgtcgcaatggctggggccgctgggtgacctgatcagtcagggagggctgaccagtgcccacctggtgcctccctcccacaggtggcgcttccgggcatgcgctgggtggacggtcacaagggcgtgttcagtgtggagctcacagccgtgtcctctgtgcacccccaggtacggggtgggccgggaaccaagagtcccgccctgctcccctcttgcctgccctacgattgagtaacagttgccgatggccggggaggtctggcctcaggccttggacgtgactttggtcagctggacccagctttaagggaagctgctgattcaggcaggggtggtcttcattccctgaggccccaccctgctcactccacatccctacccaggacccctacctggacaaattcttcaccctggtgcacgtcctggaggagggagccttcccattccggctcaaggacactgtgctgagcgagggcaacgtggagcaggagctgcgggccagtcttgcagcactgcgcctggccagccccgaaccccttgtggccttctcccaccacgtgctggacaagctcgtgcgtctggtcatcaggcccccgatcatcagtggccagattgtgaacctgggccgtggagcctttgaagcaatggcccatgtagtcagccttgttcaccggagcctggaggcagcccaggatgcccgcggtcactgcccacagctggctgcctacgtccactacgcctttcgccttcctggcactgagcccagcctcccggatggggcccctccagtgacagtgcaggctgccacactggcccgtggctctggtcgccccgcaagcctctacctggcgcgttccaagagcatcagcagcagcaaccctgacctcgccgtggcccctggctctgtggatgacgaggtttcccgcatcctggccagcaaggccatcgactgcaactctagccgagcctcctcctacctcgagggttcctcctcggccccaccagccacccagctgagacccactgtgcagaagctgcttcacgaggagctggctctgcagtgggtggtcagcagcagtgccgtacgcgaggccatcctccagcacgcctggttcttcttccagctcatggtgaagagtatggcgctgcacctgctgcttggccagcgactagacacaccccgcaagctgcgcttccccggacgcttcctggacgacatcactgccttggtgggctctgtgggcctggaggtcatcacccgtgtccacaaggatgtggagctggccgagcacctcaacgccagcctggctttcttcctcagtgaccttctgtccctggtggaccggggctttgtcttcagcctggtccgggcccactacaagcaggtggccacgcggctccagtcgtcccctaatccagcagccctgctgaccctgcgcatggaattcacccgcatcctgtgcagccacgagcactacgtgaccctcaacctcccctgctgccccctgtcacctccagcctcgccctccccctctgtgtcctccaccacctcccagagctccaccttctccagccaagccccggaccccaaggtgaccagcatgttcgaactgagtggaccattccggcagcagcacttcctagctgggctcctgctgacggagctggcactggccctcgaacctgaggctgaaggggcattcctgttgcacaagaaggccatcagtgctgtgcacagcctgctatgtggccatgacactgacccccgctacgccgaggccactgtgaaggctcgtgtggccgagctgtacctgccactgctatcgattgcacgggataccttgccacggctgcatgactttgctgagggcccaggtcagcggtcaagactggcctcaatgcttgactcagacacagaaggcgaaggggacattgcgggtaccatcaacccctctgtggccatggccattgctggtggccccctagcccctggctcccgggccagcatctcccaggggccaccaacggcttctcgcgcaggctgtgccctctctgctgagtcaagccggaccttgctggcgtgtgtgctgtgggtgctgaaaaacaccgagccggcgctcctgcagcgctgggccactgacctgacactcccccagctgggacgtctgttggacttgctgtacctttgcctggctgcctttgagtacaaggggaaaaaggcctttgaacgcatcaacagcctcacattcaaaaaatctctggatatgaaggcgcggctagaggaagccattctgggtaccatcggagctcgacaagaaatggttcggcgaagtcgtgagaggagcccgtttgggaatccagagaacgtgcgctggcggaagagcgtcacacactggaagcaaacctcagaccgcgtggacaagaccaaggatgaaatggaacacgaggccttggtggaagggaacctggcaaccgaggcaagcctagtggttctggacacactggagatcatcgtgcagacggtgatgctttcagaagcccgggagagcgtcttgggggcagtgctgaaggttgtgctgtacagcctgggcagtgcccagagtgccctcttcttgcagcatggcctggccacccagagggcccttgtgtccaagttcccggagctgctgttcgaggaggacacggagctgtgtgccgacctgtgcctgaggctcctacgacactgtggcagccgcatcagcaccatccgcacgcacgccagcgcctcgctgtacctgctcatgcgacagaacttcgagatcggccacaactttgcccgtgtgaagatgcaggtcaccatgtctctctcgtccctggtggggacgacgcagaacttcagtgaagagcacctgcgacgttcactcaaaaccatcctcacctatgctgaggaggacatggggctgcgggacagcaccttcgcagagcaggtccaggacctgatgttcaacctgcacatgatcctgacggacacggtgaagatgaaggaacaccaggaggaccctgagatgctcatcgacctcatgtacagaattgcccggggctaccagggctcaccggaccttcggctgacctggttgcagaacatggccgggaagcacgcggagctgggcaaccacgccgaggccgcccagtgcatggtgcacgcggccgccctcgtggctgagtacctcgccctgctcgaggaccaccgccacctgcccgtgggctgcgtttccttccagaacatctcatccaatgtgctagaggagtccgccatctccgacgacatcctgtcgcccgacgaggagggcttctgctccgggaagcacttcactgagctggggctggtagggttgctggaacaggcagccggctacttcaccatgggcgggctctacgaggcggtgaatgaggtctacaagaacctcatccccatcctggaagcccaccgtgactacaagaagctggccgcggtgcacggcaaactgcaggaggccttcaccaagatcatgcaccagagttccggctgggagcgcgtgttcgggacgtatttccgcgtgggcttctacggcgcccacttcggtgacctggatgagcaggagtttgtgtacaaggagccatcgatcacgaagctggcagagatctcacaccggctggaggagttctacacggagagatttggcgacgacgtcgttgagattatcaaagactctaaccctgtggacaagtccaagcttgactcacaaaaggcctacatccagatcacgtatgtggaaccgtactttgatacctacgagctcaaggaccgggtgacctactttgaccgcaactatgggcttcgcacattcctgttctgcacgccgttcacgccggatgggcgcgcacacggggagctgcccgagcaacacaagcgtaagacgctgctcagcaccgaccacgccttcccctacatcaagactcgcatccgtgtgtgccaccgggaggagacggtgctgacgccagtggaggtggccatcgaggacatgcagaagaagacacgggagctggcctttgccaccgagcaggacccaccagatgctaagatgctacagatggtgcttcagggctctgtagggcccaccgtgaaccagggtcccctggaggtggcccaggtgtttttagcagagatcccggaagaccccaagctcttccggcatcacaacaaattgcggctctgcttcaaggacttctgcaagaaatgtgaggatgcgctgcggaaaaataaggccctgattgggccggaccagaaggagtaccaccgtgagctggagcgcaactactgccgcctgcgggaggctctgcagcccctgcttacccagcgcctgccccagctgatggcacccaccccacccggcctcaggaactccttgaacagagcaagtttccgaaaggcagacctctgagcccacaaggaccaaagctgtacctagaggaaccagcacccgggcctcagctgtctgtgctgcgaggggagtctgccctggtgcccactgggctgtggggtgaccacactgtacttggggctgggccctctgcccctgtgtccccatctgtgtgcactgatgcttcctcccttttttaatttaaaatggtttttataagcaa

SEQ ID NO: 459067 - DNA, 6623 bp, Homo sapiens
ggtgcaattattgtcattgttgttatttatcatcatcagtatcattacaaaggctcagctggaaggcctgaagtgcccattatacacatagggaaactgaggcccagagaggggtcaaggcttgcacagagttgcccctgggggaaggaggcaggactcggactctggcctcagtttccccacctgagaaacaggccacataactctagtgacctcctgggggaagggcagtcaggcccttgggtggggcttaggcttgaccactggccacctgaggtaccttggaactctggccctgagtgcctcgctattctctgccttctgtgtgtcactgtgccccatgagtgcctccaatgtccttctgtattcccaccctctaccacactgttcccaatctgtgtttttagggtgctcgcttgtcccccaccctctgccctctgtcctatctcctgactgatacctgtattacctctcaccgggccctcaatgccccagcctcatgacctactcttcctggactgtctgtgctcccagccagccttgtcccatcaccccagccttgtatgtgcaccttcagggcccctgtccctctgacacccccatcctgccccccacaggaacctgctgtacgtgtacccgcacagcctcaacttcagcagccgccagggctccgtgcgcaaccttgctgtgcgagtgcagtacatgacaggcgaggaccccagccaggctctgccggtcagtggctgtgccccagggaaggggggtagggcatcccccatgggtccctcatgaatccactctcccaggtcatctttggcaagtccagctgcagtgaatttacccgcgaggccttcacaccggtggtctaccataacaagtatgtagggggacacgtgaggaacttgggggcactcatgggggtaggaggatgtcccttatatatacacataaggcagcatcgatgggaagatgggggacaggaagaagagaggtagaggctcccagagtgctaatgagggaagctgaggcagacagcagagacagtggggcctagcagcaataagggcgtggcatggcagaggtgatggggcagacagtggggaccccagcccccagcagatcccccagcccgattctgccaggtcccccgagttctacgaggagttcaagctgcatcttccagcctgcgtgacagagaaccatcacctgctgttcaccttctaccatgtcagctgccagccccggccgggcactgccctggagacacccgtgggctttactgtgagccgtcccctccctccctccccctgagccctcctcgtcccccaacctggccgcagacctgacctccagcctctccccagtggatcccactgctgcagcacgggcgcctgaggaccggccccttctgtctcccagtgtctgtggaccagccgccgcccagctattccgtgctcacacccgatgtatgtgccctggagctcctgcctgccaatgcactgtccccagaagcactcccgagtcacctgccttccttcctgtcaatcctgggaggcttgttatcctctactggtgcctccagggcccccgtgtagctcattattcccctattaatgcctctctgtgtcctacatgtcctccccaaagattcccattgcctctctgctccattcccactttagccaccctgactgccttcctgatcactgtcccctgccctcgtagtaccttatcattccccatgaatgcaccattgttaatgaccctaggcctcaaatcctcctatcctgtttcctgacctactcaatgaatattcattcaccctgtgtctccattctctgcccccgtcttggcatgtggatttccagcctgcccagtggaccctctcagtctactgggaccagggctgggggcagggtgcttggctgcacccccagaccgggctacactcacgctgcagtgtcgcaatggctggggccgctgggtgacctgatcagtcagggagggctgaccagtgcccacctggtgcctccctcccacaggtggcgcttccgggcatgcgctgggtggacggtcacaagggcgtgttcagtgtggagctcacagccgtgtcctctgtgcacccccaggtacggggtgggccgggaaccaagagtcccgccctgctcccctcttgcctgccctacgattgagtaacagttgccgatggccggggaggtctggcctcaggccttggacgtgactttggtcagctggacccagctttaagggaagctgctgattcaggcaggggtggtcttcattccctgaggccccaccctgctcactccacatccctacccaggacccctacctggacaaattcttcaccctggtgcacgtcctggaggagggagccttcccattccggctcaaggacactgtgctgagcgagggcaacgtggagcaggagctgcgggccagtcttgcagcactgcgcctggccagccccgaaccccttgtggccttctcccaccacgtgctggacaagctcgtgcgtctggtcatcaggcccccgatcatcagtggccagattgtgaacctgggccgtggagcctttgaagcaatggcccatgtagtcagccttgttcaccggagcctggaggcagcccaggatgcccgcggtcactgcccacagctggctgcctacgtccactacgcctttcgccttcctggcactgagcccagcctcccggatggggcccctccagtgacagtgcaggctgccacactggcccgtggctctggtcgccccgcaagcctctacctggcgcgttccaagagcatcagcagcagcaaccctgacctcgccgtggcccctggctctgtggatgacgaggtttcccgcatcctggccagcaaggccatcgactgcaactctagccgagcctcctcctacctcgagggttcctcctcggccccaccagccacccagctgagacccactgtgcagaagctgcttcacgaggagctggctctgcagtgggtggtcagcagcagtgccgtacgcgaggccatcctccagcacgcctggttcttcttccagctcatggtgaagagtatggcgctgcacctgctgcttggccagcgactagacacaccccgcaagctgcgcttccccggacgcttcctggacgacatcactgccttggtgggctctgtgggcctggaggtcatcacccgtgtccacaaggatgtggagctggccgagcacctcaacgccagcctggctttcttcctcagtgaccttctgtccctggtggaccggggctttgtcttcagcctggtccgggcccactacaagcaggtggccacgcggctccagtcgtcccctaatccagcagccctgctgaccctgcgcatggaattcacccgcatcctgtgcagccacgagcactacgtgaccctcaacctcccctgctgccccctgtcacctccagcctcgccctccccctctgtgtcctccaccacctcccagagctccaccttctccagccaagccccggaccccaaggtgaccagcatgttcgaactgagtggaccattccggcagcagcacttcctagctgggctcctgctgacggagctggcactggccctcgaacctgaggctgaaggggcattcctgttgcacaagaaggccatcagtgctgtgcacagcctgctatgtggccatgacactgacccccgctacgccgaggccactgtgaaggctcgtgtggccgagctgtacctgccactgctatcgattgcacgggataccttgccacggctgcatgactttgctgagggcccaggtcagcggtcaagactggcctcaatgcttgactcagacacagaaggcgaaggggacattgcgggtaccatcaacccctctgtggccatggccattgctggtggccccctagcccctggctcccgggccagcatctcccaggggccaccaacggcttctcgcgcaggctgtgccctctctgctgagtcaagccggaccttgctggcgtgtgtgctgtgggtgctgaaaaacaccgagccggcgctcctgcagcgctgggccactgacctgacactcccccagctgggacgtctgttggacttgctgtacctttgcctggctgcctttgagtacaaggggaaaaaggcctttgaacgcatcaacagcctcacattcaaaaaatctctggatatgaaggcgcggctagaggaagccattctgggtaccatcggagctcgacaagaaatggttcggcgaagtcgtgagaggagcccgtttgggaatccagagaacgtgcgctggcggaagagcgtcacacactggaagcaaacctcagaccgcgtggacaagaccaaggatgaaatggaacacgaggccttggtggaagggaacctggcaaccgaggcaagcctagtggttctggacacactggagatcatcgtgcagacggtgatgctttcagaagcccgggagagcgtcttgggggcagtgctgaaggttgtgctgtacagcctgggcagtgcccagagtgccctcttcttgcagcatggcctggccacccagagggcccttgtgtccaagttcccggagctgctgttcgaggaggacacggagctgtgtgccgacctgtgcctgaggctcctacgacactgtggcagccgcatcagcaccatccgcacgcacgccagcgcctcgctgtacctgctcatgcgacagaacttcgagatcggccacaactttgcccgtgtgaagatgcaggtcaccatgtctctctcgtccctggtggggacgacgcagaacttcagtgaagagcacctgcgacgttcactcaaaaccatcctcacctatgctgaggaggacatggggctgcgggacagcaccttcgcagagcaggtccaggacctgatgttcaacctgcacatgatcctgacggacacggtgaagatgaaggaacaccaggaggaccctgagatgctcatcgacctcatgtacagaattgcccggggctaccagggctcaccggaccttcggctgacctggttgcagaacatggccgggaagcacgcggagctgggcaaccacgccgaggccgcccagtgcatggtgcacgcggccgccctcgtggctgagtacctcgccctgctcgaggaccaccgccacctgcccgtgggctgcgtttccttccagaacatctcatccaatgtgctagaggagtccgccatctccgacgacatcctgtcgcccgacgaggagggcttctgctccgggaagcacttcactgagctggggctggtagggttgctggaacaggcagccggctacttcaccatgggcgggctctacgaggcggtgaatgaggtctacaagaacctcatccccatcctggaagcccaccgtgactacaagaagctggccgcggtgcacggcaaactgcaggaggccttcaccaagatcatgcaccagagttccggctgggagcgcgtgttcgggacgtatttccgcgtgggcttctacggcgcccacttcggtgacctggatgagcaggagtttgtgtacaaggagccatcgatcacgaagctggcagagatctcacaccggctggaggagttctacacggagagatttggcgacgacgtcgttgagattatcaaagactctaaccctgtggacaagtccaagcttgactcacaaaaggcctacatccagatcacgtatgtggaaccgtactttgatacctacgagctcaaggaccgggtgacctactttgaccgcaactatgggcttcgcacattcctgttctgcacgccgttcacgccggatgggcgcgcacacggggagctgcccgagcaacacaagcgtaagacgctgctcagcaccgaccacgccttcccctacatcaagactcgcatccgtgtgtgccaccgggaggagacggtgctgacgccagtggaggtggccatcgaggacatgcagaagaagacacgggagctggcctttgccaccgagcaggacccaccagatgctaagatgctacagatggtgcttcagggctctgtagggcccaccgtgaaccagggtcccctggaggtggcccaggtgtttttagcagagatcccggaagaccccaagctcttccggcatcacaacaaattgcggctctgcttcaaggacttctgcaagaaatgtgaggatgcgctgcggaaaaataaggccctgattgggccggaccagaaggagtaccaccgtgagctggagcgcaactactgccgcctgcgggaggctctgcagcccctgcttacccagcgcctgccccagctgatggcacccaccccacccggcctcaggaactccttgaacagagcaagtttccgaaaggcagacctctgagcccacaaggaccaaagctgtacctagaggaaccagcacccgggcctcagctgtctgtgctgcgaggggagtctgccctggtgcccactgggctgtggggtgaccacactgtacttggggctgggccctctgcccctgtgtccccatctgtgtgcactgatgcttcctcccttttttaatttaaaatggtttttataagcaa

SEQ ID NO: 459068 - DNA, 3182 bp, Homo sapiens
caagatggctttaatggtgacctgccacctctgacccttgaccgctggcatcccccatttttcccccactctgcagagctccaccttctccagccaagccccggaccccaaggtgaccagcatgttcgaactgagtggaccattccggcagcagcacttcctagctgggctcctgctgacggagctggcactggccctcgaacctgaggctgaaggggcattcctgttgcacaagaaggccatcagtgctgtgcacagcctgctatgtggccatgacactgacccccgctacgccgaggccactgtgaaggctcgtgtggccgagctgtacctgccactgctatcgattgcacgggataccttgccacggctgcatgactttgctgagggcccaggtcagcggtcaagactggcctcaatgcttgactcagacacagaaggcgaaggggacattgcgggtaccatcaacccctctgtggccatggccattgctggtggccccctagcccctggctcccgggccagcatctcccaggggccaccaacggcttctcgcgcaggctgtgccctctctgctgagtcaagccggaccttgctggcgtgtgtgctgtgggtgctgaaaaacaccgagccggcgctcctgcagcgctgggccactgacctgacactcccccagctgggacgtctgttggacttgctgtacctttgcctggctgcctttgagtacaaggggaaaaaggcctttgaacgcatcaacagcctcacattcaaaaaatctctggatatgaaggcgcggctagaggaagccattctgggtaccatcggagctcgacaagaaatggttcggcgaagtcgtgagaggagcccgtttgggaatccagagaacgtgcgctggcggaagagcgtcacacactggaagcaaacctcagaccgcgtggacaagaccaaggatgaaatggaacacgaggccttggtggaagggaacctggcaaccgaggcaagcctagtggttctggacacactggagatcatcgtgcagacggtgatgctttcagaagcccgggagagcgtcttgggggcagtgctgaaggttgtgctgtacagcctgggcagtgcccagagtgccctcttcttgcagcatggcctggccacccagagggcccttgtgtccaagttcccggagctgctgttcgaggaggacacggagctgtgtgccgacctgtgcctgaggctcctacgacactgtggcagccgcatcagcaccatccgcacgcacgccagcgcctcgctgtacctgctcatgcgacagaacttcgagatcggccacaactttgcccgtgtgaagatgcaggtcaccatgtctctctcgtccctggtggggacgacgcagaacttcagtgaagagcacctgcgacgttcactcaaaaccatcctcacctatgctgaggaggacatggggctgcgggacagcaccttcgcagagcaggtccaggacctgatgttcaacctgcacatgatcctgacggacacggtgaagatgaaggaacaccaggaggaccctgagatgctcatcgacctcatgtacagaattgcccggggctaccagggctcaccggaccttcggctgacctggttgcagaacatggccgggaagcacgcggagctgggcaaccacgccgaggccgcccagtgcatggtgcacgcggccgccctcgtggctgagtacctcgccctgctcgaggaccaccgccacctgcccgtgggctgcgtttccttccagaacatctcatccaatgtgctagaggagtccgccatctccgacgacatcctgtcgcccgacgaggagggcttctgctccgggaagcacttcactgagctggggctggtagggttgctggaacaggcagccggctacttcaccatgggcgggctctacgaggcggtgaatgaggtctacaagaacctcatccccatcctggaagcccaccgtgactacaagaagctggccgcggtgcacggcaaactgcaggaggccttcaccaagatcatgcaccagagttccggctgggagcgcgtgttcgggacgtatttccgcgtgggcttctacggcgcccacttcggtgacctggatgagcaggagtttgtgtacaaggagccatcgatcacgaagctggcagagatctcacaccggctggaggagttctacacggagagatttggcgacgacgtcgttgagattatcaaagactctaaccctgtggacaagtccaagcttgactcacaaaaggcctacatccagatcacgtatgtggaaccgtactttgatacctacgagctcaaggaccgggtgacctactttgaccgcaactatgggcttcgcacattcctgttctgcacgccgttcacgccggatgggcgcgcacacggggagctgcccgagcaacacaagcgtaagacgctgctcagcaccgaccacgccttcccctacatcaagactcgcatccgtgtgtgccaccgggaggagacggtgctgacgccagtggaggtggccatcgaggacatgcagaagaagacacgggagctggcctttgccaccgagcaggacccaccagatgctaagatgctacagatggtgcttcagggctctgtagggcccaccgtgaaccagggtcccctggaggtggcccaggtgtttttagcagagatcccggaagaccccaagctcttccggcatcacaacaaattgcggctctgcttcaaggacttctgcaagaaatgtgaggatgcgctgcggaaaaataaggccctgattgggccggaccagaaggagtaccaccgtgagctggagcgcaactactgccgcctgcgggaggctctgcagcccctgcttacccagcgcctgccccagctgatggcacccaccccacccggcctcaggaactccttgaacagagcaagtttccgaaaggcagacctctgagcccacaaggaccaaagctgtacctagaggaaccagcacccgggcctcagctgtctgtgctgcgaggggagtctgccctggtgcccactgggctgtggggtgaccacactgtacttggggctgggccctctgcccctgtgtccccatctgtgtgcactgatgcttcctcccttttttaatttaaaatggtttttataagcaa

SEQ ID NO: 459069 - DNA, 804 bp, Homo sapiens
tgcatcaacgcgttggggagctcttaccatattgtcgacctgcaggcggcgcgaattcactagtgattgagctgaggaggagcagaggccagggacccgtgggcctccctccagacctggaaggccacaggcccagccgggaggggaaggagagtccgtgatggcttcagaccccactggtggcagcattctcatctcctgatctgtgcttgatggggaacgcgttgggggaactggggagctgtgggcccttaaagcctcagcactcctggttctcttggccctcggcctatttatttcgttccacaatctggattttcctcatagaaagaatctgtccgctccgctgcctgagttttcccgtccccaatggccccctccctatctttccaggacggtggccgcagaggtgcggaagcaggtgtcccgggaacgcagtggctccccccactccagcaggcgctgcagcagctccctgggggtcccactgactgaagttgtcgagcccctggactttgaggatgtacttctgagccggccaccagatgctgagcccgggcccctcagggacctggtagaattcccagctgatgacttggagctgctgctgcagccccgggaatgccggaccacggagcccgggatccccaaggatgaaaaactggatgcccaggtgagggccgcggtggagatgtatattgaggactgggtcattgtccacagaaggtgagtctgacttaggggcagctcagggggttcggaacccaaaagggctgagctgatgtctgcagccggtcctactgt

SEQ ID NO: 459070 - DNA, 1343 bp, Homo sapiens
gtgccgtacttaccattatagctttattataccaaaaaggtacaaattagaaccagccaaaaggagagatgcatagagcaaggtctgggagggtctcaaatgcgaagcctcgtttgtcctcaggaccacgtccccccgtggcacactgatgcatgacagtatgacaggttattgctagccaggaagctcacctgaacttcagtgtccagagttcttatcattggggttctgttacttaggcatgaatgactgaatcattgtcatgtggtagagctcagcctccagtcccccctcctccccagaggtgaggctgatagcacgtggctcagagcaccagtgctaaccccggggcagagaggccagcctgccttgagtcatgttgttagataaactcaaggggttcaccaagagtcacctcattagcataatctctcaaacgagggctgaggggcccccatgaatagcagacacttccagtcacttgggaaattccaagggtttagagttggctcctaggcactggggacaaaggcaggctgctacacagttggagtggcgcacgtgaggtggagggaagctgcttttgtagctcccctagggactgtgggaggagttgttaaaatccgatctaaagcatatcggaatgagtgagcttccttgattacatcgccagtcgaacatggggacggcagaggagtgagaatgtgccggggaggagatccctcggcccagagctccccaccatgggttaggaacagtaagtcctggggctctgcatcctcctgccctcctggctgtgggtgagggcacggtgtttcctgatctctcctgctgtgtctccaggtctacgaagatctacactccaggccggaaagagcaaggggagcccatgacccctcgccgcacgccagcccgctttggtctgtgagctgaggctgtccccagagaggatggcagcaggtattgggtcctcagccttctggcgggagccctgaggctgcggacaaagccctttcatctgaggactttcatctgtgcatatcacggccccccagggcagttcctgctggaccagactctctggcagaggaggtggagttcttccatgcaggagcacggcatggcgggagcggggctgcagagtatccgaggtgctgccggggcagcgggaggtggctggacccatcgcatctaaaactggcccaggacacttggtgtatgcgtgacttggctgtggctgtcttttttaatccttgtgtaaagcagcaaaaaagacctaaagggaattgtaatttggttataattcaggatttggaaataaatttattatttgtaaaacatga

SEQ ID NO: 459071 - DNA, 4461 bp, Homo sapiens
tcccctccttttcctgcccccagactagaggcgggatgtagtctcttaggctaagagtgattggtcacaaggagactcggaagtgtctgatcagagccccagaggaggccttgagagcctgttggcgtaccgttccacacttggatccaggaatcgggcgtgttccaggctgctctctatggtagctttgggcggatagagggggcgcgcaaagtattaagggacaataatggccgctttcaaggtgtggattttggctccttgagcctgtctgagcgaggggtggcagcgccggcgccccagaatccgggacagaagggtcccaagagtcgcgcttggtgagagaaatcccagatcctgtgatgggggacaccagtgaggatgcctcgatccatcgattggaaggcactgatctggactgtcaggttggtggtcttatttgcaagtccaaaagtgcggccagcgagcagcatgtcttcaaggctcctgctccccgcccttcattactcggactggacttgctggcttccctgaaacggagagagcgagaggagaaggacgatggggaggacaagaagaagtccaaagtctcctcctacaaggactgggaagagagcaaggatgaccagaaggatgctgaggaagagggcggtgaccaggctggccaaaatatccggaaagacagacattatcggtctgctcgggtagagactccatcccatccgggtggtgtgagcgaagagttttgggaacgcagtcggcagagagagcgggagcggcgggaacatggtgtctatgcctcgtccaaagaagaaaaggattggaagaaggagaaatcgcgggatcgagactatgaccgcaagagggacagagatgagcgggatagaagtaggcacagcagcagatcagagcgagatggagggtcagagcgtagcagcagaagaaatgaacccgagagcccacgacatcgacctaaagatgcagccaccccttcaaggtctacctgggaggaagaggacagtggctatggctcctcaaggcgctcacagtgggaatcgccctccccgacgccttcctatcgggattctgagcggagccatcggctgtccactcgagatcgagacaggtctgtgaggggcaagtactcggatgacacgcctctgccaactccctcctacaaatataacgagtgggccgatgacagaagacacttggggtccaccccgcgtctgtccaggggccgaggaagacgtgaggagggcgaagaaggaatttcatttgacacggaggaggagcggcagcagtgggaagatgaccagaggcaagccgatcgggattggtacatgatggacgagggctatgacgagttccacaacccgctggcctactcctccgaggactacgtgaggaggcgggagcagcacctgcataaacagaagcagaagcgcatttcagctcagcggagacagatcaatgaggataacgagcgctgggagacaaaccgcatgctcaccagtggggtggtccatcggctggaggtggatgaggactttgaagaggacaacgcggccaaggtgcatctgatggtgcacaatctggtgcctccctttctggatgggcgcattgtcttcaccaagcagccggagccggtgattccagtgaaggatgccacttctgacctggccatcattgctcggaaaggcagccagacagtgcggaagcacagggagcagaaggagcgcaagaaggctcagcacaaacactgggaactggcggggaccaaactgggagatataatgggcgtcaagaaggaggaagagccagataaagctgtgacggaggatgggaaggtggactacaggacagagcagaagtttgcagatcacatgaagagaaagagcgaagccagcagtgaatttgcaaagaagaagtccatcctggagcagaggcagtacctgcccatctttgcagtgcagcaggagctgctcactattatcagagacaacagcatcgtgatcgtggttggggagacggggagtggtaagaccactcagctgacgcagtacctgcatgaagatggttacacggactatgggatgattgggtgtacccagccccggcgtgtagctgccatgtcagtggccaagagagtcagtgaagagatggggggaaaccttggcgaggaggtgggctatgccatccgctttgaagactgcacttcagagaacaccttgatcaaatacatgactgacgggatcctgctccgagagtccctccgggaagccgacctggatcactacagtgccatcatcatggacgaggcccacgagcgctccctcaacactgacgtgctctttgggctgctccgggaggtagtggctcggcgctcagacctgaagctcatcgtcacatcagccacgatggatgcggagaagtttgctgccttttttgggaatgtccccatcttccacatccctggccgtaccttccctgttgacatcctcttcagcaagaccccacaggaggattacgtggaggctgcagtgaagcagtccttgcaggtgcacctgtcgggggcccctggagacatccttatcttcatgcctggccaagaggacattgaggtgacctcagaccagattgtggagcatctggaggaactggagaacgcgcctgccctggctgtgctgcccatctactctcagctgccttctgacctccaggccaaaatcttccagaaggctccagatggcgttcggaagtgcatcgttgccaccaatattgccgagacgtctctcactgttgacggcatcatgtttgttatcgattctggttattgcaaattaaaggtcttcaaccccaggattggcatggatgctctgcagatctatcccattagccaggccaatgccaaccagcggtcagggcgagccggcaggacgggcccaggtcagtgtttcaggctctacacccagagcgcctacaagaatgagctcctgaccaccacagtgcccgagatccagaggactaacctggccaacgtggtgctgctgctcaagtccctcggggtgcaggacctgctgcagttccacttcatggacccgcccccggaggacaacatgctcaactctatgtatcagctctggatcctcggggccctggacaacacaggtggtctgacctctaccgggcggctgatggtggagttcccgctggaccctgccctgtccaagatgctcatcgtgtcctgtgacatgggctgcagctccgagatcctgctcatcgtttccatgctctcggtcccagccatcttctacaggcccaagggtcgagaggaggagagtgatcaaatccgggagaagttcgctgttcctgagagcgatcatttgacctacctgaatgtttacctgcagtggaagaacaataattactccaccatctggtgtaacgatcatttcatccatgctaaggccatgcggaaggtccgggaggtgcgagctcaactcaaggacatcatggtgcagcagcggatgagcctggcctcgtgtggcactgactgggacatcgtcaggaagtgcatctgtgctgcctatttccaccaagcagccaagctcaagggaatcggggagtacgtgaacatccgcacagggatgccctgccacttgcaccccaccagctccctttttggaatgggctacaccccagattacatagtgtatcacgagttggtcatgaccaccaaggagtatatgcagtgtgtgaccgctgtggacggggagtggctggcggagctgggccccatgttctatagcgtgaaacaggcgggcaagtcacggcaggagaaccgtcgtcgggccaaagaggaagcctctgccatggaggaggagatggcgctggccgaggagcagctgcgagcccggcggcaggagcaggagaagcgcagccccctgggcagtgtcaggtctacgaagatctacactccaggccggaaagagcaaggggagcccatgacccctcgccgcacgccagcccgctttggtctgtgagctgaggctgtccccagagaggatggcagcaggtattgggtcctcagccttctggcgggagccctgaggctgcggacaaagccctttcatctgaggactttcatctgtgcatatcacggccccccagggcagttcctgctggaccagactctctggcagaggaggtggagttcttccatgcaggagcacggcatggcgggagcggggctgcagagtatccgaggtgctgccggggcagcgggaggtggctggacccatcgcatctaaaactggcccaggacacttggtgtatgcgtgacttggctgtggctgtcttttttaatccttgtgtaaagcagcaaaaaagacctaaagggaattgtaatttggttataattcaggatttggaaataaatttattatttgtaaaacatga

SEQ ID NO: 459072 - DNA, 4986 bp, Homo sapiens
  misc_feature (4876)..(4876): n is a, c, g, or t
tcccctccttttcctgcccccagactagaggcgggatgtagtctcttaggctaagagtgattggtcacaaggagactcggaagtgtctgatcagagccccagaggaggccttgagagcctgttggcgtaccgttccacacttggatccaggaatcgggcgtgttccaggctgctctctatggtagctttgggcggatagagggggcgcgcaaagtattaagggacaataatggccgctttcaaggtgtggattttggctccttgagcctgtctgagcgaggggtggcagcgccggcgccccagaatccgggacagaagggtcccaagagtcgcgcttggtgagagaaatcccagatcctgtgatgggggacaccagtgaggatgcctcgatccatcgattggaaggcactgatctggactgtcaggttggtggtcttatttgcaagtccaaaagtgcggccagcgagcagcatgtcttcaaggctcctgctccccgcccttcattactcggactggacttgctggcttccctgaaacggagagagcgagaggagaaggacgatggggaggacaagaagaagtccaaagtctcctcctacaaggactgggaagagagcaaggatgaccagaaggatgctgaggaagagggcggtgaccaggctggccaaaatatccggaaagacagacattatcggtctgctcgggtagagactccatcccatccgggtggtgtgagcgaagagttttgggaacgcagtcggcagagagagcgggagcggcgggaacatggtgtctatgcctcgtccaaagaagaaaaggattggaagaaggagaaatcgcgggatcgagactatgaccgcaagagggacagagatgagcgggatagaagtaggcacagcagcagatcagagcgagatggagggtcagagcgtagcagcagaagaaatgaacccgagagcccacgacatcgacctaaagatgcagccaccccttcaaggtctacctgggaggaagaggacagtggctatggctcctcaaggcgctcacagtgggaatcgccctccccgacgccttcctatcgggattctgagcggagccatcggctgtccactcgagatcgagacaggtctgtgaggggcaagtactcggatgacacgcctctgccaactccctcctacaaatataacgagtgggccgatgacagaagacacttggggtccaccccgcgtctgtccaggggccgaggaagacgtgaggagggcgaagaaggaatttcatttgacacggaggaggagcggcagcagtgggaagatgaccagaggcaagccgatcgggattggtacatgatggacgagggctatgacgagttccacaacccgctggcctactcctccgaggactacgtgaggaggcgggagcagcacctgcataaacagaagcagaagcgcatttcagctcagcggagacagatcaatgaggataacgagcgctgggagacaaaccgcatgctcaccagtggggtggtccatcggctggaggtggatgaggactttgaagaggacaacgcggccaaggtgcatctgatggtgcacaatctggtgcctccctttctggatgggcgcattgtcttcaccaagcagccggagccggtgattccagtgaaggatgccacttctgacctggccatcattgctcggaaaggcagccagacagtgcggaagcacagggagcagaaggagcgcaagaaggctcagcacaaacactgggaactggcggggaccaaactgggagatataatgggcgtcaagaaggaggaagagccagataaagctgtgacggaggatgggaaggtggactacaggacagagcagaagtttgcagatcacatgaagagaaagagcgaagccagcagtgaatttgcaaagaagaagtccatcctggagcagaggcagtacctgcccatctttgcagtgcagcaggagctgctcactattatcagagacaacagcatcgtgatcgtggttggggagacggggagtggtaagaccactcagctgacgcagtacctgcatgaagatggttacacggactatgggatgattgggtgtacccagccccggcgtgtagctgccatgtcagtggccaagagagtcagtgaagagatggggggaaaccttggcgaggaggtgggctatgccatccgctttgaagactgcacttcagagaacaccttgatcaaatacatgactgacgggatcctgctccgagagtccctccgggaagccgacctggatcactacagtgccatcatcatggacgaggcccacgagcgctccctcaacactgacgtgctctttgggctgctccgggaggtagtggctcggcgctcagacctgaagctcatcgtcacatcagccacgatggatgcggagaagtttgctgccttttttgggaatgtccccatcttccacatccctggccgtaccttccctgttgacatcctcttcagcaagaccccacaggaggattacgtggaggctgcagtgaagcagtccttgcaggtgcacctgtcgggggcccctggagacatccttatcttcatgcctggccaagaggacattgaggtgacctcagaccagattgtggagcatctggaggaactggagaacgcgcctgccctggctgtgctgcccatctactctcagctgccttctgacctccaggccaaaatcttccagaaggctccagatggcgttcggaagtgcatcgttgccaccaatattgccgagacgtctctcactgttgacggcatcatgtttgttatcgattctggttattgcaaattaaaggtcttcaaccccaggattggcatggatgctctgcagatctatcccattagccaggccaatgccaaccagcggtcagggcgagccggcaggacgggcccaggtcagtgtttcaggctctacacccagagcgcctacaagaatgagctcctgaccaccacagtgcccgagatccagaggactaacctggccaacgtggtgctgctgctcaagtccctcggggtgcaggacctgctgcagttccacttcatggacccgcccccggaggacaacatgctcaactctatgtatcagctctggatcctcggggccctggacaacacaggtggtctgacctctaccgggcggctgatggtggagttcccgctggaccctgccctgtccaagatgctcatcgtgtcctgtgacatgggctgcagctccgagatcctgctcatcgtttccatgctctcggtcccagccatcttctacaggcccaagggtcgagaggaggagagtgatcaaatccgggagaagttcgctgttcctgagagcgatcatttgacctacctgaatgtttacctgcagtggaagaacaataattactccaccatctggtgtaacgatcatttcatccatgctaaggccatgcggaaggtccgggaggtgcgagctcaactcaaggacatcatggtgcagcagcggatgagcctggcctcgtgtggcactgactgggacatcgtcaggaagtgcatctgtgctgcctatttccaccaagcagccaagctcaagggaatcggggagtacgtgaacatccgcacagggatgccctgccacttgcaccccaccagctccctttttggaatgggctacaccccagattacatagtgtatcacgagttggtcatgaccaccaaggagtatatgcagtgtgtgaccgctgtggacggggagtggctggcggagctgggccccatgttctatagcgtgaaacaggcgggcaagtcacggcaggagaaccgtcgtcgggccaaagaggaagcctctgccatggaggaggagatggcgctggccgaggagcagctgcgagcccggcggcaggagcaggagaagcgcagccccctgggcagtgtcaggtctacgaagatctacactccaggccggaaagagcaaggggagcccatgacccctcgccgcacgccagcccgctttggtctgtgagctgaggctgtccccagagaggatggcagcaggtattgggtcctcagccttctggcgggagccctgaggctgcggacaaagccctttcatctgaggactttcatctgtgcatatcacggccccccagggcagttcctgctggaccagactctctggcagaggaggtggagttcttccatgcaggagcacggcatggcgggagcggggctgcagagtatccgaggtgctgccggggcagcgggaggtggctggacccatcgcatctaaaactggcccaggacacttggtgtatgcgtgacttggctgtggctgtcttttttaatccttgtgtaaagcagcaaaaaagacctaaagggaattgtaatttggttataattcaggatttggaaataaatttattatttgtaaaacatgaaaaaaaaaataaaaaaaaaaaaaaaaagaggggcggggccggccataagaagttatcccccttggaggggccccaaaggtttatgcggcgagttcccccaggctttttcttttgtctccaaagggggggccccatatatatggggagaggctcggatatatatatataagcctaaggcaccggtgggccggctcgttttaacaacacgggtcgggtggccacgcggaaacaaaccgtggctataacctgggggaaatctcttgggggggaacggggcacccctataaccttctcgtggggggggtgggcaaccaatatagtgtgggcacaactctctaccctatacgcgagggagattttttaaaaggcctcaagcgacacatttattcaatatttttcaagggtggtacaatangtcgtgttaaaccactaacgctgatattattgcttggcgtgattgggagaaagtttggggcctcacgggaagtatagtgtacttttgggacacaatttttttttcccgga

SEQ ID NO: 459073 - DNA, 4551 bp, Homo sapiens
tcccctccttttcctgcccccagactagaggcgggatgtagtctcttaggctaagagtgattggtcacaaggagactcggaagtgtctgatcagagccccagaggaggccttgagagcctgttggcgtaccgttccacacttggatccaggaatcgggcgtgttccaggctgctctctatggtagctttgggcggatagagggggcgcgcaaagtattaagggacaataatggccgctttcaaggtgtggattttggctccttgagcctgtctgagcgaggggtggcagcgccggcgccccagaatccgggacagaagggtcccaagagtcgcgcttggtgagagaaatcccagatcctgtgatgggggacaccagtgaggatgcctcgatccatcgattggaaggcactgatctggactgtcaggttggtggtcttatttgcaagtccaaaagtgcggccagcgagcagcatgtcttcaaggctcctgctccccgcccttcattactcggactggacttgctggcttccctgaaacggagagagcgagaggagaaggacgatggggaggacaagaagaagtccaaagtctcctcctacaaggactgggaagagagcaaggatgaccagaaggatgctgaggaagagggcggtgaccaggctggccaaaatatccggaaagacagacattatcggtctgctcgggtagagactccatcccatccgggtggtgtgagcgaagagttttgggaacgcagtcggcagagagagcgggagcggcgggaacatggtgtctatgcctcgtccaaagaagaaaaggattggaagaaggagaaatcgcgggatcgagactatgaccgcaagagggacagagatgagcgggatagaagtaggcacagcagcagatcagagcgagatggagggtcagagcgtagcagcagaagaaatgaacccgagagcccacgacatcgacctaaagatgcagccaccccttcaaggtctacctgggaggaagaggacagtggctatggctcctcaaggcgctcacagtgggaatcgccctccccgacgccttcctatcgggattctgagcggagccatcggctgtccactcgagatcgagacaggtctgtgaggggcaagtactcggatgacacgcctctgccaactccctcctacaaatataacgagtgggccgatgacagaagacacttggggtccaccccgcgtctgtccaggggccgaggaagacgtgaggagggcgaagaaggaatttcatttgacacggaggaggagcggcagcagtgggaagatgaccagaggcaagccgatcgggattggtacatgatggacgagggctatgacgagttccacaacccgctggcctactcctccgaggactacgtgaggaggcgggagcagcacctgcataaacagaagcagaagcgcatttcagctcagcggagacagatcaatgaggataacgagcgctgggagacaaaccgcatgctcaccagtggggtggtccatcggctggaggtggatgaggactttgaagaggacaacgcggccaaggtgcatctgatggtgcacaatctggtgcctccctttctggatgggcgcattgtcttcaccaagcagccggagccggtgattccagtgaaggatgccacttctgacctggccatcattgctcggaaaggcagccagacagtgcggaagcacagggagcagaaggagcgcaagaaggctcagcacaaacactgggaactggcggggaccaaactgggagatataatgggcgtcaagaaggaggaagagccagataaagctgtgacggaggatgggaaggtggactacaggacagagcagaagtttgcagatcacatgaagagaaagagcgaagccagcagtgaatttgcaaagaagaagtccatcctggagcagaggcagtacctgcccatctttgcagtgcagcaggagctgctcactattatcagagacaacagcatcgtgatcgtggttggggagacggggagtggtaagaccactcagctgacgcagtacctgcatgaagatggttacacggactatgggatgattgggtgtacccagccccggcgtgtagctgccatgtcagtggccaagagagtcagtgaagagatggggggaaaccttggcgaggaggtgggctatgccatccgctttgaagactgcacttcagagaacaccttgatcaaatacatgactgacgggatcctgctccgagagtccctccgggaagccgacctggatcactacagtgccatcatcatggacgaggcccacgagcgctccctcaacactgacgtgctctttgggctgctccgggaggtagtggctcggcgctcagacctgaagctcatcgtcacatcagccacgatggatgcggagaagtttgctgccttttttgggaatgtccccatcttccacatccctggccgtaccttccctgttgacatcctcttcagcaagaccccacaggaggattacgtggaggctgcagtgaagcagtccttgcaggtgcacctgtcgggggcccctggagacatccttatcttcatgcctggccaagaggacattgaggtgacctcagaccagattgtggagcatctggaggaactggagaacgcgcctgccctggctgtgctgcccatctactctcagctgccttctgacctccaggccaaaatcttccagaaggctccagatggcgttcggaagtgcatcgttgccaccaatattgccgagacgtctctcactgttgacggcatcatgtttgttatcgattctggttattgcaaattaaaggtcttcaaccccaggattggcatggatgctctgcagatctatcccattagccaggccaatgccaaccagcggtcagggcgagccggcaggacgggcccaggtcagtgtttcaggctctacacccagagcgcctacaagaatgagctcctgaccaccacagtgcccgagatccagaggactaacctggccaacgtggtgctgctgctcaagtccctcggggtgcaggacctgctgcagttccacttcatggacccgcccccggaggacaacatgctcaactctatgtatcagctctggatcctcggggccctggacaacacaggtggtctgacctctaccgggcggctgatggtggagttcccgctggaccctgccctgtccaagatgctcatcgtgtcctgtgacatgggctgcagctccgagatcctgctcatcgtttccatgctctcggtcccagccatcttctacaggcccaagggtcgagaggaggagagtgatcaaatccgggagaagttcgctgttcctgagagcgatcatttgacctacctgaatgtttacctgcagtggaagaacaataattactccaccatctggtgtaacgatcatttcatccatgctaaggccatgcggaaggtagagtggtggatgagcaggatgttgggatgaggggagggtcgagaggaaaggagggctccctcctggtgcctccgtctcctgccctaggtccgggaggtgcgagctcaactcaaggacatcatggtgcagcagcggatgagcctggcctcgtgtggcactgactgggacatcgtcaggaagtgcatctgtgctgcctatttccaccaagcagccaagctcaagggaatcggggagtacgtgaacatccgcacagggatgccctgccacttgcaccccaccagctccctttttggaatgggctacaccccagattacatagtgtatcacgagttggtcatgaccaccaaggagtatatgcagtgtgtgaccgctgtggacggggagtggctggcggagctgggccccatgttctatagcgtgaaacaggcgggcaagtcacggcaggagaaccgtcgtcgggccaaagaggaagcctctgccatggaggaggagatggcgctggccgaggagcagctgcgagcccggcggcaggagcaggagaagcgcagccccctgggcagtgtcaggtctacgaagatctacactccaggccggaaagagcaaggggagcccatgacccctcgccgcacgccagcccgctttggtctgtgagctgaggctgtccccagagaggatggcagcaggtattgggtcctcagccttctggcgggagccctgaggctgcggacaaagccctttcatctgaggactttcatctgtgcatatcacggccccccagggcagttcctgctggaccagactctctggcagaggaggtggagttcttccatgcaggagcacggcatggcgggagcggggctgcagagtatccgaggtgctgccggggcagcgggaggtggctggacccatcgcatctaaaactggcccaggacacttggtgtatgcgtgacttggctgtggctgtcttttttaatccttgtgtaaagcagcaaaaaagacctaaagggaattgtaatttggttataattcaggatttggaaataaatttattatttgtaaaacatga

SEQ ID NO: 459074 - DNA, 4861 bp, Homo sapiens
tcccctccttttcctgcccccagactagaggcgggatgtagtctcttaggctaagagtgattggtcacaaggagactcggaagtgtctgatcagagccccagaggaggccttgagagcctgttggcgtaccgttccacacttggatccaggaatcgggcgtgttccaggctgctctctatggtagctttgggcggatagagggggcgcgcaaagtattaagggacaataatggccgctttcaaggtgtggattttggctccttgagcctgtctgagcgaggggtggcagcgccggcgccccagaatccgggacagaagggtcccaagagtcgcgcttggtgagagaaatcccagatcctgtgatgggggacaccagtgaggatgcctcgatccatcgattggaaggcactgatctggactgtcaggttggtggtcttatttgcaagtccaaaagtgcggccagcgagcagcatgtcttcaaggctcctgctccccgcccttcattactcggactggacttgctggcttccctgaaacggagagagcgagaggagaaggacgatggggaggacaagaagaagtccaaagtctcctcctacaaggactgggaagagagcaaggatgaccagaaggatgctgaggaagagggcggtgaccaggctggccaaaatatccggaaagacagacattatcggtctgctcgggtagagactccatcccatccgggtggtgtgagcgaagagttttgggaacgcagtcggcagagagagcgggagcggcgggaacatggtgtctatgcctcgtccaaagaagaaaaggattggaagaaggagaaatcgcgggatcgagactatgaccgcaagagggacagagatgagcgggatagaagtaggcacagcagcagatcagagcgagatggagggtcagagcgtagcagcagaagaaatgaacccgagagcccacgacatcgacctaaagatgcagccaccccttcaaggtctacctgggaggaagaggacagtggctatggctcctcaaggcgctcacagtgggaatcgccctccccgacgccttcctatcgggattctgagcggagccatcggctgtccactcgagatcgagacaggtctgtgaggggcaagtactcggatgacacgcctctgccaactccctcctacaaatataacgagtgggccgatgacagaagacacttggggtccaccccgcgtctgtccaggggccgaggaagacgtgaggagggcgaagaaggaatttcatttgacacggaggaggagcggcagcagtgggaagatgaccagaggcaagccgatcgggattggtacatgatggacgagggctatgacgagttccacaacccgctggcctactcctccgaggactacgtgaggaggcgggagcagcacctgcataaacagaagcagaagcgcatttcagctcagcggagacagatcaatgaggataacgagcgctgggagacaaaccgcatgctcaccagtggggtggtccatcggctggaggtggatgaggactttgaagaggacaacgcggccaaggtgcatctgatggtgcacaatctggtgcctccctttctggatgggcgcattgtcttcaccaagcagccggagccggtgattccagtgaaggatgccacttctgacctggccatcattgctcggaaaggcagccagacagtgcggaagcacagggagcagaaggagcgcaagaaggctcagcacaaacactgggaactggcggggaccaaactgggagatataatgggcgtcaagaaggaggaagagccagataaagctgtgacggaggatgggaaggtggactacaggacagagcagaagtttgcagatcacatgaagagaaagagcgaagccagcagtgaatttgcaaagaagaagtccatcctggagcagaggcagtacctgcccatctttgcagtgcagcaggagctgctcactattatcagagacaacagcatcgtgatcgtggttggggagacggggagtggtaagaccactcagctgacgcagtacctgcatgaagatggttacacggactatgggatgattgggtgtacccagccccggcgtgtagctgccatgtcagtggccaagagagtcagtgaagagatggggggaaaccttggcgaggaggtgggctatgccatccgctttgaagactgcacttcagagaacaccttgatcaaatacatgactgacgggatcctgctccgagagtccctccgggaagccgacctggatcactacagtgccatcatcatggacgaggcccacgagcgctccctcaacactgacgtgctctttgggctgctccgggaggtagtggctcggcgctcagacctgaagctcatcgtcacatcagccacgatggatgcggagaagtttgctgccttttttgggaatgtccccatcttccacatccctggccgtaccttccctgttgacatcctcttcagcaaggtattgaggccaccatgttacgaactgacccttccatgccacgcacttctctgatgcgaagccggctggagggtggagggtgggtaggggactgggttggagaagatttcctggggaccatggggcaaatggggcagcctgcagctctgggactcggggacaaaggactctgctctgggtgaggttttgtttcattatttctttgaggctgaagtacagggcccagggaggcactgtgccctcttgtagaggcctcgcagtcaggcccatgtggaggtgtggtggccctcaaagtccatggctccattccagagcagtgcctgggccactgggctcccaggagatgcccggcctgcgcttctagtacctccctctgactgtgtccccactgctgttgcagaccccacaggaggattacgtggaggctgcagtgaagcagtccttgcaggtgcacctgtcgggggcccctggagacatccttatcttcatgcctggccaagaggacattgaggtgacctcagaccagattgtggagcatctggaggaactggagaacgcgcctgccctggctgtgctgcccatctactctcagctgccttctgacctccaggccaaaatcttccagaaggctccagatggcgttcggaagtgcatcgttgccaccaatattgccgagacgtctctcactgttgacggcatcatgtttgttatcgattctggttattgcaaattaaaggtcttcaaccccaggattggcatggatgctctgcagatctatcccattagccaggccaatgccaaccagcggtcagggcgagccggcaggacgggcccaggtcagtgtttcaggctctacacccagagcgcctacaagaatgagctcctgaccaccacagtgcccgagatccagaggactaacctggccaacgtggtgctgctgctcaagtccctcggggtgcaggacctgctgcagttccacttcatggacccgcccccggaggacaacatgctcaactctatgtatcagctctggatcctcggggccctggacaacacaggtggtctgacctctaccgggcggctgatggtggagttcccgctggaccctgccctgtccaagatgctcatcgtgtcctgtgacatgggctgcagctccgagatcctgctcatcgtttccatgctctcggtcccagccatcttctacaggcccaagggtcgagaggaggagagtgatcaaatccgggagaagttcgctgttcctgagagcgatcatttgacctacctgaatgtttacctgcagtggaagaacaataattactccaccatctggtgtaacgatcatttcatccatgctaaggccatgcggaaggtccgggaggtgcgagctcaactcaaggacatcatggtgcagcagcggatgagcctggcctcgtgtggcactgactgggacatcgtcaggaagtgcatctgtgctgcctatttccaccaagcagccaagctcaagggaatcggggagtacgtgaacatccgcacagggatgccctgccacttgcaccccaccagctccctttttggaatgggctacaccccagattacatagtgtatcacgagttggtcatgaccaccaaggagtatatgcagtgtgtgaccgctgtggacggggagtggctggcggagctgggccccatgttctatagcgtgaaacaggcgggcaagtcacggcaggagaaccgtcgtcgggccaaagaggaagcctctgccatggaggaggagatggcgctggccgaggagcagctgcgagcccggcggcaggagcaggagaagcgcagccccctgggcagtgtcaggtctacgaagatctacactccaggccggaaagagcaaggggagcccatgacccctcgccgcacgccagcccgctttggtctgtgagctgaggctgtccccagagaggatggcagcaggtattgggtcctcagccttctggcgggagccctgaggctgcggacaaagccctttcatctgaggactttcatctgtgcatatcacggccccccagggcagttcctgctggaccagactctctggcagaggaggtggagttcttccatgcaggagcacggcatggcgggagcggggctgcagagtatccgaggtgctgccggggcagcgggaggtggctggacccatcgcatctaaaactggcccaggacacttggtgtatgcgtgacttggctgtggctgtcttttttaatccttgtgtaaagcagcaaaaaagacctaaagggaattgtaatttggttataattcaggatttggaaataaatttattatttgtaaaacatga

SEQ ID NO: 459075 - DNA, 3711 bp, Homo sapiens
tcccctccttttcctgcccccagactagaggcgggatgtagtctcttaggctaagagtgattggtcacaaggagactcggaagtgtctgatcagagccccagaggaggccttgagagcctgttggcgtaccgttccacacttggatccaggaatcgggcgtgttccaggctgctctctatggtagctttgggcggatagagggggcgcgcaaagtattaagggacaataatggccgctttcaaggtgtggattttggctccttgagcctgtctgagcgaggggtggcagcgccggcgccccagaatccgggacagaagggtcccaagagtcgcgcttggtgagagaaatcccagatcctgtgatgggggacaccagtgaggatgcctcgatccatcgattggaaggcactgatctggactgtcaggttggtggtcttatttgcaagtccaaaagtgcggccagcgagcagcatgtcttcaaggctcctgctccccgcccttcattactcggactggacttgctggcttccctgaaacggagagagcgagaggagaaggacgatggggaggaccaagccgatcgggattggtacatgatggacgagggctatgacgagttccacaacccgctggcctactcctccgaggactacgtgaggaggcgggagcagcacctgcataaacagaagcagaagcgcatttcagctcagcggagacagatcaatgaggataacgagcgctgggagacaaaccgcatgctcaccagtggggtggtccatcggctggaggtggatgaggactttgaagaggacaacgcggccaaggtgcatctgatggtgcacaatctggtgcctccctttctggatgggcgcattgtcttcaccaagcagccggagccggtgattccagtgaaggatgccacttctgacctggccatcattgctcggaaaggcagccagacagtgcggaagcacagggagcagaaggagcgcaagaaggctcagcacaaacactgggaactggcggggaccaaactgggagatataatgggcgtcaagaaggaggaagagccagataaagctgtgacggaggatgggaaggtggactacaggacagagcagaagtttgcagatcacatgaagagaaagagcgaagccagcagtgaatttgcaaagaagaagtccatcctggagcagaggcagtacctgcccatctttgcagtgcagcaggagctgctcactattatcagagacaacagcatcgtgatcgtggttggggagacggggagtggtaagaccactcagctgacgcagtacctgcatgaagatggttacacggactatgggatgattgggtgtacccagccccggcgtgtagctgccatgtcagtggccaagagagtcagtgaagagatggggggaaaccttggcgaggaggtgggctatgccatccgctttgaagactgcacttcagagaacaccttgatcaaatacatgactgacgggatcctgctccgagagtccctccgggaagccgacctggatcactacagtgccatcatcatggacgaggcccacgagcgctccctcaacactgacgtgctctttgggctgctccgggaggtagtggctcggcgctcagacctgaagctcatcgtcacatcagccacgatggatgcggagaagtttgctgccttttttgggaatgtccccatcttccacatccctggccgtaccttccctgttgacatcctcttcagcaagaccccacaggaggattacgtggaggctgcagtgaagcagtccttgcaggtgcacctgtcgggggcccctggagacatccttatcttcatgcctggccaagaggacattgaggtgacctcagaccagattgtggagcatctggaggaactggagaacgcgcctgccctggctgtgctgcccatctactctcagctgccttctgacctccaggccaaaatcttccagaaggctccagatggcgttcggaagtgcatcgttgccaccaatattgccgagacgtctctcactgttgacggcatcatgtttgttatcgattctggttattgcaaattaaaggtcttcaaccccaggattggcatggatgctctgcagatctatcccattagccaggccaatgccaaccagcggtcagggcgagccggcaggacgggcccaggtcagtgtttcaggctctacacccagagcgcctacaagaatgagctcctgaccaccacagtgcccgagatccagaggactaacctggccaacgtggtgctgctgctcaagtccctcggggtgcaggacctgctgcagttccacttcatggacccgcccccggaggacaacatgctcaactctatgtatcagctctggatcctcggggccctggacaacacaggtggtctgacctctaccgggcggctgatggtggagttcccgctggaccctgccctgtccaagatgctcatcgtgtcctgtgacatgggctgcagctccgagatcctgctcatcgtttccatgctctcggtcccagccatcttctacaggcccaagggtcgagaggaggagagtgatcaaatccgggagaagttcgctgttcctgagagcgatcatttgacctacctgaatgtttacctgcagtggaagaacaataattactccaccatctggtgtaacgatcatttcatccatgctaaggccatgcggaaggtccgggaggtgcgagctcaactcaaggacatcatggtgcagcagcggatgagcctggcctcgtgtggcactgactgggacatcgtcaggaagtgcatctgtgctgcctatttccaccaagcagccaagctcaagggaatcggggagtacgtgaacatccgcacagggatgccctgccacttgcaccccaccagctccctttttggaatgggctacaccccagattacatagtgtatcacgagttggtcatgaccaccaaggagtatatgcagtgtgtgaccgctgtggacggggagtggctggcggagctgggccccatgttctatagcgtgaaacaggcgggcaagtcacggcaggagaaccgtcgtcgggccaaagaggaagcctctgccatggaggaggagatggcgctggccgaggagcagctgcgagcccggcggcaggagcaggagaagcgcagccccctgggcagtgtcaggtctacgaagatctacactccaggccggaaagagcaaggggagcccatgacccctcgccgcacgccagcccgctttggtctgtgagctgaggctgtccccagagaggatggcagcaggtattgggtcctcagccttctggcgggagccctgaggctgcggacaaagccctttcatctgaggactttcatctgtgcatatcacggccccccagggcagttcctgctggaccagactctctggcagaggaggtggagttcttccatgcaggagcacggcatggcgggagcggggctgcagagtatccgaggtgctgccggggcagcgggaggtggctggacccatcgcatctaaaactggcccaggacacttggtgtatgcgtgacttggctgtggctgtcttttttaatccttgtgtaaagcagcaaaaaagacctaaagggaattgtaatttggttataattcaggatttggaaataaatttattatttgtaaaacatga

SEQ ID NO: 459076 - DNA, 4280 bp, Homo sapiens
tcccctccttttcctgcccccagactagaggcgggatgtagtctcttaggctaagagtgattggtcacaaggagactcggaagtgtctgatcagagccccagaggaggccttgagagcctgttggcgtaccgttccacacttggatccaggaatcgggcgtgttccaggctgctctctatggtagctttgggcggatagagggggcgcgcaaagtattaagggacaataatggccgctttcaaggtgtggattttggctccttgagcctgtctgagcgaggggtggcagcgccggcgccccagaatccgggacagaagggtcccaagagtcgcgcttggtgagagaaatcccagatcctgtgatgggggacaccagtgaggatgcctcgatccatcgattggaaggcactgatctggactgtcaggttggtggtcttatttgcaagtccaaaagtgcggccagcgagcagcatgtcttcaaggctcctgctccccgcccttcattactcggactggacttgctggcttccctgaaacggagagagcgagaggagaaggacgatggggaggacaagaagaagtccaaagtctcctcctacaaggactgggaagagagcaaggatgaccagaaggatgctgaggaagagggcggtgaccaggctggccaaaatatccggaaagacagacattatcggtctgctcgggtagagactccatcccatccgggtggtgtgagcgaagagttttgggaacgcagtcggcagagagagcgggagcggcgggaacatggtgtctatgcctcgtccaaagaagaaaaggattggaagaaggagaaatcgcgggatcgagactatgaccgcaagagggacagagatgagcgggatagaagtaggcacagcagcagatcagagcgagatggagggtcagagcgtagcagcagaagaaatgaacccgagagcccacgacatcgacctaaagatgcagccaccccttcaaggtctacctgggaggaagaggacagtggctatggctcctcaaggcgctcacagtgggaatcgccctccccgacgccttcctatcgggattctgagcggagccatcggctgtccactcgagatcgagacaggtctgtgaggggcaagtactcggatgacacgcctctgccaactccctcctacaaatataacgagtgggccgatgacagaagacacttggggtccaccccgcgtctgtccaggggccgaggaagacgtgaggagggcgaagaaggaatttcatttgacacggaggaggagcggcagcagtgggaagatgaccagaggcaagccgatcgggattggtacatgatggacgagggctatgacgagttccacaacccgctggcctactcctccgaggactacgtgaggaggcgggagcagcacctgcataaacagaagcagaagcgcatttcagctcagcggagacagatcaatgaggataacgagcgctgggagacaaaccgcatgctcaccagtggggtggtccatcggctggaggtggatgaggactttgaagaggacaacgcggccaaggtgcatctgatggtgcacaatctggtgcctccctttctggatgggcgcattgtcttcaccaagcagccggagccggtgattccagtgaaggatgccacttctgacctggccatcattgctcggaaaggcagccagacagtgcggaagcacagggagcagaaggagcgcaagaaggctcagcacaaacactgggaactggcggggaccaaactgggagatataatgggcgtcaagaaggaggaagagccagataaagctgtgacggaggatgggaaggtggactacaggacagagcagaagtttgcagatcacatgaagagaaagagcgaagccagcagtgaatttgcaaagaagaagtccatcctggagcagaggcagtacctgcccatctttgcagtgcagcaggagctgctcactattatcagagacaacagcatcgtgatcgtggttggggagacggggagtggtaagaccactcagctgacgcagtacctgcatgaagatggttacacggactatgggatgattgggtgtacccagccccggcgtgtagctgccatgtcagtggccaagagagtcagtgaagagatggggggaaaccttggcgaggaggtgggctatgccatccgctttgaagactgcacttcagagaacaccttgatcaaatacatgactgacgggatcctgctccgagagtccctccgggaagccgacctggatcactacagtgccatcatcatggacgaggcccacgagcgctccctcaacactgacgtgctctttgggctgctccgggaggtagtggctcggcgctcagacctgaagctcatcgtcacatcagccacgatggatgcggagaagtttgctgccttttttgggaatgtccccatcttccacatccctggccgtaccttccctgttgacatcctcttcagcaagaccccacaggaggattacgtggaggctgcagtgaagcagtccttgcaggtgcacctgtcgggggcccctggagacatccttatcttcatgcctggccaagaggacattgaggtgacctcagaccagattgtggagcatctggaggaactggagaacgcgcctgccctggctgtgctgcccatctactctcagctgccttctgacctccaggccaaaatcttccagaaggctccagatggcgttcggaagtgcatcgttgccaccaatattgccgagacgtctctcactgttgacggcatcatgtttgttatcgattctggttattgcaaattaaaggtcttcaaccccaggattggcatggatgctctgcagatctatcccattagccaggccaatgccaaccagcggtcagggcgagccggcaggacgggcccaggtcagtgtttcaggctctacacccagagcgcctacaagaatgagctcctgaccaccacagtgcccgagatccagaggactaacctggccaacgtggtgctgctgctcaagtccctcggggtgcaggacctgctgcagttccacttcatggacccgcccccggaggacaacatgctcaactctatgtatcagctctggatcctcggggccctggacaacacaggtggtctgacctctaccgggcggctgatggtggagttcccgctggaccctgccctgtccaagatgctcatcgtgtcctgtgacatgggctgcagctccgagatcctgctcatcgtttccatgctctcggtcccagccatcttctacaggcccaagggtcgagaggaggagagtgatcaaatccgggagaagttcgctgttcctgagagcgatcatttgacctacctgaatgtttacctgcagtggaagaacaataattactccaccatctggtgtaacgatcatttcatccatgctaaggccatgcggaaggtccgggaggtgcgagctcaactcaaggacatcatggtgcagcagcggatgagcctggcctcgtgtggcactgactgggacatcgtcaggaagtgcatctgtgctgcctatttccaccaagcagccaagctcaagggaatcggggagtacgtgaacatccgcacagggatgccctgccacttgcaccccaccagctccctttttggaatgggctacaccccagattacatagtgtatcacgagttggtcatgaccaccaaggagtatatgcagtgtgtgaccgctgtggacggggagtggctggcggagctgggccccatgttctatagcgtgaaacaggcgggcaagtcacggcaggagaaccgtcgtcgggccaaagaggaagcctctgccatggaggaggagatggcgctggccgaggagcagctgcgagcctggcgggagccctgaggctgcggacaaagccctttcatctgaggactttcatctgtgcatatcacggccccccagggcagttcctgctggaccagactctctggcagaggaggtggagttcttccatgcaggagcacggcatggcgggagcggggctgcagagtatccgaggtgctgccggggcagcgggaggtggctggacccatcgcatctaaaactggcccaggacacttggtgtatgcgtgacttggctgtggctgtcttttttaatccttgtgtaaagcagcaaaaaagacctaaagggaattgtaatttggttataattcaggatttggaaataaatttattatttgtaaaacatga

SEQ ID NO: 459077 - DNA, 2244 bp, Homo sapiens
tggctccattgcttcagtcttcatgattggtaagaattgaataggcccatttgtcagctttggcttgtgtttcctcgggggtggtgctgatgggactgggggacaggagccaagggtccccaccatgggggcctccgagccgcctcttctctcaggtagtggctcggcgctcagacctgaagctcatcgtcacatcagccacgatggatgcggagaagtttgctgccttttttgggaatgtccccatcttccacatccctggccgtaccttccctgttgacatcctcttcagcaagaccccacaggaggattacgtggaggctgcagtgaagcagtccttgcaggtgcacctgtcgggggcccctggagacatccttatcttcatgcctggccaagaggacattgaggtgacctcagaccagattgtggagcatctggaggaactggagaacgcgcctgccctggctgtgctgcccatctactctcagctgccttctgacctccaggccaaaatcttccagaaggctccagatggcgttcggaagtgcatcgttgccaccaatattgccgagacgtctctcactgttgacggcatcatgtttgttatcgattctggttattgcaaattaaaggtcttcaaccccaggattggcatggatgctctgcagatctatcccattagccaggccaatgccaaccagcggtcagggcgagccggcaggacgggcccaggtcagtgtttcaggctctacacccagagcgcctacaagaatgagctcctgaccaccacagtgcccgagatccagaggactaacctggccaacgtggtgctgctgctcaagtccctcggggtgcaggacctgctgcagttccacttcatggacccgcccccggaggacaacatgctcaactctatgtatcagctctggatcctcggggccctggacaacacaggtggtctgacctctaccgggcggctgatggtggagttcccgctggaccctgccctgtccaagatgctcatcgtgtcctgtgacatgggctgcagctccgagatcctgctcatcgtttccatgctctcggtcccagccatcttctacaggcccaagggtcgagaggaggagagtgatcaaatccgggagaagttcgctgttcctgagagcgatcatttgacctacctgaatgtttacctgcagtggaagaacaataattactccaccatctggtgtaacgatcatttcatccatgctaaggccatgcggaaggtccgggaggtgcgagctcaactcaaggacatcatggtgcagcagcggatgagcctggcctcgtgtggcactgactgggacatcgtcaggaagtgcatctgtgctgcctatttccaccaagcagccaagctcaagggaatcggggagtacgtgaacatccgcacagggatgccctgccacttgcaccccaccagctccctttttggaatgggctacaccccagattacatagtgtatcacgagttggtcatgaccaccaaggagtatatgcagtgtgtgaccgctgtggacggggagtggctggcggagctgggccccatgttctatagcgtgaaacaggcgggcaagtcacggcaggagaaccgtcgtcgggccaaagaggaagcctctgccatggaggaggagatggcgctggccgaggagcagctgcgagcccggcggcaggagcaggagaagcgcagccccctgggcagtgtcaggtctacgaagatctacactccaggccggaaagagcaaggggagcccatgacccctcgccgcacgccagcccgctttggtctgtgagctgaggctgtccccagagaggatggcagcaggtattgggtcctcagccttctggcgggagccctgaggctgcggacaaagccctttcatctgaggactttcatctgtgcatatcacggccccccagggcagttcctgctggaccagactctctggcagaggaggtggagttcttccatgcaggagcacggcatggcgggagcggggctgcagagtatccgaggtgctgccggggcagcgggaggtggctggacccatcgcatctaaaactggcccaggacacttggtgtatgcgtgacttggctgtggctgtcttttttaatccttgtgtaaagcagcaaaaaagacctaaagggaattgtaatttggttataattcaggatttggaaataaatttattatttgtaaaacatga

SEQ ID NO: 459078 - DNA, 4331 bp, Homo sapiens
tcccctccttttcctgcccccagactagaggcgggatgtagtctcttaggctaagagtgattggtcacaaggagactcggaagtgtctgatcagagccccagaggaggccttgagagcctgttggcgtaccgttccacacttggatccaggaatcgggcgtgttccaggctgctctctatggtagctttgggcggatagagggggcgcgcaaagtattaagggacaataatggccgctttcaaggtgtggattttggctccttgagcctgtctgagcgaggggtggcagcgccggcgccccagaatccgggacagaagggtcccaagagtcgcgcttggtgagagaaatcccagatcctgtgatgggggacaccagtgaggatgcctcgatccatcgattggaaggcactgatctggactgtcaggttggtggtcttatttgcaagtccaaaagtgcggccagcgagcagcatgtcttcaaggctcctgctccccgcccttcattactcggactggacttgctggcttccctgaaacggagagagcgagaggagaaggacgatggggaggacaagaagaagtccaaagtctcctcctacaaggactgggaagagagcaaggatgaccagaaggatgctgaggaagagggcggtgaccaggctggccaaaatatccggaaagacagacattatcggtctgctcgggtagagactccatcccatccgggtggtgtgagcgaagagttttgggaacgcagtcggcagagagagcgggagcggcgggaacatggtgtctatgcctcgtccaaagaagaaaaggattggaagaaggagaaatcgcgggatcgagactatgaccgcaagagggacagagatgagcgggatagaagtaggcacagcagcagatcagagcgagatggagggtcagagcgtagcagcagaagaaatgaacccgagagcccacgacatcgacctaaagatgcagccaccccttcaaggtctacctgggaggaagaggacagtggctatggctcctcaaggcgctcacagtgggaatcgccctccccgacgccttcctatcgggattctgagcggagccatcggctgtccactcgagatcgagacaggtctgtgaggggcaagtactcggatgacacgcctctgccaactccctcctacaaatataacgagtgggccgatgacagaagacacttggggtccaccccgcgtctgtccaggggccgaggaagacgtgaggagggcgaagaaggaatttcatttgacacggaggaggagcggcagcagtgggaagatgaccagaggcaagccgatcgggattggtacatgatggacgagggctatgacgagttccacaacccgctggcctactcctccgaggactacgtgaggaggcgggagcagcacctgcataaacagaagcagaagcgcatttcagctcagcggagacagatcaatgaggataacgagcgctgggagacaaaccgcatgctcaccagtggggtggtccatcggctggaggtggatgaggactttgaagaggacaacgcggccaaggtgcatctgatggtgcacaatctggtgcctccctttctggatgggcgcattgtcttcaccaagcagccggagccggtgattccagtgaaggatgccacttctgacctggccatcattgctcggaaaggcagccagacagtgcggaagcacagggagcagaaggagcgcaagaaggctcagcacaaacactgggaactggcggggaccaaactgggagatataatgggcgtcaagaaggaggaagagccagataaagctgtgacggaggatgggaaggtggactacaggacagagcagaagtttgcagatcacatgaagagaaagagcgaagccagcagtgaatttgcaaagaagaagtccatcctggagcagaggcagtacctgcccatctttgcagtgcagcaggagctgctcactattatcagagacaacagcatcgtgatcgtggttggggagacggggagtggtaagaccactcagctgacgcagtacctgcatgaagatggttacacggactatgggatgattgggtgtacccagccccggcgtgtagctgccatgtcagtggccaagagagtcagtgaagagatggggggaaaccttggcgaggaggtgggctatgccatccgctttgaagactgcacttcagagaacaccttgatcaaatacatgactgacgggatcctgctccgagagtccctccgggaagccgacctggatcactacagtgccatcatcatggacgaggcccacgagcgctccctcaacactgacgtgctctttgggctgctccgggaggtagtggctcggcgctcagacctgaagctcatcgtcacatcagccacgatggatgcggagaagtttgctgccttttttgggaatgtccccatcttccacatccctggccgtaccttccctgttgacatcctcttcagcaagaccccacaggaggattacgtggaggctgcagtgaagcagtccttgcaggtgcacctgtcgggggcccctggagacatccttatcttcatgcctggccaagaggacattgaggtgacctcagaccagattgtggagcatctggaggaactggagaacgcgcctgccctggctgtgctgcccatctactctcagctgccttctgacctccaggccaaaatcttccagaaggctccagatggcgttcggaagtgcatcgttgccaccaatattgccgagacgtctctcactgttgacggcatcatgtttgttatcgattctggttattgcaaattaaaggtcttcaaccccaggattggcatggatgctctgcagatctatcccattagccaggccaatgccaaccagcggtcagggcgagccggcaggacgggcccaggtcagtgtttcaggctctacacccagagcgcctacaagaatgagctcctgaccaccacagtgcccgagatccagaggactaacctggccaacgtggtgctgctgctcaagtccctcggggtgcaggacctgctgcagttccacttcatggacccgcccccggaggacaacatgctcaactctatgtatcagctctggatcctcggggccctggacaacacaggtggtctgacctctaccgggcggctgatggtggagttcccgctggaccctgccctgtccaagatgctcatcgtgtcctgtgacatgggctgcagctccgagatcctgctcatcgtttccatgctctcggtcccagccatcttctacaggcccaagggtcgagaggaggagagtgatcaaatccgggagaagttcgctgttcctgagagcgatcatttgacctacctgaatgtttacctgcagtggaagaacaataattactccaccatctggtgtaacgatcatttcatccatgctaaggccatgcggaaggtccgggaggtgcgagctcaactcaaggacatcatggtgcagcagcggatgagcctggcctcgtgtggcactgactgggacatcgtcaggaagtgcatctgtgctgcctatttccaccaagcagccaagctcaagggaatcggggagtacgtgaacatccgcacagggatgccctgccacttgcaccccaccagctccctttttggaatgggctacaccccagattacatagtgtatcacgagttggtcatgaccaccaaggagtatatgcagtgtgtgaccgctgtggacggggagtggctggcggagctgggccccatgttctatagcgtgaaacaggcgggcaagtcacggcaggtgaggattctgtgctcttcgcaggggtgctgtttgcctgtggggtcggtgttccctccgcttggtattgaagacttgcggtcatccaacccacttacttctctctgcaaacataaaggctgtgatccagcaggctgggtctgtctgattccccaccacccactccagttgtttggtaggctgagcctttaaaaacaaaaccaaaaaactcattattgaaaagtccaaatattcatgaaagtgggaaaaacagtacaacaggccaccatgaattcgttgccttgcctctataattgtcaacgtttgttcaatttcactattcctaccccactccacacacatccattttttttttctggaatattttaaagcttatctcatacattattcatccataaatacttgagtatgtgtctctgactaaaaggacttaaaattttaaatataacctctgtgccgttatcactcataaaaaaatgaatacttaatgtc

SEQ ID NO: 459079 - DNA, 3889 bp, Homo sapiens
  misc_feature (3855)..(3855): n is a, c, g, or t
tcccctccttttcctgcccccagactagaggcgggatgtagtctcttaggctaagagtgattggtcacaaggagactcggaagtgtctgatcagagccccagaggaggccttgagagcctgttggcgtaccgttccacacttggatccaggaatcgggcgtgttccaggctgctctctatggtagctttgggcggatagagggggcgcgcaaagtattaagggacaataatggccgctttcaaggtgtggattttggctccttgagcctgtctgagcgaggggtggcagcgccggcgccccagaatccgggacagaagggtcccaagagtcgcgcttggtgagagaaatcccagatcctgtgatgggggacaccagtgaggatgcctcgatccatcgattggaaggcactgatctggactgtcaggttggtggtcttatttgcaagtccaaaagtgcggccagcgagcagcatgtcttcaaggctcctgctccccgcccttcattactcggactggacttgctggcttccctgaaacggagagagcgagaggagaaggacgatggggaggacaagaagaagtccaaagtctcctcctacaaggactgggaagagagcaaggatgaccagaaggatgctgaggaagagggcggtgaccaggctggccaaaatatccggaaagacagacattatcggtctgctcgggtagagactccatcccatccgggtggtgtgagcgaagagttttgggaacgcagtcggcagagagagcgggagcggcgggaacatggtgtctatgcctcgtccaaagaagaaaaggattggaagaaggagaaatcgcgggatcgagactatgaccgcaagagggacagagatgagcgggatagaagtaggcacagcagcagatcagagcgagatggagggtcagagcgtagcagcagaagaaatgaacccgagagcccacgacatcgacctaaagatgcagccaccccttcaaggtctacctgggaggaagaggacagtggctatggctcctcaaggcgctcacagtgggaatcgccctccccgacgccttcctatcgggattctgagcggagccatcggctgtccactcgagatcgagacaggtctgtgaggggcaagtactcggatgacacgcctctgccaactccctcctacaaatataacgagtgggccgatgacagaagacacttggggtccaccccgcgtctgtccaggggccgaggaagacgtgaggagggcgaagaaggaatttcatttgacacggaggaggagcggcagcagtgggaagatgaccagaggcaagccgatcgggattggtacatgatggacgagggctatgacgagttccacaacccgctggcctactcctccgaggactacgtgaggaggcgggagcagcacctgcataaacagaagcagaagcgcatttcagctcagcggagacagatcaatgaggataacgagcgctgggagacaaaccgcatgctcaccagtggggtggtccatcggctggaggtggatgaggactttgaagaggacaacgcggccaaggtgcatctgatggtgcacaatctggtgcctccctttctggatgggcgcattgtcttcaccaagcagccggagccggtgattccagtgaaggatgccacttctgacctggccatcattgctcggaaaggcagccagacagtgcggaagcacagggagcagaaggagcgcaagaaggctcagcacaaacactgggaactggcggggaccaaactgggagatataatgggcgtcaagaaggaggaagagccagataaagctgtgacggaggatgggaaggtggactacaggacagagcagaagtttgcagatcacatgaagagaaagagcgaagccagcagtgaatttgcaaagaagaagtccatcctggagcagaggcagtacctgcccatctttgcagtgcagcaggagctgctcactattatcagagacaacagcatcgtgatcgtggttggggagacggggagtggtaagaccactcagctgacgcagtacctgcatgaagatggttacacggactatgggatgattgggtgtacccagccccggcgtgtagctgccatgtcagtggccaagagagtcagtgaagagatggggggaaaccttggcgaggaggtgggctatgccatccgctttgaagactgcacttcagagaacaccttgatcaaatacatgactgacgggatcctgctccgagagtccctccgggaagccgacctggatcactacagtgccatcatcatggacgaggcccacgagcgctccctcaacactgacgtgctctttgggctgctccgggaggtagtggctcggcgctcagacctgaagctcatcgtcacatcagccacgatggatgcggagaagtttgctgccttttttgggaatgtccccatcttccacatccctggccgtaccttccctgttgacatcctcttcagcaagaccccacaggaggattacgtggaggctgcagtgaagcagtccttgcaggtgcacctgtcgggggcccctggagacatccttatcttcatgcctggccaagaggacattgaggtgacctcagaccagattgtggagcatctggaggaactggagaacgcgcctgccctggctgtgctgcccatctactctcagctgccttctgacctccaggccaaaatcttccagaaggctccagatggcgttcggaagtgcatcgttgccaccaatattgccgagacgtctctcactgttgacggcatcatgtttgttatcgattctggttattgcaaattaaaggtcttcaaccccaggattggcatggatgctctgcagatctatcccattagccaggccaatgccaaccagcggtcagggcgagccggcaggacgggcccaggtcagtgtttcaggctctacacccagagcgcctacaagaatgagctcctgaccaccacagtgcccgagatccagaggactaacctggccaacgtggtgctgctgctcaagtccctcggggtgcaggacctgctgcagttccacttcatggacccgcccccggaggacaacatgctcaactctatgtatcagctctggatcctcggggccctggacaacacaggtggtctgacctctaccgggcggctgatggtggagttcccgctggaccctgccctgtccaagatgctcatcgtgtcctgtgacatgggctgcagctccgagatcctgctcatcgtttccatgctctcggtcccagccatcttctacaggcccaagggtcgagaggaggagagtgatcaaatccgggagaagttcgctgttcctgagagcgatcatttgacctacctgaatgtttacctgcagtggaagaacaataattactccaccatctggtgtaacgatcatttcatccatgctaaggccatgcggaaggtagagtggtggatgagcaggatgttgggatgaggggagggtcgagaggaaaggagggctccctcctggtgcctccgtctcctgccctaggtccgggaggtgcgagctcaactcaaggacatcatggtgcagcagcggatgagcctggcctcgtgtggcactgactgggacatcgtcaggaagtgcatctgtgctgcctatttccaccaagcagccaagctcaagggaatcggggagtacgtgaacatccgcacagggatgccctgccacttgcaccccaccagctccctttttggaatgggctgaaaaaaaaccccaaaaacctgttgatcccaatacactatcctatacacatataccattgctttaacanacattcaagccgacagggagcgagctcgatgtaa

SEQ ID NO: 459080 - DNA, 558 bp, Homo sapiens
gtatttgggctgtcgtgcggcgaggggtcatgggctccccttgcttctttcctggcctggagtagtagatcttcgtagacctgacactgcccagtgggctgcgcttctcctgctcctgccgccgggcccgctttggtctgtgagctgaggctgtccccagagaggatggcagcaggtattgggtcctcagccttctggcgggagccctgaggctgcggacaaagccctttcatctgaggactttcatctgtgcatatcacggccccccagggcagttcctgctggaccagactctctggcagaggaggtggagttcttccatgcaggagcacggcatggcgggagcggggctgcagagtatccgaggtgctgccggggcagcgggaggtggctggacccatcgcatctaaaactggcccaggacacttggtgtatgcgtgacttggctgtggctgtcttttttaatccttgtgtaaagcagcaaaaaagacctaaagggaattgtaatttggttataattcaggatttggaaataaatttattatttgtaaaacatga

SEQ ID NO: 459081 - DNA, 1102 bp, Homo sapiens
tcccctccttttcctgcccccagactagaggcgggatgtagtctcttaggctaagagtgattggtcacaaggagactcggaagtgtctgatcagagccccagaggaggccttgagagcctgttggcgtaccgttccacacttggatccaggaatcgggcgtgttccaggctgctctctatggtagctttgggcggatagagggggcgcgcaaagtattaagggacaataatggccgctttcaaggtgtggattttggctccttgagcctgtctgagcgaggggtggcagcgccggcgccccagaatccgggacagaagggtcccaagagtcgcgcttggtgagagaaatcccagatcctgtgatgggggacaccagtgaggatgcctcgatccatcgattggaaggcactgatctggactgtcaggttggtggtcttatttgcaagtccaaaagtgcggccagcgagcagcatgtcttcaaggctcctgctccccgcccttcattactcggactggacttgctggcttccctgaaacggagagagcgagaggagaaggacgatggggaggacaagaagaagtccaaagtctcctcctacaaggactgggaagagagcaaggatgaccagaaggatgctgaggaagagggcggtgaccaggctggccaaaatatccggaaagacagacattatcggtctgctcgggtagagactccatcccatccgggtggtgtgagcgaagagttttgggaacgcagtcggcagagagagcgggagcggcgggaacatggtgtctatgcctcgtccaaagaagaaaaggattggaagaaggaataatactatcgtgttcattatagctactctcataagcctcaaaaccatccctcttaggcgaatatgtgcctatggccatactagtcttgcgcctgggaagcagggggggctaggcttactagtctcaatctccaagcatatggctaaatacggtcataccaaacttatccaggtaaatatcggcccatttttacccggtgttccaaatatggtcaacccaggtatttgtccctattgcacacacactttgcccctttcgccaacccttt

SEQ ID NO: 459082 - DNA, 284 bp, Homo sapiens
aggttcctgaggcctctggttgcagttcagactcgggttgtagttcatgctgttcttgctctgctgagggtggcttggggttttctgggcagtggctccattgcttcagtcttcatgattggtaagaattgaataggcccatttgtcagctttggcttgtgtttcctcgggggtggtgctgatgggactgggggacaggagccaagggtccccaccatgggggcctccgagccgcctcttctctcaggtagtggctcggcgctcagacctgaagctcatcgtca

SEQ ID NO: 459083 - DNA, 422 bp, Homo sapiens
cttctcttcataagtcttactaggcccacagatagaagttaggagtcccctctatcaagtccttaggcccgacagctgcggggcctggtgttgggagagctggaggcttgaggattggaatgtggctcggtgccaccagcactctgggggagtttaccacctgcggggtgaagcctgctctcccgtgggattgattttccattgctcgcagtcatgtggcaggatggagcagactgacctttttccttttcaggctcagcacaaacactgggaactggcggggaccaaactgggagatataatgggcgtcaagaaggaggaagagccagataaagctgtgacggaggatgggaaggtggactacaggtgggcagcctcagccagcagcacatcagccttgctccaaagatgggggcccatgt

SEQ ID NO: 459084 - DNA, 887 bp, Homo sapiens
gagcccctcccagcctgatacctgtataagggcaaagttcttcctttgtcctggtgtggttctgcagatctgggcttccgccaaaggctgtgtcaagagtgttaagggatggggtcgctgcccaaatgggtgttgttttcctgatgtggctgcctgttgtgtctcctccctagggaatcggggagtacgtgaacatccgcacagggatgccctgccacttgcaccccaccagctccctttttggaatgggctacaccccagattacatagtgtatcacgagttggtcatgaccaccaaggagtatatgcagtgtgtgaccgctgtggacggggagtggctggcggagctgggccccatgttctatagcgtgaaacaggcgggcaagtcacggcaggtgaggattctgtgctcttcgcaggggtgctgtttgcctgtggggtcggtgttccctccgcttggtattgaagacttgcggtcatccaacccacttacttctctctgcaaacataaaggctgtgatccagcaggctgggtctgtctgattccccaccacccactccagttgtttggtaggctgagcctttaaaaacaaaaccaaaaaactcattattgaaaagtccaaatattcatgaaagtgggaaaaacagtacaacaggccaccatgaattcgttgccttgcctctataattgtcaacgtttgttcaatttcactattcctaccccactccacacacatccattttttttttctggaatattttaaagcttatctcatacattattcatccataaatacttgagtatgtgtctctgactaaaaggacttaaaattttaaatataacctctgtgccgttatcactcataaaaaaatgaatacttaatgtc

SEQ ID NO: 459085 - DNA, 4366 bp, Homo sapiens
tcccctccttttcctgcccccagactagaggcgggatgtagtctcttaggctaagagtgattggtcacaaggagactcggaagtgtctgatcagagccccagaggaggccttgagagcctgttggcgtaccgttccacacttggatccaggaatcgggcgtgttccaggctgctctctatggtagctttgggcggatagagggggcgcgcaaagtattaagggacaataatggccgctttcaaggtgtggattttggctccttgagcctgtctgagcgaggggtggcagcgccggcgccccagaatccgggacagaagggtcccaagagtcgcgcttggtgagagaaatcccagatcctgtgatgggggacaccagtgaggatgcctcgatccatcgattggaaggcactgatctggactgtcaggttggtggtcttatttgcaagtccaaaagtgcggccagcgagcagcatgtcttcaaggctcctgctccccgcccttcattactcggactggacttgctggcttccctgaaacggagagagcgagaggagaaggacgatggggaggacaagaagaagtccaaagtctcctcctacaaggactgggaagagagcaaggatgaccagaaggatgctgaggaagagggcggtgaccaggctggccaaaatatccggaaagacagacattatcggtctgctcgggtagagactccatcccatccgggtggtgtgagcgaagagttttgggaacgcagtcggcagagagagcgggagcggcgggaacatggtgtctatgcctcgtccaaagaagaaaaggattggaagaaggagaaatcgcgggatcgagactatgaccgcaagagggacagagatgagcgggatagaagtaggcacagcagcagatcagagcgagatggagggtcagagcgtagcagcagaagaaatgaacccgagagcccacgacatcgacctaaagatgcagccaccccttcaaggtctacctgggaggaagaggacagtggctatggctcctcaaggcgctcacagtgggaatcgccctccccgacgccttcctatcgggattctgagcggagccatcggctgtccactcgagatcgagacaggtctgtgaggggcaagtactcggatgacacgcctctgccaactccctcctacaaatataacgagtgggccgatgacagaagacacttggggtccaccccgcgtctgtccaggggccgaggaagacgtgaggagggcgaagaaggaatttcatttgacacggaggaggagcggcagcagtgggaagatgaccagaggcaagccgatcgggattggtacatgatggacgagggctatgacgagttccacaacccgctggcctactcctccgaggactacgtgaggaggcgggagcagcacctgcataaacagaagcagaagcgcatttcagctcagcggagacagatcaatgaggataacgagcgctgggagacaaaccgcatgctcaccagtggggtggtccatcggctggaggtggatgaggactttgaagaggacaacgcggccaaggtgcatctgatggtgcacaatctggtgcctccctttctggatgggcgcattgtcttcaccaagcagccggagccggtgattccagtgaaggatgccacttctgacctggccatcattgctcggaaaggcagccagacagtgcggaagcacagggagcagaaggagcgcaagaaggctcagcacaaacactgggaactggcggggaccaaactgggagatataatgggcgtcaagaaggaggaagagccagataaagctgtgacggaggatgggaaggtggactacaggacagagcagaagtttgcagatcacatgaagagaaagagcgaagccagcagtgaatttgcaaagaagaagtccatcctggagcagaggcagtacctgcccatctttgcagtgcagcaggagctgctcactattatcagagacaacagcatcgtgatcgtggttggggagacggggagtggtaagaccactcagctgacgcagtacctgcatgaagatggttacacggactatgggatgattgggtgtacccagccccggcgtgtagctgccatgtcagtggccaagagagtcagtgaagagatggggggaaaccttggcgaggaggtgggctatgccatccgctttgaagactgcacttcagagaacaccttgatcaaatacatgactgacgggatcctgctccgagagtccctccgggaagccgacctggatcactacagtgccatcatcatggacgaggcccacgagcgctccctcaacactgacgtgctctttgggctgctccgggaggtagtggctcggcgctcagacctgaagctcatcgtcacatcagccacgatggatgcggagaagtttgctgccttttttgggaatgtccccatcttccacatccctggccgtaccttccctgttgacatcctcttcagcaagaccccacaggaggattacgtggaggctgcagtgaagcagtccttgcaggtgcacctgtcgggggcccctggagacatccttatcttcatgcctggccaagaggacattgaggtgacctcagaccagattgtggagcatctggaggaactggagaacgcgcctgccctggctgtgctgcccatctactctcagctgccttctgacctccaggccaaaatcttccagaaggctccagatggcgttcggaagtgcatcgttgccaccaatattgccgagacgtctctcactgttgacggcatcatgtttgttatcgattctggttattgcaaattaaaggtcttcaaccccaggattggcatggatgctctgcagatctatcccattagccaggccaatgccaaccagcggtcagggcgagccggcaggacgggcccaggtcagtgtttcaggctctacacccagagcgcctacaagaatgagctcctgaccaccacagtgcccgagatccagaggactaacctggccaacgtggtgctgctgctcaagtccctcggggtgcaggacctgctgcagttccacttcatggacccgcccccggaggacaacatgctcaactctatgtatcagctctggatcctcggggccctggacaacacaggtggtctgacctctaccgggcggctgatggtggagttcccgctggaccctgccctgtccaagatgctcatcgtgtcctgtgacatgggctgcagctccgagatcctgctcatcgtttccatgctctcggtcccagccatcttctacaggcccaagggtcgagaggaggagagtgatcaaatccgggagaagttcgctgttcctgagagcgatcatttgacctacctgaatgtttacctgcagtggaagaacaataattactccaccatctggtgtaacgatcatttcatccatgctaaggccatgcggaaggtccgggaggtgcgagctcaactcaaggacatcatggtgcagcagcggatgagcctggcctcgtgtggcactgactgggacatcgtcaggaagtgcatctgtgctgcctatttccaccaagcagccaagctcaagggaatcggggagtacgtgaacatccgcacagggatgccctgccacttgcaccccaccagctccctttttggaatgggctacaccccagattacatagtgtatcacgagttggtcatgaccaccaaggagtatatgcagtgtgtgaccgctgtggacggggagtggctggcggagctgggccccatgttctatagcgtgaaacaggcgggcaagtcacggcaggagaaccgtcgtcgggccaaagaggaagcctctgccatggaggaggagatggcgctggccgaggagcagctgcgagcccggcggcaggagcaggagaagcgcagccccctgggcagtgtcaggtctacgaagatctacactccaggccggaaagagcaaggggagcccatgacccctcgccgcacgccagcccgctttggtctgtgagctgaggctgtccccagagaggatggcagcagggcagttcctgctggaccagactctctggcagaggaggtggagttcttccatgcaggagcacggcatggcgggagcggggctgcagagtatccgaggtgctgccggggcagcgggaggtggctggacccatcgcatctaaaactggcccaggacacttggtgtatgcgtgacttggctgtggctgtcttttttaatccttgtgtaaagcagcaaaaaagacctaaagggaattgtaatttggttataattcaggatttggaaataaatttattatttgtaaaacatga

SEQ ID NO: 459086 - DNA, 4555 bp, Homo sapiens
tcccctccttttcctgcccccagactagaggcgggatgtagtctcttaggctaagagtgattggtcacaaggagactcggaagtgtctgatcagagccccagaggaggccttgagagcctgttggcgtaccgttccacacttggatccaggaatcgggcgtgttccaggctgctctctatggtagctttgggcggatagagggggcgcgcaaagtattaagggacaataatggccgctttcaaggtgtggattttggctccttgagcctgtctgagcgaggggtggcagcgccggcgccccagaatccgggacagaagggtcccaagagtcgcgcttggtgagagaaatcccagatcctgtgatgggggacaccagtgaggatgcctcgatccatcgattggaaggcactgatctggactgtcaggttggtggtcttatttgcaagtccaaaagtgcggccagcgagcagcatgtcttcaaggctcctgctccccgcccttcattactcggactggacttgctggcttccctgaaacggagagagcgagaggagaaggacgatggggaggacaagaagaagtccaaagtctcctcctacaaggactgggaagagagcaaggatgaccagaaggatgctgaggaagagggcggtgaccaggctggccaaaatatccggaaagacagacattatcggtctgctcgggtagagactccatcccatccgggtggtgtgagcgaagagttttgggaacgcagtcggcagagagagcgggagcggcgggaacatggtgtctatgcctcgtccaaagaagaaaaggattggaagaaggagaaatcgcgggatcgagactatgaccgcaagagggacagagatgagcgggatagaagtaggcacagcagcagatcagagcgagatggagggtcagagcgtagcagcagaagaaatgaacccgagagcccacgacatcgacctaaagatgcagccaccccttcaaggtctacctgggaggaagaggacagtggctatggctcctcaaggcgctcacagtgggaatcgccctccccgacgccttcctatcgggattctgagcggagccatcggctgtccactcgagatcgagacaggtctgtgaggggcaagtactcggatgacacgcctctgccaactccctcctacaaatataacgagtgggccgatgacagaagacacttggggtccaccccgcgtctgtccaggggccgaggaagacgtgaggagggcgaagaaggaatttcatttgacacggaggaggagcggcagcagtgggaagatgaccagaggcaagccgatcgggattggtacatgatggacgagggctatgacgagttccacaacccgctggcctactcctccgaggactacgtgaggaggcgggagcagcacctgcataaacagaagcagaagcgcatttcagctcagcggagacagatcaatgaggataacgagcgctgggagacaaaccgcatgctcaccagtggggtggtccatcggctggaggtggatgaggactttgaagaggacaacgcggccaaggtgcatctgatggtgcacaatctggtgcctccctttctggatgggcgcattgtcttcaccaagcagccggagccggtgattccagtgaaggatgccacttctgacctggccatcattgctcggaaaggcagccagacagtgcggaagcacagggagcagaaggagcgcaagaaggctcagcacaaacactgggaactggcggggaccaaactgggagatataatgggcgtcaagaaggaggaagagccagataaagctgtgacggaggatgggaaggtggactacaggacagagcagaagtttgcagatcacatgaagagaaagagcgaagccagcagtgaatttgcaaagaagaagtccatcctggagcagaggcagtacctgcccatctttgcagtgcagcaggagctgctcactattatcagagacaacagcatcgtgatcgtggttggggagacggggagtggtaagaccactcagctgacgcagtacctgcatgaagatggttacacggactatgggatgattgggtgtacccagccccggcgtgtagctgccatgtcagtggccaagagagtcagtgaagagatggggggaaaccttggcgaggaggtgggctatgccatccgctttgaagactgcacttcagagaacaccttgatcaaatacatgactgacgggatcctgctccgagagtccctccgggaagccgacctggatcactacagtgccatcatcatggacgaggcccacgagcgctccctcaacactgacgtgctctttgggctgctccgggaggtagtggctcggcgctcagacctgaagctcatcgtcacatcagccacgatggatgcggagaagtttgctgccttttttgggaatgtccccatcttccacatccctggccgtaccttccctgttgacatcctcttcagcaagaccccacaggaggattacgtggaggctgcagtgaagcagtccttgcaggtgcacctgtcgggggcccctggagacatccttatcttcatgcctggccaagaggacattgaggtgcgtgccttggtcacgactgtgatgagcgggtgtgtcttgcatatgagaggttagggttccagtgtctcacagctcctccctgggctctcaggtgacctcagaccagattgtggagcatctggaggaactggagaacgcgcctgccctggctgtgctgcccatctactctcagctgccttctgacctccaggccaaaatcttccagaaggctccagatggcgttcggaagtgcatcgttgccaccaatattgccgagacgtctctcactgttgacggcatcatgtttgttatcgattctggttattgcaaattaaaggtcttcaaccccaggattggcatggatgctctgcagatctatcccattagccaggccaatgccaaccagcggtcagggcgagccggcaggacgggcccaggtcagtgtttcaggctctacacccagagcgcctacaagaatgagctcctgaccaccacagtgcccgagatccagaggactaacctggccaacgtggtgctgctgctcaagtccctcggggtgcaggacctgctgcagttccacttcatggacccgcccccggaggacaacatgctcaactctatgtatcagctctggatcctcggggccctggacaacacaggtggtctgacctctaccgggcggctgatggtggagttcccgctggaccctgccctgtccaagatgctcatcgtgtcctgtgacatgggctgcagctccgagatcctgctcatcgtttccatgctctcggtcccagccatcttctacaggcccaagggtcgagaggaggagagtgatcaaatccgggagaagttcgctgttcctgagagcgatcatttgacctacctgaatgtttacctgcagtggaagaacaataattactccaccatctggtgtaacgatcatttcatccatgctaaggccatgcggaaggtccgggaggtgcgagctcaactcaaggacatcatggtgcagcagcggatgagcctggcctcgtgtggcactgactgggacatcgtcaggaagtgcatctgtgctgcctatttccaccaagcagccaagctcaagggaatcggggagtacgtgaacatccgcacagggatgccctgccacttgcaccccaccagctccctttttggaatgggctacaccccagattacatagtgtatcacgagttggtcatgaccaccaaggagtatatgcagtgtgtgaccgctgtggacggggagtggctggcggagctgggccccatgttctatagcgtgaaacaggcgggcaagtcacggcaggagaaccgtcgtcgggccaaagaggaagcctctgccatggaggaggagatggcgctggccgaggagcagctgcgagcccggcggcaggagcaggagaagcgcagccccctgggcagtgtcaggtctacgaagatctacactccaggccggaaagagcaaggggagcccatgacccctcgccgcacgccagcccgctttggtctgtgagctgaggctgtccccagagaggatggcagcaggtattgggtcctcagccttctggcgggagccctgaggctgcggacaaagccctttcatctgaggactttcatctgtgcatatcacggccccccagggcagttcctgctggaccagactctctggcagaggaggtggagttcttccatgcaggagcacggcatggcgggagcggggctgcagagtatccgaggtgctgccggggcagcgggaggtggctggacccatcgcatctaaaactggcccaggacacttggtgtatgcgtgacttggctgtggctgtcttttttaatccttgtgtaaagcagcaaaaaagacctaaagggaattgtaatttggttataattcaggatttggaaataaatttattatttgtaaaacatga

SEQ ID NO: 459087 - DNA, 2915 bp, Homo sapiens
tcccctccttttcctgcccccagactagaggcgggatgtagtctcttaggctaagagtgattggtcacaaggagactcggaagtgtctgatcagagccccagaggaggccttgagagcctgttggcgtaccgttccacacttggatccaggaatcgggcgtgttccaggctgctctctatggtagctttgggcggatagagggggcgcgcaaagtattaagggacaataatggccgctttcaaggtgtggattttggctccttgagcctgtctgagcgaggggtggcagcgccggcgccccagaatccgggacagaagggtcccaagagtcgcgcttggtgagagaaatcccagatcctgtgatgggggacaccagtgaggatgcctcgatccatcgattggaaggcactgatctggactgtcaggttggtggtcttatttgcaagtccaaaagtgcggccagcgagcagcatgtcttcaaggctcctgctccccgcccttcattactcggactggacttgctggcttccctgaaacggagagagcgagaggagaaggacgatggggaggacaagaagaagtccaaagtctcctcctacaaggactgggaagagagcaaggatgaccagaaggatgctgaggaagagggcggtgaccaggctggccaaaatatccggaaagacagacattatcggtctgctcgggtagagactccatcccatccgggtggtgtgagcgaagagttttgggaacgcagtcggcagagagagcgggagcggcgggaacatggtgtctatgcctcgtccaaagaagaaaaggattggaagaaggagaaatcgcgggatcgagactatgaccgcaagagggacagaggatggatgcggagaagtttgctgccttttttgggaatgtccccatcttccacatccctggccgtaccttccctgttgacatcctcttcagcaagaccccacaggaggattacgtggaggctgcagtgaagcagtccttgcaggtgcacctgtcgggggcccctggagacatccttatcttcatgcctggccaagaggacattgaggtgacctcagaccagattgtggagcatctggaggaactggagaacgcgcctgccctggctgtgctgcccatctactctcagctgccttctgacctccaggccaaaatcttccagaaggctccagatggcgttcggaagtgcatcgttgccaccaatattgccgagacgtctctcactgttgacggcatcatgtttgttatcgattctggttattgcaaattaaaggtcttcaaccccaggattggcatggatgctctgcagatctatcccattagccaggccaatgccaaccagcggtcagggcgagccggcaggacgggcccaggtcagtgtttcaggctctacacccagagcgcctacaagaatgagctcctgaccaccacagtgcccgagatccagaggactaacctggccaacgtggtgctgctgctcaagtccctcggggtgcaggacctgctgcagttccacttcatggacccgcccccggaggacaacatgctcaactctatgtatcagctctggatcctcggggccctggacaacacaggtggtctgacctctaccgggcggctgatggtggagttcccgctggaccctgccctgtccaagatgctcatcgtgtcctgtgacatgggctgcagctccgagatcctgctcatcgtttccatgctctcggtcccagccatcttctacaggcccaagggtcgagaggaggagagtgatcaaatccgggagaagttcgctgttcctgagagcgatcatttgacctacctgaatgtttacctgcagtggaagaacaataattactccaccatctggtgtaacgatcatttcatccatgctaaggccatgcggaaggtccgggaggtgcgagctcaactcaaggacatcatggtgcagcagcggatgagcctggcctcgtgtggcactgactgggacatcgtcaggaagtgcatctgtgctgcctatttccaccaagcagccaagctcaagggaatcggggagtacgtgaacatccgcacagggatgccctgccacttgcaccccaccagctccctttttggaatgggctacaccccagattacatagtgtatcacgagttggtcatgaccaccaaggagtatatgcagtgtgtgaccgctgtggacggggagtggctggcggagctgggccccatgttctatagcgtgaaacaggcgggcaagtcacggcaggagaaccgtcgtcgggccaaagaggaagcctctgccatggaggaggagatggcgctggccgaggagcagctgcgagcccggcggcaggagcaggagaagcgcagccccctgggcagtgtcaggtctacgaagatctacactccaggccggaaagagcaaggggagcccatgacccctcgccgcacgccagcccgctttggtctgtgagctgaggctgtccccagagaggatggcagcaggtattgggtcctcagccttctggcgggagccctgaggctgcggacaaagccctttcatctgaggactttcatctgtgcatatcacggccccccagggcagttcctgctggaccagactctctggcagaggaggtggagttcttccatgcaggagcacggcatggcgggagcggggctgcagagtatccgaggtgctgccggggcagcgggaggtggctggacccatcgcatctaaaactggcccaggacacttggtgtatgcgtgacttggctgtggctgtcttttttaatccttgtgtaaagcagcaaaaaagacctaaagggaattgtaatttggttataattcaggatttggaaataaatttattatttgtaaaacatga

SEQ ID NO: 459088 - DNA, 2949 bp, Homo sapiens
tactaggcccacagatagaagttaggagtcccctctatcaagtccttaggcccgacagctgcggggcctggtgttgggagagctggaggcttgaggattggaatgtggctcggtgccaccagcactctgggggagtttaccacctgcggggtgaagcctgctctcccgtgggattgattttccattgctcgcagtcatgtggcaggatggagcagactgacctttttccttttcaggctcagcacaaacactgggaactggcggggaccaaactgggagatataatgggcgtcaagaaggaggaagagccagataaagctgtgacggaggatgggaaggtggactacaggacagagcagaagtttgcagatcacatgaagagaaagagcgaagccagcagtgaatttgcaaagaagaagtccatcctggagcagaggcagtacctgcccatctttgcagtgcagcaggagctgctcactattatcagagacaacagcatcgtgatcgtggttggggagacggggagtggtaagaccactcagctgacgcagtacctgcatgaagatggttacacggactatgggatgattgggtgtacccagccccggcgtgtagctgccatgtcagtggccaagagagtcagtgaagagatggggggaaaccttggcgaggaggtgggctatgccatccgctttgaagactgcacttcagagaacaccttgatcaaatacatgactgacgggatcctgctccgagagtccctccgggaagccgacctggatcactacagtgccatcatcatggacgaggcccacgagcgctccctcaacactgacgtgctctttgggctgctccgggaggtagtggctcggcgctcagacctgaagctcatcgtcacatcagccacgatggatgcggagaagtttgctgccttttttgggaatgtccccatcttccacatccctggccgtaccttccctgttgacatcctcttcagcaagaccccacaggaggattacgtggaggctgcagtgaagcagtccttgcaggtgcacctgtcgggggcccctggagacatccttatcttcatgcctggccaagaggacattgaggtgacctcagaccagattgtggagcatctggaggaactggagaacgcgcctgccctggctgtgctgcccatctactctcagctgccttctgacctccaggccaaaatcttccagaaggctccagatggcgttcggaagtgcatcgttgccaccaatattgccgagacgtctctcactgttgacggcatcatgtttgttatcgattctggttattgcaaattaaaggtcttcaaccccaggattggcatggatgctctgcagatctatcccattagccaggccaatgccaaccagcggtcagggcgagccggcaggacgggcccaggtcagtgtttcaggctctacacccagagcgcctacaagaatgagctcctgaccaccacagtgcccgagatccagaggactaacctggccaacgtggtgctgctgctcaagtccctcggggtgcaggacctgctgcagttccacttcatggacccgcccccggaggacaacatgctcaactctatgtatcagctctggatcctcggggccctggacaacacaggtggtctgacctctaccgggcggctgatggtggagttcccgctggaccctgccctgtccaagatgctcatcgtgtcctgtgacatgggctgcagctccgagatcctgctcatcgtttccatgctctcggtcccagccatcttctacaggcccaagggtcgagaggaggagagtgatcaaatccgggagaagttcgctgttcctgagagcgatcatttgacctacctgaatgtttacctgcagtggaagaacaataattactccaccatctggtgtaacgatcatttcatccatgctaaggccatgcggaaggtccgggaggtgcgagctcaactcaaggacatcatggtgcagcagcggatgagcctggcctcgtgtggcactgactgggacatcgtcaggaagtgcatctgtgctgcctatttccaccaagcagccaagctcaagggaatcggggagtacgtgaacatccgcacagggatgccctgccacttgcaccccaccagctccctttttggaatgggctacaccccagattacatagtgtatcacgagttggtcatgaccaccaaggagtatatgcagtgtgtgaccgctgtggacggggagtggctggcggagctgggccccatgttctatagcgtgaaacaggcgggcaagtcacggcaggagaaccgtcgtcgggccaaagaggaagcctctgccatggaggaggagatggcgctggccgaggagcagctgcgagcccggcggcaggagcaggagaagcgcagccccctgggcagtgtcaggtctacgaagatctacactccaggccggaaagagcaaggggagcccatgacccctcgccgcacgccagcccgctttggtctgtgagctgaggctgtccccagagaggatggcagcaggtattgggtcctcagccttctggcgggagccctgaggctgcggacaaagccctttcatctgaggactttcatctgtgcatatcacggccccccagggcagttcctgctggaccagactctctggcagaggaggtggagttcttccatgcaggagcacggcatggcgggagcggggctgcagagtatccgaggtgctgccggggcagcgggaggtggctggacccatcgcatctaaaactggcccaggacacttggtgtatgcgtgacttggctgtggctgtcttttttaatccttgtgtaaagcagcaaaaaagacctaaagggaattgtaatttggttataattcaggatttggaaataaatttattatttgtaaaacatga

SEQ ID NO: 459089 - DNA, 3799 bp, Homo sapiens
  misc_feature (3765)..(3765): n is a, c, g, or t
tcccctccttttcctgcccccagactagaggcgggatgtagtctcttaggctaagagtgattggtcacaaggagactcggaagtgtctgatcagagccccagaggaggccttgagagcctgttggcgtaccgttccacacttggatccaggaatcgggcgtgttccaggctgctctctatggtagctttgggcggatagagggggcgcgcaaagtattaagggacaataatggccgctttcaaggtgtggattttggctccttgagcctgtctgagcgaggggtggcagcgccggcgccccagaatccgggacagaagggtcccaagagtcgcgcttggtgagagaaatcccagatcctgtgatgggggacaccagtgaggatgcctcgatccatcgattggaaggcactgatctggactgtcaggttggtggtcttatttgcaagtccaaaagtgcggccagcgagcagcatgtcttcaaggctcctgctccccgcccttcattactcggactggacttgctggcttccctgaaacggagagagcgagaggagaaggacgatggggaggacaagaagaagtccaaagtctcctcctacaaggactgggaagagagcaaggatgaccagaaggatgctgaggaagagggcggtgaccaggctggccaaaatatccggaaagacagacattatcggtctgctcgggtagagactccatcccatccgggtggtgtgagcgaagagttttgggaacgcagtcggcagagagagcgggagcggcgggaacatggtgtctatgcctcgtccaaagaagaaaaggattggaagaaggagaaatcgcgggatcgagactatgaccgcaagagggacagagatgagcgggatagaagtaggcacagcagcagatcagagcgagatggagggtcagagcgtagcagcagaagaaatgaacccgagagcccacgacatcgacctaaagatgcagccaccccttcaaggtctacctgggaggaagaggacagtggctatggctcctcaaggcgctcacagtgggaatcgccctccccgacgccttcctatcgggattctgagcggagccatcggctgtccactcgagatcgagacaggtctgtgaggggcaagtactcggatgacacgcctctgccaactccctcctacaaatataacgagtgggccgatgacagaagacacttggggtccaccccgcgtctgtccaggggccgaggaagacgtgaggagggcgaagaaggaatttcatttgacacggaggaggagcggcagcagtgggaagatgaccagaggcaagccgatcgggattggtacatgatggacgagggctatgacgagttccacaacccgctggcctactcctccgaggactacgtgaggaggcgggagcagcacctgcataaacagaagcagaagcgcatttcagctcagcggagacagatcaatgaggataacgagcgctgggagacaaaccgcatgctcaccagtggggtggtccatcggctggaggtggatgaggactttgaagaggacaacgcggccaaggtgcatctgatggtgcacaatctggtgcctccctttctggatgggcgcattgtcttcaccaagcagccggagccggtgattccagtgaaggatgccacttctgacctggccatcattgctcggaaaggcagccagacagtgcggaagcacagggagcagaaggagcgcaagaaggctcagcacaaacactgggaactggcggggaccaaactgggagatataatgggcgtcaagaaggaggaagagccagataaagctgtgacggaggatgggaaggtggactacaggacagagcagaagtttgcagatcacatgaagagaaagagcgaagccagcagtgaatttgcaaagaagaagtccatcctggagcagaggcagtacctgcccatctttgcagtgcagcaggagctgctcactattatcagagacaacagcatcgtgatcgtggttggggagacggggagtggtaagaccactcagctgacgcagtacctgcatgaagatggttacacggactatgggatgattgggtgtacccagccccggcgtgtagctgccatgtcagtggccaagagagtcagtgaagagatggggggaaaccttggcgaggaggtgggctatgccatccgctttgaagactgcacttcagagaacaccttgatcaaatacatgactgacgggatcctgctccgagagtccctccgggaagccgacctggatcactacagtgccatcatcatggacgaggcccacgagcgctccctcaacactgacgtgctctttgggctgctccgggaggtagtggctcggcgctcagacctgaagctcatcgtcacatcagccacgatggatgcggagaagtttgctgccttttttgggaatgtccccatcttccacatccctggccgtaccttccctgttgacatcctcttcagcaagaccccacaggaggattacgtggaggctgcagtgaagcagtccttgcaggtgcacctgtcgggggcccctggagacatccttatcttcatgcctggccaagaggacattgaggtgacctcagaccagattgtggagcatctggaggaactggagaacgcgcctgccctggctgtgctgcccatctactctcagctgccttctgacctccaggccaaaatcttccagaaggctccagatggcgttcggaagtgcatcgttgccaccaatattgccgagacgtctctcactgttgacggcatcatgtttgttatcgattctggttattgcaaattaaaggtcttcaaccccaggattggcatggatgctctgcagatctatcccattagccaggccaatgccaaccagcggtcagggcgagccggcaggacgggcccaggtcagtgtttcaggctctacacccagagcgcctacaagaatgagctcctgaccaccacagtgcccgagatccagaggactaacctggccaacgtggtgctgctgctcaagtccctcggggtgcaggacctgctgcagttccacttcatggacccgcccccggaggacaacatgctcaactctatgtatcagctctggatcctcggggccctggacaacacaggtggtctgacctctaccgggcggctgatggtggagttcccgctggaccctgccctgtccaagatgctcatcgtgtcctgtgacatgggctgcagctccgagatcctgctcatcgtttccatgctctcggtcccagccatcttctacaggcccaagggtcgagaggaggagagtgatcaaatccgggagaagttcgctgttcctgagagcgatcatttgacctacctgaatgtttacctgcagtggaagaacaataattactccaccatctggtgtaacgatcatttcatccatgctaaggccatgcggaaggtccgggaggtgcgagctcaactcaaggacatcatggtgcagcagcggatgagcctggcctcgtgtggcactgactgggacatcgtcaggaagtgcatctgtgctgcctatttccaccaagcagccaagctcaagggaatcggggagtacgtgaacatccgcacagggatgccctgccacttgcaccccaccagctccctttttggaatgggctgaaaaaaaaccccaaaaacctgttgatcccaatacactatcctatacacatataccattgctttaacanacattcaagccgacagggagcgagctcgatgtaa

SEQ ID NO: 459090 - DNA, 2300 bp, Homo sapiens
tcccctccttttcctgcccccagactagaggcgggatgtagtctcttaggctaagagtgattggtcacaaggagactcggaagtgtctgatcagagccccagaggaggccttgagagcctgttggcgtaccgttccacacttggatccaggaatcgggcgtgttccaggctgctctctatggtagctttgggcggatagagggggcgcgcaaagtattaagggacaataatggccgctttcaaggtgtggattttggctccttgagcctgtctgagcgaggggtggcagcgccggcgccccagaatccgggacagaagggtcccaagagtcgcgcttggtgagagaaatcccagatcctgtgatgggggacaccagtgaggatgcctcgatccatcgattggaaggcactgatctggactgtcaggttggtggtcttatttgcaagtccaaaagtgcggccagcgagcagcatgtcttcaaggctcctgctccccgcccttcattactcggactggacttgctggcttccctgaaacggagagagcgagaggagaaggacgatggggaggacaagaagaagtccaaagtctcctcctacaaggactgggaagagagcaaggatgaccagaaggatgctgaggaagagggcggtgaccaggctggccaaaatatccggaaagacagacattatcggtctgctcgggtagagactccatcccatccgggtggtgtgagcgaagagttttgggaacgcagtcggcagagagagcgggagcggcgggaacatggtgtctatgcctcgtccaaagaagaaaaggattggaagaaggagaaatcgcgggatcgagactatgaccgcaagagggacagagatgagcgggatagaagtaggcacagcagcagatcagagcgagatggagggtcagagcgtagcagcagaagaaatgaacccgagagcccacgacatcgacctaaagatgcagccaccccttcaaggtctacctgggaggaagaggacagtggctatggctcctcaaggcgctcacagtgggaatcgccctccccgacgccttcctatcgggattctgagcggagccatcggctgtccactcgagatcgagacaggtctgtgaggggcaagtactcggatgacacgcctctgccaactccctcctacaaatataacgagtgggccgatgacagaagacacttggggtccaccccgcgtctgtccaggggccgaggaagacgtgaggagggcgaagaaggaatttcatttgacacggaggaggagcggcagcagtgggaagatgaccagaggcaagccgatcgggattggtacatgatggacgagggctatgacgagttccacaacccgctggcctactcctccgaggactacgtgaggaggcgggagcagcacctgcataaacagaagcagaagcgcatttcagctcagcggagacagatcaatgaggataacgagcgctgggagacaaaccgcatgctcaccagtggggtggtccatcggctggaggtggatgaggactttgaagaggacaacgcggccaaggtgcatctgatggtgcacaatctggtgcctccctttctggatgggcgcattgtcttcaccaagcagccggagccggtgattccagtgaaggatgccacttctgacctggccatcattgctcggaaaggcagccagacagtgcggaagcacagggagcagaaggagcgcaagaaggctcagcacaaacactgggaactggcggggaccaaactgggagatataatgggcgtcaagaaggaggaagagccagataaagctgtgacggaggatgggaaggtggactacaggacagagcagaagtttgcagatcacatgaagagaaagagcgaagccagcagtgaatttgcaaagaagaagtccatcctggagcagaggcagtacctgcccatctttgcagtgcagcaggagctgctcactattatcagagacaacagcatcgtgatcgtggttggggagacggggagtggtaagaccactcagctgacgcagtacctgcatgaagatggttacacggactatgggatgattgggtgtacccagccccggcgtgtagctgccatgtcagtggccaagagagtcagtgaagagatggggggaaaccttggcgaggaggtgagtgggcgtgggggctgagccatgtagttattccctagtagcttccacccatttttgctaaagggtgtgatctgctaagactcggaccccagtacggggtgtgctggtggt

SEQ ID NO: 459091 - DNA, 667 bp, Homo sapiens
tcccctccttttcctgcccccagactagaggcgggatgtagtctcttaggctaagagtgattggtcacaaggagactcggaagtgtctgatcagagccccagaggaggccttgagagcctgttggcgtaccgttccacacttggatccaggaatcgggcgtgttccaggctgctctctatggtagctttgggcggatagagggggcgcgcaaagtattaagggacaataatggccgctttcaaggtgtggattttggctccttgagcctgtctgagcgaggggtggcagcgccggcgccccagaatccgggacagaagggtcccaagagtcgcgcttggtgagagaaatcccagatcctgtgatgggggacaccagtgaggatgcctcgatccatcgattggaaggcactgatctggactgtcaggttggtggtcttatttgcaagtccaaaagtgcggccagcgagcagcatgtcttcaaggctcctgctccccgcccttcattactcggactggacttgctggcttccctgaaacggagagagcgagaggagaaggacgatggggaggacgtcaagttttaaaaaaaaaacaaaacaggcaaaaacaagtggtttttccaaaaactgcggttttaaaagctttgttttgatcattaaacattata

SEQ ID NO: 459092 - DNA, 2176 bp, Homo sapiens
ggcctgagcccgcgcgtcggcgccggcgccaaggggcggcctctagccacaccgagtccgccgcggcgtccagggtcggcagcaaccgcagccgagcccgagcgggtggcggcgccatggcgtgcgcggggctgctcaccgtgtgcctgctccggccgcccgcgccccagccccagccccagaccccgcggcacccccagctcgcgcccgacccggggcccgccggacacacgctcttccaggacgttttccgcagagcagacaagaatgatgatgggaagctctcatttgaggaattccagaattactttgccgatggggttctcagcctgggggagctgcaggaactgttcagcggcattgatgggcatctcaccgacaatttagaaacagaaaaactgtgtgactacttctcagagcacctgggtgtctaccggccggtgctggctgcattggaatcgctgaaccgtgcagtgctcgctgccatggatgccaccaagctggagtacgagagggcctccaaagtggaccagtttgtgacgcgcttcctgctgcgggagacggtgagccagctgcaagcccttcagagctcgctggagggggcgtcagataccctggaggcccaggcccatggctggcggtcagatgcagagagcgtggaggcgcagagcaggctctgcggcagccggcgggcaggacgccgagccctgaggagtgtcagccggtcatccacctggtcccccggctcttctgacacagggcgcagctcagaggccgagatgcagtggcggctccaggtgaaccgcctccaggagctcatcgaccagctcgagtgcaaggccccccggctggaacccctgcgtgaagaggacctggccaaggggcctgacttgcacatcctcatggcccagaggcaggtccaggtggcagaggaaggcctgcaggacttccaccgagccctgcgctgctatgtggacttcacaggggcccagagccattgtctgcatgtgtccgcccagaagatgctggacggtgcctccttcaccctgtatgagttctggcaggatgaggcctcctggagaaggcaccagcagtcgcctggcagcaaggccttccagcgcatcctcatcgaccacctgcgggccccggacaccctcaccactgtgttcttcccagcctcctggtggataatgaataacaactgagccagacctgcacacgccgagggccccgggaccctgcctgcctccctctggagccttctggactggccagcccagcgcaaagaccagggcttgtctcctcctggacttgggcctggtggaagggctctcagcccagggatcagggactgggctgcttgctttctatttattattgatttatttatccctgtattttattgtttgtcacttcagcctccaagctactttggcttctgcctggctcaggagacctggattctggtccctgctgtccctgcctggctgagcgacccagggcaggtcccgtccctgtctgggtgggcctcaggccatctggccgcctagcgagggtcctgctttcttcctgctgtcttgggaccaggcttctgctcctcctcagccagcggcagaagcagggctgatgctcagggaccccccaaccctcaaaccttgcctccgaggctgggcctgagctgggtgccccgtcgccctcccaggccactaggctctgactcttccagcacccatggatgtgccagaggcctctgggttggtttgcatgtcatttgcatatcgtttgcatgccctcatcccacccattctcagggcagtatgggaagccccaaggtgacctggccaagtagcaataatttgggtccagggtcacctattgcccccagaggcctctgaaccccaggctgggaccccagcacagaggcaataaaggcagtggtcccttccaaaaaaaaaaaaaacaagaaacaaaaaaaaacaaaaagaaaaaaacaaaaccagaaagaggggggcggcacacacccagagagacccacgactaccacatatagaagagtacagaagagaaaaacacaggcgccgaaaaaggagcagacgcaagtaagagacacgcaggaagaaccaaaacaggaaaaggaatgacagagggcgcaactacacacacagcgacacacccc

SEQ ID NO: 459093 - DNA, 2202 bp, Homo sapiens
ggcctgagcccgcgcgtcggcgccggcgccaaggggcggcctctagccacaccgagtccgccgcggcgtccagggtcggcagcaaccgcagccgagcccgagcgggtggcggcgccatggcgtgcgcggggctgctcaccgtgtgcctgctccggccgcccgcgccccagccccagccccagaccccgcggcacccccagctcgcgcccgacccggggcccgccggacacacgctcttccaggacgttttccgcagagcagacaagaatgatgatgggaagctctcatttgaggaattccagaattactttgccgatggggttctcagcctgggggagctgcaggaactgttcagcggcattgatgggcatctcaccgacaatttagaaacagaaaaactgtgtgactacttctcagagcacctgggtgtctaccggccggtgctggctgcattggaatcgctgaaccgtgcagtgctcgctgccatggatgccaccaagctggagtacgagagggcctccaaagtggaccagtttgtgacgcgcttcctgctgcgggagacggtgagccagctgcaagcccttcagagctcgctggagggggcgtcagataccctggaggcccaggcccatggctggcggtatgtaagggtgctgtcaacctgtggggctagtgcacaagcgcccattgtacccccattccaaatccccacagtcccagcatcctagagcctgcattttcgggcggggaagccatggcagggtagccatggcggggtgaaatgagactggctttggggctaggcctcggagtcccaggaggcttgtcttccccacccaggcttatcccgtcctggggccccagtcctcggccctgtgagcctcacttcctctaggtcagatgcagagagcgtggaggcgcagagcaggctctgcggcagccggcgggcaggacgccgagccctgaggagtgtcagccggtcatccacctggtcccccggctcttctgacacagggcgcagctcagaggccgagatgcagtggcggctccaggtgaaccgcctccaggagctcatcgaccagctcgagtgcaaggccccccggctggaacccctgcgtgaagaggacctggccaaggggcctgacttgcacatcctcatggcccagaggcaggtccaggtggcagaggaaggcctgcaggacttccaccgagccctgcgctgctatgtggacttcacaggggcccagagccattgtctgcatgtgtccgcccagaagatgctggacggtgcctccttcaccctgtatgagttctggcaggatgaggcctcctggagaaggcaccagcagtcgcctggcagcaaggccttccagcgcatcctcatcgaccacctgcgggccccggacaccctcaccactgtgttcttcccagcctcctggtggataatgaataacaactgagccagacctgcacacgccgagggccccgggaccctgcctgcctccctctggagccttctggactggccagcccagcgcaaagaccagggcttgtctcctcctggacttgggcctggtggaagggctctcagcccagggatcagggactgggctgcttgctttctatttattattgatttatttatccctgtattttattgtttgtcacttcagcctccaagctactttggcttctgcctggctcaggagacctggattctggtccctgctgtccctgcctggctgagcgacccagggcaggtcccgtccctgtctgggtgggcctcaggccatctggccgcctagcgagggtcctgctttcttcctgctgtcttgggaccaggcttctgctcctcctcagccagcggcagaagcagggctgatgctcagggaccccccaaccctcaaaccttgcctccgaggctgggcctgagctgggtgccccgtcgccctcccaggccactaggctctgactcttccagcacccatggatgtgccagaggcctctgggttggtttgcatgtcatttgcatatcgtttgcatgccctcatcccacccattctcagggcagtatgggaagccccaaggtgacctggccaagtagcaataatttgggtccagggtcacctattgcccccagaggcctctgaaccccaggctgggaccccagcacagaggcaataaaggcagtggtcccttcca

SEQ ID NO: 459094 - DNA, 1780 bp, Homo sapiens
acacgatgggcaaaggccttgggcaggagggagcgggatagaggaccggagagaaagcagtgtggctgcggtcctgaggttttccgcagagcagacaagaatgatgatgggaagctctcatttgaggaattccagaattactttgccgatggggttctcagcctgggggagctgcaggaactgttcagcggcattgatgggcatctcaccgacaatttagaaacagaaaaactgtgtgactacttctcagagcacctgggtgtctaccggccggtgctggctgcattggaatcgctgaaccgtgcagtgctcgctgccatggatgccaccaagctggagtacgagagggcctccaaagtggaccagtttgtgacgcgcttcctgctgcgggagacggtgagccagctgcaagcccttcagagctcgctggagggggcgtcagataccctggaggcccaggcccatggctggcggtcagatgcagagagcgtggaggcgcagagcaggctctgcggcagccggcgggcaggacgccgagccctgaggagtgtcagccggtcatccacctggtcccccggctcttctgacacagggcgcagctcagaggccgagatgcagtggcggctccaggtgaaccgcctccaggagctcatcgaccagctcgagtgcaaggccccccggctggaacccctgcgtgaagaggacctggccaaggggcctgacttgcacatcctcatggcccagaggcaggtccaggtggcagaggaaggcctgcaggacttccaccgagccctgcgctgctatgtggacttcacaggggcccagagccattgtctgcatgtgtccgcccagaagatgctggacggtgcctccttcaccctgtatgagttctggcaggatgaggcctcctggagaaggcaccagcagtcgcctggcagcaaggccttccagcgcatcctcatcgaccacctgcgggccccggacaccctcaccactgtgttcttcccagcctcctggtggataatgaataacaactgagccagacctgcacacgccgagggccccgggaccctgcctgcctccctctggagccttctggactggccagcccagcgcaaagaccagggcttgtctcctcctggacttgggcctggtggaagggctctcagcccagggatcagggactgggctgcttgctttctatttattattgatttatttatccctgtattttattgtttgtcacttcagcctccaagctactttggcttctgcctggctcaggagacctggattctggtccctgctgtccctgcctggctgagcgacccagggcaggtcccgtccctgtctgggtgggcctcaggccatctggccgcctagcgagggtcctgctttcttcctgctgtcttgggaccaggcttctgctcctcctcagccagcggcagaagcagggctgatgctcagggaccccccaaccctcaaaccttgcctccgaggctgggcctgagctgggtgccccgtcgccctcccaggccactaggctctgactcttccagcacccatggatgtgccagaggcctctgggttggtttgcatgtcatttgcatatcgtttgcatgccctcatcccacccattctcagggcagtatgggaagccccaaggtgacctggccaagtagcaataatttgggtccagggtcacctattgcccccagaggcctctgaaccccaggctgggaccccagcacagaggcaataaaggcagtggtcccttcca

SEQ ID NO: 459095 - DNA, 1978 bp, Homo sapiens
ggcctgagcccgcgcgtcggcgccggcgccaaggggcggcctctagccacaccgagtccgccgcggcgtccagggtcggcagcaaccgcagccgagcccgagcgggtggcggcgccatggcgtgcgcggggctgctcaccgtgtgcctgctccggccgcccgcgccccagccccagccccagaccccgcggcacccccagctcgcgcccgacccggggcccgccggacacacgctcttccaggacgttttccgcagagcagacaagaatgatgatgggaagctctcatttgaggaattccagaattactttgccgatggggttctcagcctgggggagctgcaggaactgttcagcggcattgatgggcatctcaccgacaatttagaaacagaaaaactgtgtgactacttctcagagcacctgggtgtctaccggccggtgctggctgcattggaatcgctgaaccgtgcagtgctcgctgccatggatgccaccaagctggagtacgagagggcctccaaagtggaccagtttgtgacgcgcttcctgctgcgggagacggtgagccagctgcaagcccttcagagctcgctggagggggcgtcagataccctggaggcccaggcccatggctggcgtcctcggccctgtgagcctcacttcctctaggtcagatgcagagagcgtggaggcgcagagcaggctctgcggcagccggcgggcaggacgccgagccctgaggagtgtcagccggtcatccacctggtcccccggctcttctgacacagggcgcagctcagaggccgagatgcagtggcggctccaggtgaaccgcctccaggagctcatcgaccagctcgagtgcaaggccccccggctggaacccctgcgtgaagaggacctggccaaggggcctgacttgcacatcctcatggcccagaggcaggtccaggtggcagaggaaggcctgcaggacttccaccgagccctgcgctgctatgtggacttcacaggggcccagagccattgtctgcatgtgtccgcccagaagatgctggacggtgcctccttcaccctgtatgagttctggcaggatgaggcctcctggagaaggcaccagcagtcgcctggcagcaaggccttccagcgcatcctcatcgaccacctgcgggccccggacaccctcaccactgtgttcttcccagcctcctggtggataatgaataacaactgagccagacctgcacacgccgagggccccgggaccctgcctgcctccctctggagccttctggactggccagcccagcgcaaagaccagggcttgtctcctcctggacttgggcctggtggaagggctctcagcccagggatcagggactgggctgcttgctttctatttattattgatttatttatccctgtattttattgtttgtcacttcagcctccaagctactttggcttctgcctggctcaggagacctggattctggtccctgctgtccctgcctggctgagcgacccagggcaggtcccgtccctgtctgggtgggcctcaggccatctggccgcctagcgagggtcctgctttcttcctgctgtcttgggaccaggcttctgctcctcctcagccagcggcagaagcagggctgatgctcagggaccccccaaccctcaaaccttgcctccgaggctgggcctgagctgggtgccccgtcgccctcccaggccactaggctctgactcttccagcacccatggatgtgccagaggcctctgggttggtttgcatgtcatttgcatatcgtttgcatgccctcatcccacccattctcagggcagtatgggaagccccaaggtgacctggccaagtagcaataatttgggtccagggtcacctattgcccccagaggcctctgaaccccaggctgggaccccagcacagaggcaataaaggcagtggtcccttcca

SEQ ID NO: 459096 - DNA, 1471 bp, Homo sapiens
tgctgaccgtccctccttggcccacaggagtacgagagggcctccaaagtggaccagtttgtgacgcgcttcctgctgcgggagacggtgagccagctgcaagcccttcagagctcgctggagggggcgtcagataccctggaggcccaggcccatggctggcggtcagatgcagagagcgtggaggcgcagagcaggctctgcggcagccggcgggcaggacgccgagccctgaggagtgtcagccggtcatccacctggtcccccggctcttctgacacagggcgcagctcagaggccgagatgcagtggcggctccaggtgaaccgcctccaggagctcatcgaccagctcgagtgcaaggccccccggctggaacccctgcgtgaagaggacctggccaaggggcctgacttgcacatcctcatggcccagaggcaggtccaggtggcagaggaaggcctgcaggacttccaccgagccctgcgctgctatgtggacttcacaggggcccagagccattgtctgcatgtgtccgcccagaagatgctggacggtgcctccttcaccctgtatgagttctggcaggatgaggcctcctggagaaggcaccagcagtcgcctggcagcaaggccttccagcgcatcctcatcgaccacctgcgggccccggacaccctcaccactgtgttcttcccagcctcctggtggataatgaataacaactgagccagacctgcacacgccgagggccccgggaccctgcctgcctccctctggagccttctggactggccagcccagcgcaaagaccagggcttgtctcctcctggacttgggcctggtggaagggctctcagcccagggatcagggactgggctgcttgctttctatttattattgatttatttatccctgtattttattgtttgtcacttcagcctccaagctactttggcttctgcctggctcaggagacctggattctggtccctgctgtccctgcctggctgagcgacccagggcaggtcccgtccctgtctgggtgggcctcaggccatctggccgcctagcgagggtcctgctttcttcctgctgtcttgggaccaggcttctgctcctcctcagccagcggcagaagcagggctgatgctcagggaccccccaaccctcaaaccttgcctccgaggctgggcctgagctgggtgccccgtcgccctcccaggccactaggctctgactcttccagcacccatggatgtgccagaggcctctgggttggtttgcatgtcatttgcatatcgtttgcatgccctcatcccacccattctcagggcagtatgggaagccccaaggtgacctggccaagtagcaataatttgggtccagggtcacctattgcccccagaggcctctgaaccccaggctgggaccccagcacagaggcaataaaggcagtggtcccttcca

SEQ ID NO: 459097 - DNA, 1754 bp, Homo sapiens
tccatgtcagccggcctctccttgcgggcctgcttgggtgctttggtccttttgtgggaactatagtttcccatggcagggctggtcaccactggggacgatggcccacactccgtctgctctgccccctgggccctggcaacattgtgacctcacgggctgacctcaccaattgcaggctctgagcaccgccttccagggcccacaggagtacgagagggcctccaaagtggaccagtttgtgacgcgcttcctgctgcgggagacggtgagccagctgcaagcccttcagagctcgctggagggggcgtcagataccctggaggcccaggcccatggctggcggtcagatgcagagagcgtggaggcgcagagcaggctctgcggcagccggcgggcaggacgccgagccctgaggagtgtcagccggtcatccacctggtcccccggctcttctgacacagggcgcagctcagaggccgagatgcagtggcggctccaggtgaaccgcctccaggagctcatcgaccagctcgagtgcaaggtgagggccgtggggccagggccccacaagggaggaccctcctggtatccaccagagccaggcccatgctggaggcccggcccacactctgtgccctcacaggccccccggctggaacccctgcgtgaagaggacctggccaaggggcctgacttgcacatcctcatggcccagaggcaggtccaggtggcagaggaaggcctgcaggacttccaccgagccctgcgctgctatgtggacttcacaggggcccagagccattgtctgcatgtgtccgcccagaagatgctggacggtgcctccttcaccctgtatgagttctggcaggatgaggcctcctggagaaggcaccagcagtcgcctggcagcaaggccttccagcgcatcctcatcgaccacctgcgggccccggacaccctcaccactgtgttcttcccagcctcctggtggataatgaataacaactgagccagacctgcacacgccgagggccccgggaccctgcctgcctccctctggagccttctggactggccagcccagcgcaaagaccagggcttgtctcctcctggacttgggcctggtggaagggctctcagcccagggatcagggactgggctgcttgctttctatttattattgatttatttatccctgtattttattgtttgtcacttcagcctccaagctactttggcttctgcctggctcaggagacctggattctggtccctgctgtccctgcctggctgagcgacccagggcaggtcccgtccctgtctgggtgggcctcaggccatctggccgcctagcgagggtcctgctttcttcctgctgtcttgggaccaggcttctgctcctcctcagccagcggcagaagcagggctgatgctcagggaccccccaaccctcaaaccttgcctccgaggctgggcctgagctgggtgccccgtcgccctcccaggccactaggctctgactcttccagcacccatggatgtgccagaggcctctgggttggtttgcatgtcatttgcatatcgtttgcatgccctcatcccacccattctcagggcagtatgggaagccccaaggtgacctggccaagtagcaataatttgggtccagggtcacctattgcccccagaggcctctgaaccccaggctgggaccccagcacagaggcaataaaggcagtggtcccttcca

SEQ ID NO: 459098 - DNA, 1540 bp, Homo sapiens
ctagccttggtttctcagctgtaaaactgggctaatgatcataaatgaggcaatgcatgtaaggtgcttagtggtgaatagagggggatttctgtggtttgggtatgaattttggccctgctactaacttgctatgtgaccttagcccaggagtacgagagggcctccaaagtggaccagtttgtgacgcgcttcctgctgcgggagacggtgagccagctgcaagcccttcagagctcgctggagggggcgtcagataccctggaggcccaggcccatggctggcggtcagatgcagagagcgtggaggcgcagagcaggctctgcggcagccggcgggcaggacgccgagccctgaggagtgtcagccggtcatccacctggtcccccggctcttctgacacagggcgcagctcagaggccgagatgcagtggcggctccaggtgaaccgcctccaggagctcatcgaccagctcgagtgcaagcacatcctcatggcccagaggcaggtccaggtggcagaggaaggcctgcaggacttccaccgagccctgcgctgctatgtggacttcacaggggcccagagccattgtctgcatgtgtccgcccagaagatgctggacggtgcctccttcaccctgtatgagttctggcaggatgaggcctcctggagaaggcaccagcagtcgcctggcagcaaggccttccagcgcatcctcatcgaccacctgcgggccccggacaccctcaccactgtgttcttcccagcctcctggtggataatgaataacaactgagccagacctgcacacgccgagggccccgggaccctgcctgcctccctctggagccttctggactggccagcccagcgcaaagaccagggcttgtctcctcctggacttgggcctggtggaagggctctcagcccagggatcagggactgggctgcttgctttctatttattattgatttatttatccctgtattttattgtttgtcacttcagcctccaagctactttggcttctgcctggctcaggagacctggattctggtccctgctgtccctgcctggctgagcgacccagggcaggtcccgtccctgtctgggtgggcctcaggccatctggccgcctagcgagggtcctgctttcttcctgctgtcttgggaccaggcttctgctcctcctcagccagcggcagaagcagggctgatgctcagggaccccccaaccctcaaaccttgcctccgaggctgggcctgagctgggtgccccgtcgccctcccaggccactaggctctgactcttccagcacccatggatgtgccagaggcctctgggttggtttgcatgtcatttgcatatcgtttgcatgccctcatcccacccattctcagggcagtatgggaagccccaaggtgacctggccaagtagcaataatttgggtccagggtcacctattgcccccagaggcctctgaaccccaggctgggaccccagcacagaggcaataaaggcagtggtcccttcca

SEQ ID NO: 459099 - DNA, 1011 bp, Homo sapiens
ggcctgagcccgcgcgtcggcgccggcgccaaggggcggcctctagccacaccgagtccgccgcggcgtccagggtcggcagcaaccgcagccgagcccgagcgggtggcggcgccatggcgtgcgcggggctgctcaccgtgtgcctgctccggccgcccgcgccccagccccagccccagaccccgcggcacccccagctgcgggccccggacaccctcaccactgtgttcttcccagcctcctggtggataatgaataacaactgagccagacctgcacacgccgagggccccgggaccctgcctgcctccctctggagccttctggactggccagcccagcgcaaagaccagggcttgtctcctcctggacttgggcctggtggaagggctctcagcccagggatcagggactgggctgcttgctttctatttattattgatttatttatccctgtattttattgtttgtcacttcagcctccaagctactttggcttctgcctggctcaggagacctggattctggtccctgctgtccctgcctggctgagcgacccagggcaggtcccgtccctgtctgggtgggcctcaggccatctggccgcctagcgagggtcctgctttcttcctgctgtcttgggaccaggcttctgctcctcctcagccagcggcagaagcagggctgatgctcagggaccccccaaccctcaaaccttgcctccgaggctgggcctgagctgggtgccccgtcgccctcccaggccactaggctctgactcttccagcacccatggatgtgccagaggcctctgggttggtttgcatgtcatttgcatatcgtttgcatgccctcatcccacccattctcagggcagtatgggaagccccaaggtgacctggccaagtagcaataatttgggtccagggtcacctattgcccccagaggcctctgaaccccaggctgggaccccagcacagaggcaataaaggcagtggtcccttcca

SEQ ID NO: 459100 - DNA, 1033 bp, Homo sapiens
ggcctgagcccgcgcgtcggcgccggcgccaaggggcggcctctagccacaccgagtccgccgcggcgtccagggtcggcagcaaccgcagccgagcccgagcgggtggcggcgccatggcgtgcgcggggctgctcaccgtgtgcctgctccggccgcccgcgccccagccccagccccagaccccgcggcacccccagctcgcgcccgacccggggcccgccggacacacgctcttccaggacgttttccgcagagcagacaagaatgatgatgggaagctctcatttgaggaattccagaattactttgccgatggggttctcagcctgggggagctgcaggaactgttcagcggcattgatgggcatctcaccgacaatttagaaacagaaaaactgtgtgactacttctcagagcacctgggtgtctaccggccggtgctggctgcattggaatcgctgaaccgtgcagtgctcgctgccatggatgccaccaagctggagtacgagagggcctccaaagtggaccagtttgtgacgcgcttcctgctgcgggagacggtgagccagctgcaagcccttcagagctcgctggagggggcgtcagataccctggaggcccaggcccatggctggcggtcagatgcagagagcgtggaggcgcagagcaggctctgcggcagccggcgggcaggacgccgagccctgaggagtgtcagccggtcatccacctggtcccccggctcttctgacacagggcgcagctcagaggccgggagatgcgctgtggctcaggagatgtgcgccgtggcagcgatgggaaagtggcccagagtcagggctcgggagatgcactgtggctcgggagatgagcgccatgacagagatgggaaggtggcccagagtcagggctcgggagatgcgcgccgtgacggagatgggaaagtggcctggagtcagggctcgggagatgtgcgctgtgccggaggtgggaaagtgccgtcgcaaatggagcttcgtctgcctctggg

SEQ ID NO: 459101 - DNA, 740 bp, Homo sapiens
ggcctgagcccgcgcgtcggcgccggcgccaaggggcggcctctagccacaccgagtccgccgcggcgtccagggtcggcagcaaccgcagccgagcccgagcgggtggcggcgccatggcgtgcgcggggctgctcaccgtgtgcctgctccggccgcccgcgccccagccccagccccagaccccgcggcacccccagctcgcgcccgacccggggcccgccggacacacgctcttccaggacgttttccgcagagcagacaagaatgatgatgggaagctctcatttgaggaattccagaattactttgccgatggggttctcagcctgggggagctgcaggaactgttcagcggcattgatgggcatctcaccgacaatttagaaacagaaaaactgtgtgactacttctcagagcacctgggtgtctaccggccggtgctggctgcattggaatcgctgaaccgtgcagtgctcgctgccatggatgccaccaagctgggtgagtggagtggctgatggtgggggatccactgtgaggcagtgggcatctgctgtgctgtgggatcctccacagtcttgactcagggttatagagctaggggcttgggttcaaatcctggctcccactttgtagctgtgccccttgacctctctgggcctgtttcctcatctgtaaaccatcataacaatagagctgcccttcatacatcactgtgaccagtgagaacgaaggca

SEQ ID NO: 459102 - DNA, 1947 bp, Homo sapiens
ggcctgagcccgcgcgtcggcgccggcgccaaggggcggcctctagccacaccgagtccgccgcggcgtccagggtcggcagcaaccgcagccgagcccgagcgggtggcggcgccatggcgtgcgcggggctgctcaccgtgtgcctgctccggccgcccgcgccccagccccagccccagaccccgcggcacccccagctcgcgcccgacccggggcccgccggacacacgctcttccaggacgttttccgcagagcagacaagaatgatgatgggaagctctcatttgaggaattccagaattactttgccgatggggttctcagcctgggggagctgcaggaactgttcagcggcattgatgggcatctcaccgacaatttagaaacagaaaaactgtgtgactacttctcagagcacctgggtgtctaccggccggtgctggctgcattggaatcgctgaaccgtgcagtgctcgctgccatggatgccaccaagctggagtacgagagggcctccaaagtggaccagtttgtgacgcgcttcctgctgcgggagacggtgagccagctgcaagcccttcagagctcgctggagggggcgtcagataccctggaggcccaggcccatggctggcggtcagatgcagagagcgtggaggcgcagagcaggctctgcggcagccggcgggcaggacgccgagccctgaggagtgtcagccggtcatccacctggtcccccggctcttctgacacagggcgcagctcagaggccgagatgcagtggcggctccaggtgaaccgcctccaggagctcatcgaccagctcgagtgcaaggccccccggctggaacccctgcgtgaagaggacctggccaaggggcctgacttgcacatcctcatggcccagaggcaggtccaggtggcagaggaaggcctgcaggacttccaccgagccctgcgctgctatgtggacttcacaggggcccagagccattgtctgcatgtgtccgcccagaagatgctggacggtgcctccttcaccctgtatgagttctggcaggatgaggcctcctggagaaggcaccagcagtcgcctggcagcaaggccttccagcgcatcctcatcgaccacctgcgggccccggacaccctcaccactgtgttcttcccagcctcctggtggataatgaataacaactgagccagacctgcacacgccgagggccccgggaccctgcctgcctccctctggagccttctggactggccagcccagcgcaaagaccagggcttgtctcctcctggacttgggcctggtggaagggctctcagcccagggatcagggactgggctgcttgctttctatttattattgatttatttatccctgtattttattgtttgtcacttcagcctccaagctactttggcttctgcctggctcaggagacctggattctggtccctgctgtccctgcctggctgagcgacccagggcaggtcccgtccctgtctgggtgggcctcaggccatctggccgcctagcgagggtcctgctttcttcctgctgtcttgggaccaggcttctgctcctcctcagccagcggcagaagcagggctgatgctcagggaccccccaaccctcaaaccttgcctccgaggctgggcctgagctgggtgccccgtcgccctcccaggccactaggctctgactcttccagcacccatggatgtgccagaggcctctgggttggtttgcatgtcatttgcatatcgtttgcatgccctcatcccacccattctcagggcagtatgggaagccccaaggtgacctggccaagtagcaataatttgggtccagggtcacctattgcccccagaggcctctgaaccccaggctgggaccccagcacagaggcaataaaggcagtggtcccttcca

SEQ ID NO: 459103 - DNA, 2049 bp, Homo sapiens
ggcctgagcccgcgcgtcggcgccggcgccaaggggcggcctctagccacaccgagtccgccgcggcgtccagggtcggcagcaaccgcagccgagcccgagcgggtggcggcgccatggcgtgcgcggggctgctcaccgtgtgcctgctccggccgcccgcgccccagccccagccccagaccccgcggcacccccagctcgcgcccgacccggggcccgccggacacacgctcttccaggacgttttccgcagagcagacaagaatgatgatgggaagctctcatttgaggaattccagaattactttgccgatggggttctcagcctgggggagctgcaggaactgttcagcggcattgatgggcatctcaccgacaatttagaaacagaaaaactgtgtgactacttctcagagcacctgggtgtctaccggccggtgctggctgcattggaatcgctgaaccgtgcagtgctcgctgccatggatgccaccaagctggagtacgagagggcctccaaagtggaccagtttgtgacgcgcttcctgctgcgggagacggtgagccagctgcaagcccttcagagctcgctggagggggcgtcagataccctggaggcccaggcccatggctggcggtcagatgcagagagcgtggaggcgcagagcaggctctgcggcagccggcgggcaggacgccgagccctgaggagtgtcagccggtcatccacctggtcccccggctcttctgacacagggcgcagctcagaggccgagatgcagtggcggctccaggtgaaccgcctccaggagctcatcgaccagctcgagtgcaaggtgagggccgtggggccagggccccacaagggaggaccctcctggtatccaccagagccaggcccatgctggaggcccggcccacactctgtgccctcacaggccccccggctggaacccctgcgtgaagaggacctggccaaggggcctgacttgcacatcctcatggcccagaggcaggtccaggtggcagaggaaggcctgcaggacttccaccgagccctgcgctgctatgtggacttcacaggggcccagagccattgtctgcatgtgtccgcccagaagatgctggacggtgcctccttcaccctgtatgagttctggcaggatgaggcctcctggagaaggcaccagcagtcgcctggcagcaaggccttccagcgcatcctcatcgaccacctgcgggccccggacaccctcaccactgtgttcttcccagcctcctggtggataatgaataacaactgagccagacctgcacacgccgagggccccgggaccctgcctgcctccctctggagccttctggactggccagcccagcgcaaagaccagggcttgtctcctcctggacttgggcctggtggaagggctctcagcccagggatcagggactgggctgcttgctttctatttattattgatttatttatccctgtattttattgtttgtcacttcagcctccaagctactttggcttctgcctggctcaggagacctggattctggtccctgctgtccctgcctggctgagcgacccagggcaggtcccgtccctgtctgggtgggcctcaggccatctggccgcctagcgagggtcctgctttcttcctgctgtcttgggaccaggcttctgctcctcctcagccagcggcagaagcagggctgatgctcagggaccccccaaccctcaaaccttgcctccgaggctgggcctgagctgggtgccccgtcgccctcccaggccactaggctctgactcttccagcacccatggatgtgccagaggcctctgggttggtttgcatgtcatttgcatatcgtttgcatgccctcatcccacccattctcagggcagtatgggaagccccaaggtgacctggccaagtagcaataatttgggtccagggtcacctattgcccccagaggcctctgaaccccaggctgggaccccagcacagaggcaataaaggcagtggtcccttcca

SEQ ID NO: 459104 - DNA, 1912 bp, Homo sapiens
ggcctgagcccgcgcgtcggcgccggcgccaaggggcggcctctagccacaccgagtccgccgcggcgtccagggtcggcagcaaccgcagccgagcccgagcgggtggcggcgccatggcgtgcgcggggctgctcaccgtgtgcctgctccggccgcccgcgccccagccccagccccagaccccgcggcacccccagctcgcgcccgacccggggcccgccggacacacgctcttccaggacgttttccgcagagcagacaagaatgatgatgggaagctctcatttgaggaattccagaattactttgccgatggggttctcagcctgggggagctgcaggaactgttcagcggcattgatgggcatctcaccgacaatttagaaacagaaaaactgtgtgactacttctcagagcacctgggtgtctaccggccggtgctggctgcattggaatcgctgaaccgtgcagtgctcgctgccatggatgccaccaagctggagtacgagagggcctccaaagtggaccagtttgtgacgcgcttcctgctgcgggagacggtgagccagctgcaagcccttcagagctcgctggagggggcgtcagataccctggaggcccaggcccatggctggcggtcagatgcagagagcgtggaggcgcagagcaggctctgcggcagccggcgggcaggacgccgagccctgaggagtgtcagccggtcatccacctggtcccccggctcttctgacacagggcgcagctcagaggccgagatgcagtggcggctccaggtgaaccgcctccaggagctcatcgaccagctcgagtgcaaggccccccggctggaacccctgcgtgaagaggacctggccaaggggcctgacttgcacatcctcatggcccagaggcaggtccaggtggcagaggaaggcctgcaggacttccaccgagccctgcgctgctatgtggacttcacaggggcccagagccattgtctgcatgtgtccgcccagaagatgctggacggtgcctccttcaccctgtatgagttctggcaggatgaggcctcctggagaaggcaccagcagtcgcctggcagcaaggccttccagcgcatcctcatcgaccacctgcgggccccggacaccctcaccactgtgttcttcccagcctcctggtggataatgaataacaactgagccagacctgcacacgccgagggccccgggaccctgcctgcctccctctggagccttctggactggccagcccagcgcaaagaccagggcttgtctcctcctggacttgggcctggtggaagggctctcagcccagggatcagggactgggctgcttgctttctatttattattgatttatttatccctgtattttattgtttgtcacttcagcctccaagctactttggcttctgcctggctcaggagacctggattctggtccctgctgtccctgtctgggtgggcctcaggccatctggccgcctagcgagggtcctgctttcttcctgctgtcttgggaccaggcttctgctcctcctcagccagcggcagaagcagggctgatgctcagggaccccccaaccctcaaaccttgcctccgaggctgggcctgagctgggtgccccgtcgccctcccaggccactaggctctgactcttccagcacccatggatgtgccagaggcctctgggttggtttgcatgtcatttgcatatcgtttgcatgccctcatcccacccattctcagggcagtatgggaagccccaaggtgacctggccaagtagcaataatttgggtccagggtcacctattgcccccagaggcctctgaaccccaggctgggaccccagcacagaggcaataaaggcagtggtcccttcca

SEQ ID NO: 459105 - DNA, 1699 bp, Homo sapiens
  misc_feature (15)..(15): n is a, c, g, or t
tcttgaggtatccgnccccccgatgtatggatatcgtcgaccaggcgctcgcagaattactttgccgatggggttctcagcctgggggagctgcaggaactgttcagcggcattgatgggcatctcaccgacaatttagaaacagaaaaactgtgtgactacttctcagagcacctgggtgtctaccggccggtgctggctgcattggaatcgctgaaccgtgcagtgctcgctgccatggatgccaccaagctggagtacgagagggcctccaaagtggaccagtttgtgacgcgcttcctgctgcgggagacggtgagccagctgcaagcccttcagagctcgctggagggggcgtcagataccctggaggcccaggcccatggctggcggtcagatgcagagagcgtggaggcgcagagcaggctctgcggcagccggcgggcaggacgccgagccctgaggagtgtcagccggtcatccacctggtcccccggctcttctgacacagggcgcagctcagaggccgagatgcagtggcggctccaggtgaaccgcctccaggagctcatcgaccagctcgagtgcaaggccccccggctggaacccctgcgtgaagaggacctggccaaggggcctgacttgcacatcctcatggcccagaggcaggtccaggtggcagaggaaggcctgcaggacttccaccgagccctgcgctgctatgtggacttcacaggggcccagagccattgtctgcatgtgtccgcccagaagatgctggacggtgcctccttcaccctgtatgagttctggcaggatgaggcctcctggagaaggcaccagcagtcgcctggcagcaaggccttccagcgcatcctcatcgaccacctgcgggccccggacaccctcaccactgtgttcttcccagcctcctggtggataatgaataacaactgagccagacctgcacacgccgagggccccgggaccctgcctgcctccctctggagccttctggactggccagcccagcgcaaagaccagggcttgtctcctcctggacttgggcctggtggaagggctctcagcccagggatcagggactgggctgcttgctttctatttattattgatttatttatccctgtattttattgtttgtcacttcagcctccaagctactttggcttctgcctggctcaggagacctggattctggtccctgctgtccctgcctggctgagcgacccagggcaggtcccgtccctgtctgggtgggcctcaggccatctggccgcctagcgagggtcctgctttcttcctgctgtcttgggaccaggcttctgctcctcctcagccagcggcagaagcagggctgatgctcagggaccccccaaccctcaaaccttgcctccgaggctgggcctgagctgggtgccccgtcgccctcccaggccactaggctctgactcttccagcacccatggatgtgccagaggcctctgggttggtttgcatgtcatttgcatatcgtttgcatgccctcatcccacccattctcagggcagtatgggaagccccaaggtgacctggccaagtagcaataatttgggtccagggtcacctattgcccccagaggcctctgaaccccaggctgggaccccagcacagaggcaataaaggcagtggtcccttcca

SEQ ID NO: 459106 - DNA, 1893 bp, Homo sapiens
ggcctgagcccgcgcgtcggcgccggcgccaaggggcggcctctagccacaccgagtccgccgcggcgtccagggtcggcagcaaccgcagccgagcccgagcgggtggcggcgccatggcgtgcgcggggctgctcaccgtgtgcctgctccggccgcccgcgccccagccccagccccagaccccgcggcacccccagctcgcgcccgacccggggcccgccggacacacgctcttccaggacgttttccgcagagcagacaagaatgatgatgggaagctctcatttgaggaattccagaattactttgccgatggggttctcagcctgggggagctgcaggaactgttcagcggcattgatgggcatctcaccgacaatttagaaacagaaaaactgtgtgactacttctcagagcacctgggtgtctaccggccggtgctggctgcattggaatcgctgaaccgtgcagtgctcgctgccatggatgccaccaagctggagtacgagagggcctccaaagtggaccagtttgtgacgcgcttcctgctgcgggagacggtgagccagctgcaagcccttcagagctcgctggagggggcgtcagataccctggaggcccaggcccatggctggcggtcagatgcagagagcgtggaggcgcagagcaggctctgcggcagccggcgggcaggacgccgagccctgaggagtgtcagccggtcatccacctggtcccccggctcttctgacacagggcgcagctcagaggccgagatgcagtggcggctccaggtgaaccgcctccaggagctcatcgaccagctcgagtgcaagcacatcctcatggcccagaggcaggtccaggtggcagaggaaggcctgcaggacttccaccgagccctgcgctgctatgtggacttcacaggggcccagagccattgtctgcatgtgtccgcccagaagatgctggacggtgcctccttcaccctgtatgagttctggcaggatgaggcctcctggagaaggcaccagcagtcgcctggcagcaaggccttccagcgcatcctcatcgaccacctgcgggccccggacaccctcaccactgtgttcttcccagcctcctggtggataatgaataacaactgagccagacctgcacacgccgagggccccgggaccctgcctgcctccctctggagccttctggactggccagcccagcgcaaagaccagggcttgtctcctcctggacttgggcctggtggaagggctctcagcccagggatcagggactgggctgcttgctttctatttattattgatttatttatccctgtattttattgtttgtcacttcagcctccaagctactttggcttctgcctggctcaggagacctggattctggtccctgctgtccctgcctggctgagcgacccagggcaggtcccgtccctgtctgggtgggcctcaggccatctggccgcctagcgagggtcctgctttcttcctgctgtcttgggaccaggcttctgctcctcctcagccagcggcagaagcagggctgatgctcagggaccccccaaccctcaaaccttgcctccgaggctgggcctgagctgggtgccccgtcgccctcccaggccactaggctctgactcttccagcacccatggatgtgccagaggcctctgggttggtttgcatgtcatttgcatatcgtttgcatgccctcatcccacccattctcagggcagtatgggaagccccaaggtgacctggccaagtagcaataatttgggtccagggtcacctattgcccccagaggcctctgaaccccaggctgggaccccagcacagaggcaataaaggcagtggtcccttcca

SEQ ID NO: 459107 - DNA, 1912 bp, Homo sapiens
ggcctgagcccgcgcgtcggcgccggcgccaaggggcggcctctagccacaccgagtccgccgcggcgtccagggtcggcagcaaccgcagccgagcccgagcgggtggcggcgccatggcgtgcgcggggctgctcaccgtgtgcctgctccggccgcccgcgccccagccccagccccagaccccgcggcacccccagctcgcgcccgacccggggcccgccggacacacgctcttccaggacgttttccgcagagcagacaagaatgatgatgggaagctctcatttgaggaattccagaattactttgccgatggggttctcagcctgggggagctgcaggaactgttcagcggcattgatgggcatctcaccgacaatttagaaacagaaaaactgtgtgactacttctcagagcacctgggtgtctaccggccggtgctggctgcattggaatcgctgaaccgtgcagtgctcgctgccatggatgccaccaagctggtcagatgcagagagcgtggaggcgcagagcaggctctgcggcagccggcgggcaggacgccgagccctgaggagtgtcagccggtcatccacctggtcccccggctcttctgacacagggcgcagctcagaggccgagatgcagtggcggctccaggtgaaccgcctccaggagctcatcgaccagctcgagtgcaaggtgagggccgtggggccagggccccacaagggaggaccctcctggtatccaccagagccaggcccatgctggaggcccggcccacactctgtgccctcacaggccccccggctggaacccctgcgtgaagaggacctggccaaggggcctgacttgcacatcctcatggcccagaggcaggtccaggtggcagaggaaggcctgcaggacttccaccgagccctgcgctgctatgtggacttcacaggggcccagagccattgtctgcatgtgtccgcccagaagatgctggacggtgcctccttcaccctgtatgagttctggcaggatgaggcctcctggagaaggcaccagcagtcgcctggcagcaaggccttccagcgcatcctcatcgaccacctgcgggccccggacaccctcaccactgtgttcttcccagcctcctggtggataatgaataacaactgagccagacctgcacacgccgagggccccgggaccctgcctgcctccctctggagccttctggactggccagcccagcgcaaagaccagggcttgtctcctcctggacttgggcctggtggaagggctctcagcccagggatcagggactgggctgcttgctttctatttattattgatttatttatccctgtattttattgtttgtcacttcagcctccaagctactttggcttctgcctggctcaggagacctggattctggtccctgctgtccctgcctggctgagcgacccagggcaggtcccgtccctgtctgggtgggcctcaggccatctggccgcctagcgagggtcctgctttcttcctgctgtcttgggaccaggcttctgctcctcctcagccagcggcagaagcagggctgatgctcagggaccccccaaccctcaaaccttgcctccgaggctgggcctgagctgggtgccccgtcgccctcccaggccactaggctctgactcttccagcacccatggatgtgccagaggcctctgggttggtttgcatgtcatttgcatatcgtttgcatgccctcatcccacccattctcagggcagtatgggaagccccaaggtgacctggccaagtagcaataatttgggtccagggtcacctattgcccccagaggcctctgaaccccaggctgggaccccagcacagaggcaataaaggcagtggtcccttcca

SEQ ID NO: 459108 - DNA, 1304 bp, Homo sapiens
ggcctgagcccgcgcgtcggcgccggcgccaaggggcggcctctagccacaccgagtccgccgcggcgtccagggtcggcagcaaccgcagccgagcccgagcgggtggcggcgccatggcgtgcgcggggctgctcaccgtgtgcctgctccggccgcccgcgccccagccccagccccagaccccgcggcacccccagctcgcgcccgacccggggcccgccggacacacgctcttccaggacgttttccgcagagcagacaagaatgatgatgggaagctctcatttgaggaattccagaattactttgccgatggggttctcagcctgggggagctgcaggaactgttcagcggcattgatgggcatctcaccgacaatttagaaacagaaaaactgtgtgactacttctcagagcacctgggtgtctaccggccggtgctggctgcattggaatcgctgaaccgtgcagtgctcgctgccatggatgccaccaagctggagtacgagagggcctccaaagtggaccagtttgtgacgcgcttcctgctgcgggagacggtgagccagctgcaagcccttcagagctcgctggagggggcgtcagataccctggaggcccaggcccatggctggcggtcagatgcagagagcgtggaggcgcagagcaggctctgcggcagccggcgggcaggacgccgagccctgaggagtgtcagccggtcatccacctggtcccccggctcttctgacacagggcgcagctcagaggccgagatgcagtggcggctccaggtgaaccgcctccaggagctcatcgaccagctcgagtgcaaggccccccggctggaacccctgcgtgaagaggacctggccaaggggcctgacttgcacatcctcatggcccagaggcaggtccaggtggcagaggaaggcctgcaggacttccaccgagccctgcgctgctatgtggacttcacaggggcccagagccattgtctgcatgtgtccgcccagaagatgctggacggtgcctccttcaccctgtatgagttctggcaggatgaggcctcctggagaaggcaccagcagtcgcctggcagcaaggccttccagcgcatcctcatcgaccacctgcgggccccggacaccctcaccactgtgttcttcccagcctcctggtggataatgaataacaactgagccagacctgcacacgccgagggccccgggaccctgcctgcctctgaaccccaggctgggaccccagcacagaggcaataaaggcagtggtcccttcca

SEQ ID NO: 459109 - DNA, 1366 bp, Homo sapiens
  misc_feature (1351)..(1351): n is a, c, g, or t
ggcctgagcccgcgcgtcggcgccggcgccaaggggcggcctctagccacaccgagtccgccgcggcgtccagggtcggcagcaaccgcagccgagcccgagcgggtggcggcgccatggcgtgcgcggggctgctcaccgtgtgcctgctccggccgcccgcgccccagccccagccccagaccccgcggcacccccagctcgcgcccgacccggggcccgccggacacacgctcttccaggacgttttccgcagagcagacaagaatgatgatgggaagctctcatttgaggaattccagaattactttgccgatggggttctcagcctgggggagctgcaggaactgttcagcggcattgatgggcatctcaccgacaatttagaaacagaaaaactgtgtgactacttctcagagcacctgggtgtctaccggccggtgctggctgcattggaatcgctgaaccgtgcagtgctcgctgccatggatgccaccaagctggagtacgagagggcctccaaagtggaccagtttgtgacgcgcttcctgctgcgggagacggtgagccagctgcaagcccttcagagctcgctggagggggcgtcagataccctggaggcccaggcccatggctggcggtcagatgcagagagcgtggaggcgcagagcaggctctgcggcagccggcgggcaggacgccgagccctgaggagtgtcagccggtcatccacctggtcccccggctcttctgacacagggcgcagctcagaggccgagatgcagtggcggctccaggtgaaccgcctccaggagctcatcgaccagctcgagtgcaagcacatcctcatggcccagaggcaggtccaggtggcagaggaaggcctgcaggacttccaccgagccctgcgctgctatgtggacttcacaggggcccagagccattgtctgcatgtgtccgcccagaagatgctggacggtgcctccttcaccctgtatgagttctggcaggatgaggcctcctggagaaggcaccagcagtcgcctggcagcaaggccttccagcgcatcctcatcgaccacctgcgggccccggacaccctcaccactgtgttcttcccagcctcctggtggataatgaataacaactgagccattgcactccggcctgggagacacagcgagactctgtctccaaaaaaaaaggtgctttttgaaaatgttgaggttgaaatgatgggaaccaacattcttcggatttagtaggggagcataatagcaaacacccccttggttcgcacatgtacaggaatgggactaagttggggcacagccattgcactccgcataantcctgctagagtcag

SEQ ID NO: 459110 - DNA, 778 bp, Homo sapiens
ggcctgagcccgcgcgtcggcgccggcgccaaggggcggcctctagccacaccgagtccgccgcggcgtccagggtcggcagcaaccgcagccgagcccgagcgggtggcggcgccatggcgtgcgcggggctgctcaccgtgtgcctgctccggccgcccgcgccccagccccagccccagaccccgcggcacccccagctcgcgcccgacccggggcccgccggacacacgctcttccaggacgttttccgcagagcagacaagaatgatgatgggaagctctcatttgaggaattccagaattactttgccgatggggttctcagcctgggggagctgcaggaactgttcagcggcattgatgggcatctcaccgagtgagtatgagagggggccgtggactacttctcagagcacctgggtgtctaccggccggtgctggctgcattggaatcgctgaaccgtgcagtgctcgctgccatggatgccaccaagctggagtacgagagggcctccaaagtggaccagtttgtgacgcgcttcctgctgcgggagacggtgagccagctgcaagcccttcagagctcgctggagggggcgtcagataccctggaggcccaggcccatggctggcgcagaatcagagagcgtgtgggcgcatatcagctcttcggaacccgtcagatgaagccgaacccttagcattcaaccggcaccacctgtccccgggtctctgacacggggcggtcacggcgactcgtggcgtccggtccgtc

SEQ ID NO: 459111 - DNA, 1442 bp, Homo sapiens
cgcctagtaggcaggcgctctcagctctctccccggtacgtgacgagactccacggacgtcacgtgaggcaggcggcgagcgcgggtggggcggggttaggcggcgctccgcgagaaccaaagtgcagccgctgacccggcaaaactcagcgggggctggatagccatgcccaagtactgcagggcgccgaactgctccaacactgcgggccgcctgggtgcagacaaccgccctgtgagcttctacaagttcccactgaaggatggtccccggctgcaggcctggctgcagcacatgggctgtgagcactgggtgcccagctgccaccagcacttgtgcagcgagcacttcacaccctcctgcttccagtggcgctggggtgtgcgctacctgcggcctgatgcagtgccctccatcttctcccggggaccacctgccaagagtcagcggaggacccgaagcacccagaagccagtctcgccgccgcctcccctacagaagaatacacccctgccccagagccctgccatcccagtctctggcccagtgcgcctagtggtgctgggccccacatcggggagccccaagactgtggccaccatgctcctgacccccctggcccctgcgccaactcctgagcggtcacaacctgaagtccctgcccaacaggcccagaccgggctgggcccagtgctgggagcactgcaacgccgggtgcggaggctgcaacggtgccaggagcggcaccaggcgcagctgcaggccctggaacggctggcacagcagctacacggggagagcctgctggcacgggcacgccggggtctgcagcgcctgacaacagcccagacccttggacctgaggaatcccaaaccttcaccatcatctgtggagggcctgacatagccatggtccttgcccaggaccctgcacctgccacagtggatgccaagccggagctcctggacactcggatccccagtgcataaggatcaagacagacaatgtcgagggacaaaagatagaagatggaggaggaaagacattatacgtgggcttggcccagccccaccgcccacgcctgggtagtagcagtgcctccctcaagggcctgggttctaccaccccactcctagggatctcttgaaccttaggggtgacctgggcccaagtctctcatcagcccccaatcccctgggtaccaggcttctgccacccccggctcagatctttgcaaatcagtacgacagcctcagagcagagcaagggttgtttgggagaatcatacctggttctaaggagtcccacgctttttgccaagcctggtactgagttcatgataccatggtggacacagctgagaaaatccctgccctcatggtgctcattctacttgagtagacgatgaactagtaaacaaataaacaagaacactgcaga

SEQ ID NO: 459112 - DNA, 1249 bp, Homo sapiens
cgcctagtaggcaggcgctctcagctctctccccggtacgtgacgagactccacggacgtcacgtgaggcaggcggcgagcgcgggtggggcggggttaggcggcgctccgcgagaaccaaagtgcagccgctgacccggcaaaactcagcgggggctggatagccatgcccaagtactgcagggcgccgaactgctccaacactgcgggccgcctgggtgcagacaaccgccctgtgagcttctacaaagtcagcggaggacccgaagcacccagaagccagtctcgccgccgcctcccctacagaagaatacacccctgccccagagccctgccatcccagtctctggcccagtgcgcctagtggtgctgggccccacatcggggagccccaagactgtggccaccatgctcctgacccccctggcccctgcgccaactcctgagcggtcacaacctgaagtccctgcccaacaggcccagaccgggctgggcccagtgctgggagcactgcaacgccgggtgcggaggctgcaacggtgccaggagcggcaccaggcgcagctgcaggccctggaacggctggcacagcagctacacggggagagcctgctggcacgggcacgccggggtctgcagcgcctgacaacagcccagacccttggacctgaggaatcccaaaccttcaccatcatctgtggagggcctgacatagccatggtccttgcccaggaccctgcacctgccacagtggatgccaagccggagctcctggacactcggatccccagtgcataaggatcaagacagacaatgtcgagggacaaaagatagaagatggaggaggaaagacattatacgtgggcttggcccagccccaccgcccacgcctgggtagtagcagtgcctccctcaagggcctgggttctaccaccccactcctagggatctcttgaaccttaggggtgacctgggcccaagtctctcatcagcccccaatcccctgggtaccaggcttctgccacccccggctcagatctttgcaaatcagtacgacagcctcagagcagagcaagggttgtttgggagaatcatacctggttctaaggagtcccacgctttttgccaagcctggtactgagttcatgataccatggtggacacagctgagaaaatccctgccctcatggtgctcattctacttgagtagacgatgaactagtaaacaaataaacaagaacactgcaga

SEQ ID NO: 459113 - DNA, 1416 bp, Homo sapiens
cgcctagtaggcaggcgctctcagctctctccccggtacgtgacgagactccacggacgtcacgtgaggcaggcggcgagcgcgggtggggcggggttaggcggcgctccgcgagaaccaaagtgcagccgctgacccggcaaaactcagcgggggctggatagccatgcccaagtactgcagggcgccgaactgctccaacactgcgggccgcctgggtgcagacaaccgccctgtgagcttctacaagttcccactgaaggatggtccccggctgcaggcctggctgcagcacatgggctgtgagcactgggtgcccagctgccaccagcacttgtgcagcgagcacttcacaccctcctgcttccagtggcgctggggtgtgcgctacctgcggcctgatgcagtgccctccatcttctcccggggaccacctgccaagagtcagcggaggacccgaagcacccagaagccagtctcgccgccgcctcccctacagaagaatacacccctgccccagagccctgccatcccagtctctggcccagtgcgcctagtggtgctgggccccacatcggggagccccaagactgtggccaccatgctcctgacccccctggcccctgcgccaactcctgagcggtcacaacctgaagtccggcccagtgctgggagcactgcaacgccgggtgcggaggctgcaacggtgccaggagcggcaccaggcgcagctgcaggccctggaacggctggcacagcagctacacggggagagcctgctggcacgggcacgccggggtctgcagcgcctgacaacagcccagacccttggacctgaggaatcccaaaccttcaccatcatctgtggagggcctgacatagccatggtccttgcccaggaccctgcacctgccacagtggatgccaagccggagctcctggacactcggatccccagtgcataaggatcaagacagacaatgtcgagggacaaaagatagaagatggaggaggaaagacattatacgtgggcttggcccagccccaccgcccacgcctgggtagtagcagtgcctccctcaagggcctgggttctaccaccccactcctagggatctcttgaaccttaggggtgacctgggcccaagtctctcatcagcccccaatcccctgggtaccaggcttctgccacccccggctcagatctttgcaaatcagtacgacagcctcagagcagagcaagggttgtttgggagaatcatacctggttctaaggagtcccacgctttttgccaagcctggtactgagttcatgataccatggtggacacagctgagaaaatccctgccctcatggtgctcattctacttgagtagacgatgaactagtaaacaaataaacaagaacactgcaga

SEQ ID NO: 459114 - DNA, 2065 bp, Homo sapiens
cgcctagtaggcaggcgctctcagctctctccccggtacgtgacgagactccacggacgtcacgtgaggcaggcggcgagcgcgggtggggcggggttaggcggcgctccgcgagaaccaaagtgcagccgctgacccggcaaaactcagcgggggctggatagccatgcccaagtactgcagggcgccgaactgctccaacactgcgggccgcctgggtgcagacaaccgccctgtgagcttctacaagttcccactgaaggatggtccccggctgcaggcctggctgcagcacatgggctgtgagcactgggtgcccagctgccaccagcacttgtgcagcgagcacttcacaccctcctgcttccagtggcgctggggtgtgcgctacctgcggcctgatgcagtgccctccatcttctcccggggaccacctgccaagagtcagcggaggacccgaagcacccagaagccagtctcgccgccgcctcccctacagaagaatacacccctgccccagagccctgccatcccagtctctggcccagtgcgcctagtggtgctgggccccacatcggggagccccaagactgtggccaccatgctcctgacccccctggcccctgcgccaactcctgagcggtcacaacctgaagtccctgcccaacaggcccagaccgggctgggcccagtgctgggagcactgcaacgccgggtgcggaggctgcaacggtgccaggagcggcaccaggcgcagctgcaggccctggaacggctggcacagcagctacacggggagagcctgctggcacgggcacgccggggtctgcagcgcctgacaacagcccagacccttggacctgaggaatcccaaaccttcaccatcatctgtggagggcctgacatagccatggtccttgcccaggaccctgcacctgccacagtggatgccaagccggagctcctggacactcggatccccagtgcataaggatcaagacagacaatgtcgagggacaaaagatagaagatggaggaggaaagacattatacgtgggcttggcccagccccaccgcccacgcctgggtagtagcagtgcctccctcaagggcctgggttctaccaccccactcctagggatctcttgaaccttaggggtgacctgggcccaagtctctcatcagcccccaatcccctgggtaccaggcttctgccacccccggctcagatctttgcaaatcagtacgacagcctcagagcagagcaagggttgtttgggagaatcatacctggttctaaggagtcccacgctttttgccaagcctggtactgagttcatgataccatggtggacacagctgagaaaatccctgccctcatggtgctcattctacttgagtagacgatgaactagtaaacaaataaacaagaacactgcagacatgagcgatgagtgctataaagacaacaaaaatttggtttgggcctgggggagggccctccaaggccatgttttagcagaaacctgggtgatcagaaggggctggcctggagcgctacaggctcaggttccagaggacgaacaacccctgcagtgagggcctgctgtctgggatgtgtcaggtctgggaggcggtgttgctatggagaaaaccatagtagggaagggaggaaggggtgcagttttagagcagagaaggtgaaaagacaccaacaagtaagatcctaaaacagggcagagagggagccacgtagggatttggaggaagagcattccgggcatcacaaagagccgttgcaggccaggcacggtggctcacgcctgtcgtcccagcactttgggaagctgaggcaggcagataacctaaggtcaggagtttgagaccagcctggccaacatggcgaaaccccgtccctactaaaaatacaaaaattagctgggtgtggtggcacaggcctgtaatcccagctactcgggaggctgaggcaggagaatcacttgaacctggaagacagaggttgcagtgagcagagatcatgccactccactccagcctggggaac

SEQ ID NO: 459115 - DNA, 757 bp, Homo sapiens
gttatactgctgctgctgcataggtacatggtataagaatcatgttttttttatctttgagaaaatgagttaaaggcttgcttcttcacttaactgcaacacagtttacagattcagatttcacattttgctaagtataaatgacatatcttaagactaatgaaaactttcatgttttacttgtatttattatggtaacttttcttttcatagccatgttcactgcccacttcccatgagatttctccagtgcccgccagacctgactggaaaaagtcattatcttgatgaagcagatgtattttacctaaatcccttaaactggttacatagagagtttcatgatgatgcatcattgcctactcacttgatcaccttcagcattttggaagaggaaataagcgctttcctaatttcaagcaattataaaagaactgctgttttcttccacactcacttgccagagggtcgaattggaagtcacatatatgtctatgaacggaagttaaaagggaaattcaacatgaagatgaaattctgaactttcctagataaattaacattgctgggtggaaatattcagatgctgcttaaatacttcggtaaacactgggtaagattcatggaacttagaaaaaagctgtatgaactgctttaccaaatatcactactgaggaaatgtataaaataccacatagtataaaattacatgttaatacaatgccagattttaaataaagacctttagttttcctca

SEQ ID NO: 459116 - DNA, 1004 bp, Homo sapiens
cttggcactaacacatttctatttatttttccttcaacggtgccagtggactctggttcaatttaattttttgaaatttaacgtgctgcagaactggggaacattttatggttctcatccatggcactggtacttcagtcaaggatttccagttatcttgggtactcacttacccttctttattcatggctgctatctagcaccaaagagataccggatacttttggtgactgtgctgtggacactgcttgtttataggtaagattttatttgttcaaaaggctaaaattttttatgttaccaagaaatcaaattaaattcttcaaaaagtaaactttatgttttggaggtgccattaacttttgttagtgggaattatcttagaagatacaagtagtagtaattatggaggcactagagtgaatactttagatatgtagtttgcttaataaggattacactcaatttttaagaacttggactaattttatttgctttaaaaaaaaaaaaaacagaccaggcacagttgctcatgcctgtaatttcaatactttgaaggccaaggtgggaggattgcttgaagcaaggagttcatgaccagcctgagcaacatagcaagaccctctctctgaaaaaaaatttaaaattaccagggcatgatggcatgtgcctgtagtcctagctattggggaagctgaggcagaaggactgcttgagcccaggaatttaaggttgcagtgagctatgattgtgctactgcactccagtctgggtgacaaaacaagaccctgtctcagtcaatcagtcaatcaatactaccaaaattttaaattgaaggaccacagaaatacattctaaaataaaaatgtatgtatccttattccaaatttgactaatttcacttacttggattgaaatagaaatcccgtttttagaatgtaactgtactttgtaatttcaaattgacatcatattttatgattagttttaccatatcataatca

SEQ ID NO: 459117 - DNA, 2937 bp, Homo sapiens
cttttcgtcaaccccttgtggtgttgtcccttatgggtccatatgctgcctatttgctttccgtcgcttttggtgtcgctccttcggggggcctagggtcccgactgttttagattttggcaaaccttaggtttcagcaaatgacttcgtttaccctggaggtccaatttcccagggctgccactttactgccaaccgtagggtaggagcttccaagtgttcacatcgtcacaccactggaatttccatcgtgtgacgcagtcatcctgtatcccagctgctcgggagtctgggattacaggcgcatgccaccaagcctggctgatttttgtatttttagtagagacagggtttcaccatgttggtcaggctggtcttgaactcctgaccacctgatccacccgcctcggcctcccaaagtgctgggattacaggcgtgagccactgcgccaggcctaactccatgtagtattaacttttcttctcttctgattcttgtaccaactgcatcttttcttgttaattccttctgatctttggcatactgttcaaatactggttgaaaaatatatactcctccagcaattccaaggacagtggcaaaaagcagttgtgcaaaagtcaatctcctaaacattgctgcaacaaatacagctcaaggaaaagctggttttggaaagtcacactccacacccaggaaatctcttcaaatcgtttttaataaccactcaggtacctccgactgttctgcgcctgctccacgtcactaaactcgctaccgcctgctcccctccagagaccgggggccttccagcagttttcggacccccgagcacagagaccgccaagccaaaggcgagtagcaatccctcggttcggaaacggcgaaaggaaaccgcaaggaggccaccacgtcgggtgggagctacgaagttgcccgttcccggttacttccgggcttgcgagcgacgactgctctcaaaggccaaacttaatggatggacgagcagcgcgctactgcagctttcttccgccttaggaaggtggcggccagggatgaggaggcccctaagcaagtgcggaatggagccggggggcggagatgccagcctcactttgcatggtctccagaaccgctcccacggcaagataaagctgcgaaagagaaagtctaccttgtacttcaacacccaggagaagagcgccaggcgccgcggggatcttcttggagaaaatatttatctgctcttgtttaccatagctttacgaatattaaactgctttttagtgcagacaagttttgttccagatgaatactggcagtctcttgaagtttcacatcacatggttttcaattatggttatttgacttgggaatggacagagagactgaggagttacacttatcccttaatctttgcaagcatttacaagattcttcatcttttagggaaagatagtgttcagttgctgatttggattcctagacttgcccaagcacttctgtctgctgtagcagatgtgagactttactcattaatgaagcaactagaaaatcaggaagtggcaagatgggtgtttttttgccagttgtgctcctggttcacatggtattgctgtaccagaacccttacaaacaccatggaaactgttctcactataattgctcttttctactatcctttggaaggttcaaagtctatgaacagtgtcaaatactcatccctggtggcacttgccttcataattcgtcccacagctgtcattctgtggacacctttgctcttcagacatttctgtcaagaaccaagaaagcttgatcttattctacatcattttttacctgtaggctttgttactttgagtttgtctctgatgattgatcgtattttttttggccaatggactctggttcaatttaattttttgaaatttaacgtgctgcagaactggggaacattttatggttctcatccatggcactggtacttcagtcaaggatttccagttatcttgggtactcacttacccttctttattcatggctgctatctagcaccaaagagataccggatacttttggtgactgtgctgtggacactgcttgtttatagcatgttgagccacaaagaattcaggtttatttatccagttttaccattctgtatggtgttctgtggatactcattaacccacctgaaaacatggaagaaaccagctctaagtttcctgtttttatcaaatttgttcctcgccctttatactggtttagttcatcaacgaggtactcttgatgtcatgagtcatattcaaaaagtttgttacaacaatcccaataaatcttcagcttcaatatttataatgatgccttgccactctactccttattacagccatgttcactgcccacttcccatgagatttctccagtgcccgccagacctgactggaaaaagtcattatcttgatgaagcagatgtattttacctaaatcccttaaactggttacatagagagtttcatgatgatgcatcattgcctactcacttgatcaccttcagcattttggaagaggaaataagcgctttcctaatttcaagcaattataaaagaactgctgttttcttccacactcacttgccagagggtcgaattggaagtcacatatatgtctatgaacggaagttaaaagggaaattcaacatgaagatgaaattctgaactttcctagataaattaacattgctgggtggaaatattcagatgctgcttaaatacttcggtaaacactgggtaagattcatggaacttagaaaaaagctgtatgaactgctttaccaaatatcactactgaggaaatgtataaaataccacatagtataaaattacatgttaatacaatgccagattttaaataaagacctttagttttcctca

SEQ ID NO: 459118 - DNA, 2683 bp, Homo sapiens
cttttcgtcaaccccttgtggtgttgtcccttatgggtccatatgctgcctatttgctttccgtcgcttttggtgtcgctccttcggggggcctagggtcccgactgttttagattttggcaaaccttaggtttcagcaaatgacttcgtttaccctggaggtccaatttcccagggctgccactttactgccaaccgtagggtaggagcttccaagtgttcacatcgtcacaccactggaatttccatcgtgtgacgcagtcatcctgtatcccagctgctcgggagtctgggattacaggcgcatgccaccaagcctggctgatttttgtatttttagtagagacagggtttcaccatgttggtcaggctggtcttgaactcctgaccacctgatccacccgcctcggcctcccaaagtgctgggattacaggcgtgagccactgcgccaggcctaactccatgtagtattaacttttcttctcttctgattcttgtaccaactgcatcttttcttgttaattccttctgatctttggcatactgttcaaatactggttgaaaaatatatactcctccagcaattccaaggacagtggcaaaaagcagttgtgcaaaagtcaatctcctaaacattgctgcaacaaatacagctcaaggaaaagctggttttggaaagtcacactccacacccaggaaatctcttcaaatcgtttttaataaccactcaggtacctccgactgttctgcgcctgctccacgtcactaaactcgctaccgcctgctcccctccagagaccgggggccttccagcagttttcggacccccgagcacagagaccgccaagccaaaggcgagtagcaatccctcggttcggaaacggcgaaaggaaaccgcaaggaggccaccacgtcgggtgggagctacgaagttgcccgttcccggttacttccgggcttgcgagcgacgactgctctcaaaggccaaacttaatggatggacgagcagcgcgctactgcagctttcttccgccttaggaaggtggcggccagggatgaggaggcccctaagcaagtgcggaatggagccggggggcggagatgccagcctcactttgcatggtctccagaaccgctcccacggcaagataaagctgcgaaagagaaagtctaccttgtacttcaacacccaggagaagagcgccaggcgccgcggggatttggattcctagacttgcccaagcacttctgtctgctgtagcagatgtgagactttactcattaatgaagcaactagaaaatcaggaagtggcaagatgggtgtttttttgccagttgtgctcctggttcacatggtattgctgtaccagaacccttacaaacaccatggaaactgttctcactataattgctcttttctactatcctttggaaggttcaaagtctatgaacagtgtcaaatactcatccctggtggcacttgccttcataattcgtcccacagctgtcattctgtggacacctttgctcttcagacatttctgtcaagaaccaagaaagcttgatcttattctacatcattttttacctgtaggctttgttactttgagtttgtctctgatgattgatcgtattttttttggccaatggactctggttcaatttaattttttgaaatttaacgtgctgcagaactggggaacattttatggttctcatccatggcactggtacttcagtcaaggatttccagttatcttgggtactcacttacccttctttattcatggctgctatctagcaccaaagagataccggatacttttggtgactgtgctgtggacactgcttgtttatagcatgttgagccacaaagaattcaggtttatttatccagttttaccattctgtatggtgttctgtggatactcattaacccacctgaaaacatggaagaaaccagctctaagtttcctgtttttatcaaatttgttcctcgccctttatactggtttagttcatcaacgaggtactcttgatgtcatgagtcatattcaaaaagtttgttacaacaatcccaataaatcttcagcttcaatatttataatgatgccttgccactctactccttattacagccatgttcactgcccacttcccatgagatttctccagtgcccgccagacctgactggaaaaagtcattatcttgatgaagcagatgtattttacctaaatcccttaaactggttacatagagagtttcatgatgatgcatcattgcctactcacttgatcaccttcagcattttggaagaggaaataagcgctttcctaatttcaagcaattataaaagaactgctgttttcttccacactcacttgccagagggtcgaattggaagtcacatatatgtctatgaacggaagttaaaagggaaattcaacatgaagatgaaattctgaactttcctagataaattaacattgctgggtggaaatattcagatgctgcttaaatacttcggtaaacactgggtaagattcatggaacttagaaaaaagctgtatgaactgctttaccaaatatcactactgaggaaatgtataaaataccacatagtataaaattacatgttaatacaatgccagattttaaataaagacctttagttttcctca

SEQ ID NO: 459119 - DNA, 913 bp, Homo sapiens
gtgaatggtcagagatatgacttattgcttatttcttatttgtctataacagtattacagtttttgctatttccattaaaaattacagatgtatttgcagttaacataacaaaagattgtcagtgttaaggttcaatatgtctatcttcatataggatactcattaacccacctgaaaacatggaagaaaccagctctaagtttcctgtttttatcaaatttgttcctcgccctttatactggtttagttcatcaacgaggtactcttgatgtcatgagtcatattcaaaaagtttgttacaacaatcccaataaatcttcagcttcaatatttataatgatgccttgccactctactccttattacagccatgttcactgcccacttcccatgagatttctccagtgcccgccagacctgactggaaaaagtcattatcttgatgaagcagatgtattttacctaaatcccttaaactggttacatagagagtttcatgatgatgcatcattgcctactcacttgatcaccttcagcattttggaagaggaaataagcgctttcctaatttcaagcaattataaaagaactgctgttttcttccacactcacttgccagagggtcgaattggaagtcacatatatgtctatgaacggaagttaaaagggaaattcaacatgaagatgaaattctgaactttcctagataaattaacattgctgggtggaaatattcagatgctgcttaaatacttcggtaaacactgggtaagattcatggaacttagaaaaaagctgtatgaactgctttaccaaatatcactactgaggaaatgtataaaataccacatagtataaaattacatgttaatacaatgccagattttaaataaagacctttagttttcctca

SEQ ID NO: 459120 - DNA, 2860 bp, Homo sapiens
cttttcgtcaaccccttgtggtgttgtcccttatgggtccatatgctgcctatttgctttccgtcgcttttggtgtcgctccttcggggggcctagggtcccgactgttttagattttggcaaaccttaggtttcagcaaatgacttcgtttaccctggaggtccaatttcccagggctgccactttactgccaaccgtagggtaggagcttccaagtgttcacatcgtcacaccactggaatttccatcgtgtgacgcagtcatcctgtatcccagctgctcgggagtctgggattacaggcgcatgccaccaagcctggctgatttttgtatttttagtagagacagggtttcaccatgttggtcaggctggtcttgaactcctgaccacctgatccacccgcctcggcctcccaaagtgctgggattacaggcgtgagccactgcgccaggcctaactccatgtagtattaacttttcttctcttctgattcttgtaccaactgcatcttttcttgttaattccttctgatctttggcatactgttcaaatactggttgaaaaatatatactcctccagcaattccaaggacagtggcaaaaagcagttgtgcaaaagtcaatctcctaaacattgctgcaacaaatacagctcaaggaaaagctggttttggaaagtcacactccacacccaggaaatctcttcaaatcgtttttaataaccactcaggtacctccgactgttctgcgcctgctccacgtcactaaactcgctaccgcctgctcccctccagagaccgggggccttccagcagttttcggacccccgagcacagagaccgccaagccaaaggcgagtagcaatccctcggttcggaaacggcgaaaggaaaccgcaaggaggccaccacgtcgggtgggagctacgaagttgcccgttcccggttacttccgggcttgcgagcgacgactgctctcaaaggccaaacttaatggatggacgagcagcgcgctactgcagctttcttccgccttaggaaggtggcggccagggatgaggaggcccctaagcaagtgcggaatggagccggggggcggagatgccagcctcactttgcatggtctccagaaccgctcccacggcaagataaagctgcgaaagagaaagtctaccttgtacttcaacacccaggagaagagcgccaggcgccgcggggatcttcttggagaaaatatttatctgctcttgtttaccatagctttacgaatattaaactgctttttagtgcagacaagttttgttccagatgaatactggcagtctcttgaagtttcacatcacatggttttcaattatggttatttgacttgggaatggacagagagactgaggagttacacttatcccttaatctttgcaagcatttacaagattcttcatcttttagggaaagatagtgttcagttgctgatttggattcctagacttgcccaagcacttctgtctgctgtagcagatgtgagactttactcattaatgaagcaactagaaaatcaggaagtggcaagatgggtgtttttttgccagttgtgctcctggttcacatggtattgctgtaccagaacccttacaaacaccatggaaactgttctcactataattgctcttttctactatcctttggaaggttcaaagtctatgaacagtgtcaaatactcatccctggtggcacttgccttcataattcgtcccacagctgtcattctgtggacacctttgctcttcagacatttctgtcaagaaccaagaaagcttgatcttattctacatcattttttacctgtaggctttgttactttgagtttgtctctgatgattgatcgtattttttttggccaatggactctggttcaatttaattttttgaaatttaacgtgctgcagaactggggaacattttatggttctcatccatggcactggtacttcagtcaaggatttccagttatcttgggtactcacttacccttctttattcatggctgctatctagcaccaaagagataccggatacttttggtgactgtgctgtggacactgcttgtttataggtaagattttatttgttcaaaaggctaaaattttttatgttaccaagaaatcaaattaaattcttcaaaaagtaaactttatgttttggaggtgccattaacttttgttagtgggaattatcttagaagatacaagtagtagtaattatggaggcactagagtgaatactttagatatgtagtttgcttaataaggattacactcaatttttaagaacttggactaattttatttgctttaaaaaaaaaaaaaacagaccaggcacagttgctcatgcctgtaatttcaatactttgaaggccaaggtgggaggattgcttgaagcaaggagttcatgaccagcctgagcaacatagcaagaccctctctctgaaaaaaaatttaaaattaccagggcatgatggcatgtgcctgtagtcctagctattggggaagctgaggcagaaggactgcttgagcccaggaatttaaggttgcagtgagctatgattgtgctactgcactccagtctgggtgacaaaacaagaccctgtctcagtcaatcagtcaatcaatactaccaaaattttaaattgaaggaccacagaaatacattctaaaataaaaatgtatgtatccttattccaaatttgactaatttcacttacttggattgaaatagaaatcccgtttttagaatgtaactgtactttgtaatttcaaattgacatcatattttatgattagttttaccatatcataatca

SEQ ID NO: 459121 - DNA, 1064 bp, Homo sapiens
gttatactgctgctgctgcataggtacatggtataagaatcatgttttttttatctttgagaaaatgagttaaaggcttgcttcttcacttaactgcaacacagtttacagattcagatttcacattttgctaagtataaatgacatatcttaagactaatgaaaactttcatgttttacttgtatttattatggtaacttttcttttcatagccatgttcactgcccacttcccatgagatttctccagtgcccgccagacctgactggaaaaagtcattatcttgatgaagcagatgtattttacctaaatcccttaaactggttacatagagagtttcatgatgatgcatcattgcctactcacttgatcaccttcagcattttggaagaggtaagtaaacatgaaaaagaggaaaactcagtattttaattttaccccaggtttaggaaaccctcaggtaaatagataatataacctttttatggtctgtttcaacccacatttcataattagtcttttctccagtcaaaattagccccagttctgtaactatcaaagtattttacttcctataagttaattcttttattaagcaaaaagttgtagacagcaattagaataggcaattctaaaattgactgaaacagtactcagcaaaatgtagcctttatttacttaaacatttatttgcttctaggaaataagcgctttcctaatttcaagcaattataaaagaactgctgttttcttccacactcacttgccagagggtcgaattggaagtcacatatatgtctatgaacggaagttaaaagggaaattcaacatgaagatgaaattctgaactttcctagataaattaacattgctgggtggaaatattcagatgctgcttaaatacttcggtaaacactgggtaagattcatggaacttagaaaaaagctgtatgaactgctttaccaaatatcactactgaggaaatgtataaaataccacatagtataaaattacatgttaatacaatgccagattttaaataaagacctttagttttcctca

SEQ ID NO: 459122 - DNA, 1740 bp, Homo sapiens
  misc_feature (1672)..(1672): n is a, c, g, or t
  misc_feature (1677)..(1677): n is a, c, g, or t
  misc_feature (1727)..(1727): n is a, c, g, or t
cttttcgtcaaccccttgtggtgttgtcccttatgggtccatatgctgcctatttgctttccgtcgcttttggtgtcgctccttcggggggcctagggtcccgactgttttagattttggcaaaccttaggtttcagcaaatgacttcgtttaccctggaggtccaatttcccagggctgccactttactgccaaccgtagggtaggagcttccaagtgttcacatcgtcacaccactggaatttccatcgtgtgacgcagtcatcctgtatcccagctgctcgggagtctgggattacaggcgcatgccaccaagcctggctgatttttgtatttttagtagagacagggtttcaccatgttggtcaggctggtcttgaactcctgaccacctgatccacccgcctcggcctcccaaagtgctgggattacaggcgtgagccactgcgccaggcctaactccatgtagtattaacttttcttctcttctgattcttgtaccaactgcatcttttcttgttaattccttctgatctttggcatactgttcaaatactggttgaaaaatatatactcctccagcaattccaaggacagtggcaaaaagcagttgtgcaaaagtcaatctcctaaacattgctgcaacaaatacagctcaaggaaaagctggttttggaaagtcacactccacacccaggaaatctcttcaaatcgtttttaataaccactcaggtacctccgactgttctgcgcctgctccacgtcactaaactcgctaccgcctgctcccctccagagaccgggggccttccagcagttttcggacccccgagcacagagaccgccaagccaaaggcgagtagcaatccctcggttcggaaacggcgaaaggaaaccgcaaggaggccaccacgtcgggtgggagctacgaagttgcccgttcccggttacttccgggcttgcgagcgacgactgctctcaaaggccaaacttaatggatggacgagcagcgcgctactgcagctttcttccgccttaggaaggtggcggccagggatgaggaggcccctaagcaagtgcggaatggagccggggggcggagatgccagcctcactttgcatggtctccagaaccgctcccacggcaagataaagctgcgaaagagaaagtctaccttgtacttcaacacccaggagaagagcgccaggcgccgcggggatcttcttggagaaaatatttatctgctcttgtttaccatagctttacgaatattaaactgctttttagtgcagacaagttttgttccagatgaatactggcagtctcttgaagtttcacatcacatggttttcaattatggttatttgacttgggaatggacagagagactgaggagttacacttatcccttaatctttgcaagcatttacaagattcttcatcttttagggaaagatagtgttcagttgctgatttggattcctagacttgcccaagcacttctgtctgctgtagcagatgtgagactttactcattaatgaagcaactagaaaatcaggaagtggcaagatgggtgtttttttgccagttgtgctcctggttcacatggtattgctgtaccagaacccttacaaacaccaatgggaaaactggttcctcaactaataaanttgcncctttttcccaactaaacccctttggggaaagggtttcaaaaaggtcccnaatggaaaccaag

SEQ ID NO: 459123 - DNA, 732 bp, Homo sapiens
tagatacacacatagtatgacctaattaattagcctaaggccttagttaacccactcttttttttttgtatttattttaatattatctttacacaataagttgcaagaaaagttggttaaactaaaagagtggcagtcacccagtgatgacgctgtggtgcttgtataaccaaccaagttggctttaagaatggtgtggagggaccagaggtcactactgtgccttacaaggagccaaccagagcagcagattttaagttttgcaagtggaactgcctgacttttgtgccactattacctgttttgttctgtttttcagatcttcttggagaaaatatttatctgctcttgtttaccatagctttacgaatattaaactgctttttagtgcagacaagttttgttccagatgaatactggcagtctcttgaagtttcacatcacatggttttcaaatatcctttgtggtttcttttccagactatgagtgtgtattcatcttggaaattgtgctcagtttcttttagagtagtcccccttgctccctcgtcttcagtagatagtttccaaaatccctagtggatgcttgaaactgtagacagtaccaaactctatatatattgtttttatatatgtaaaaaatacacacacgcttatgataaagtttatacaaattaggtacagtaagagattaacagtattaaaatataacaagtataacacaatactata

SEQ ID NO: 459124 - DNA, 571 bp, Homo sapiens
gcgtggtggcgcgcctgtagtcccagctacttgggagctgaggcaggaaaatcactggaacccgggaggcagaagttgcagtgagcccagattgcgccactgcactccagcctggactacaagagcgaaactccgtctcaaaaaaaaaaacaaaaacaaaaacaaaaaaaaaacctaacaacagcaacaacaacaaaaaaaataggaaccattcggcctgtttccacatctgtacaacaagctaaatcatccctaccctgcctacctcgttgaacaggcattttttgtgagagcaacgaacctgaaatgttaacaccaacactgacgtctacaattaccgttaccgtttttaataaccactcaggtacctccgactgttctgcgcctgctccacgtcactaaactcgctaccgcctgctcccctccagagaccgggggccttccagcagttttcggacccccgagcacagagaccgccaagccaaaggcgagtagcaatccctcggttcggaaacggcgaaaggaaaccgcaaggaggccaccacgtcgggtgggagctacgaagttgccc

SEQ ID NO: 459125 - DNA, 3244 bp, Homo sapiens
cttttcgtcaaccccttgtggtgttgtcccttatgggtccatatgctgcctatttgctttccgtcgcttttggtgtcgctccttcggggggcctagggtcccgactgttttagattttggcaaaccttaggtttcagcaaatgacttcgtttaccctggaggtccaatttcccagggctgccactttactgccaaccgtagggtaggagcttccaagtgttcacatcgtcacaccactggaatttccatcgtgtgacgcagtcatcctgtatcccagctgctcgggagtctgggattacaggcgcatgccaccaagcctggctgatttttgtatttttagtagagacagggtttcaccatgttggtcaggctggtcttgaactcctgaccacctgatccacccgcctcggcctcccaaagtgctgggattacaggcgtgagccactgcgccaggcctaactccatgtagtattaacttttcttctcttctgattcttgtaccaactgcatcttttcttgttaattccttctgatctttggcatactgttcaaatactggttgaaaaatatatactcctccagcaattccaaggacagtggcaaaaagcagttgtgcaaaagtcaatctcctaaacattgctgcaacaaatacagctcaaggaaaagctggttttggaaagtcacactccacacccaggaaatctcttcaaatcgtttttaataaccactcaggtacctccgactgttctgcgcctgctccacgtcactaaactcgctaccgcctgctcccctccagagaccgggggccttccagcagttttcggacccccgagcacagagaccgccaagccaaaggcgagtagcaatccctcggttcggaaacggcgaaaggaaaccgcaaggaggccaccacgtcgggtgggagctacgaagttgcccgttcccggttacttccgggcttgcgagcgacgactgctctcaaaggccaaacttaatggatggacgagcagcgcgctactgcagctttcttccgccttaggaaggtggcggccagggatgaggaggcccctaagcaagtgcggaatggagccggggggcggagatgccagcctcactttgcatggtctccagaaccgctcccacggcaagataaagctgcgaaagagaaagtctaccttgtacttcaacacccaggagaagagcgccaggcgccgcggggatcttcttggagaaaatatttatctgctcttgtttaccatagctttacgaatattaaactgctttttagtgcagacaagttttgttccagatgaatactggcagtctcttgaagtttcacatcacatggttttcaattatggttatttgacttgggaatggacagagagactgaggagttacacttatcccttaatctttgcaagcatttacaagattcttcatcttttagggaaagatagtgttcagttgctgatttggattcctagacttgcccaagcacttctgtctgctgtagcagatgtgagactttactcattaatgaagcaactagaaaatcaggaagtggcaagatgggtgtttttttgccagttgtgctcctggttcacatggtattgctgtaccagaacccttacaaacaccatggaaactgttctcactataattgctcttttctactatcctttggaaggttcaaagtctatgaacagtgtcaaatactcatccctggtggcacttgccttcataattcgtcccacagctgtcattctgtggacacctttgctcttcagacatttctgtcaagaaccaagaaagcttgatcttattctacatcattttttacctgtaggctttgttactttgagtttgtctctgatgattgatcgtattttttttggccaatggactctggttcaatttaattttttgaaatttaacgtgctgcagaactggggaacattttatggttctcatccatggcactggtacttcagtcaaggatttccagttatcttgggtactcacttacccttctttattcatggctgctatctagcaccaaagagataccggatacttttggtgactgtgctgtggacactgcttgtttatagcatgttgagccacaaagaattcaggtttatttatccagttttaccattctgtatggtgttctgtggatactcattaacccacctgaaaacatggaagaaaccagctctaagtttcctgtttttatcaaatttgttcctcgccctttatactggtttagttcatcaacgaggtactcttgatgtcatgagtcatattcaaaaagtttgttacaacaatcccaataaatcttcagcttcaatatttataatgatgccttgccactctactccttattacagccatgttcactgcccacttcccatgagatttctccagtgcccgccagacctgactggaaaaagtcattatcttgatgaagcagatgtattttacctaaatcccttaaactggttacatagagagtttcatgatgatgcatcattgcctactcacttgatcaccttcagcattttggaagaggtaagtaaacatgaaaaagaggaaaactcagtattttaattttaccccaggtttaggaaaccctcaggtaaatagataatataacctttttatggtctgtttcaacccacatttcataattagtcttttctccagtcaaaattagccccagttctgtaactatcaaagtattttacttcctataagttaattcttttattaagcaaaaagttgtagacagcaattagaataggcaattctaaaattgactgaaacagtactcagcaaaatgtagcctttatttacttaaacatttatttgcttctaggaaataagcgctttcctaatttcaagcaattataaaagaactgctgttttcttccacactcacttgccagagggtcgaattggaagtcacatatatgtctatgaacggaagttaaaagggaaattcaacatgaagatgaaattctgaactttcctagataaattaacattgctgggtggaaatattcagatgctgcttaaatacttcggtaaacactgggtaagattcatggaacttagaaaaaagctgtatgaactgctttaccaaatatcactactgaggaaatgtataaaataccacatagtataaaattacatgttaatacaatgccagattttaaataaagacctttagttttcctca

SEQ ID NO: 459126 - DNA, 2074 bp, Homo sapiens
cttttcgtcaaccccttgtggtgttgtcccttatgggtccatatgctgcctatttgctttccgtcgcttttggtgtcgctccttcggggggcctagggtcccgactgttttagattttggcaaaccttaggtttcagcaaatgacttcgtttaccctggaggtccaatttcccagggctgccactttactgccaaccgtagggtaggagcttccaagtgttcacatcgtcacaccactggaatttccatcgtgtgacgcagtcatcctgtatcccagctgctcgggagtctgggattacaggcgcatgccaccaagcctggctgatttttgtatttttagtagagacagggtttcaccatgttggtcaggctggtcttgaactcctgaccacctgatccacccgcctcggcctcccaaagtgctgggattacaggcgtgagccactgcgccaggcctaactccatgtagtattaacttttcttctcttctgattcttgtaccaactgcatcttttcttgttaattccttctgatctttggcatactgttcaaatactggttgaaaaatatatactcctccagcaattccaaggacagtggcaaaaagcagttgtgcaaaagtcaatctcctaaacattgctgcaacaaatacagctcaaggaaaagctggttttggaaagtcacactccacacccaggaaatctcttcaaatcgtttttaataaccactcaggtacctccgactgttctgcgcctgctccacgtcactaaactcgctaccgcctgctcccctccagagaccgggggccttccagcagttttcggacccccgagcacagagaccgccaagccaaaggcgagtagcaatccctcggttcggaaacggcgaaaggaaaccgcaaggaggccaccacgtcgggtgggagctacgaagttgcccgttcccggttacttccgggcttgcgagcgacgactgctctcaaaggccaaacttaatggatggacgagcagcgcgctactgcagctttcttccgccttaggaaggtggcggccagggatgaggaggcccctaagcaagtgcggaatggagccggggggcggagatgccagcctcactttgcatggtctccagaaccgctcccacggcaagataaagctgcgaaagagaaagtctaccttgtacttcaacacccaggagaagagcgccaggcgccgcggggatcttcttggagaaaatatttatctgctcttgtttaccatagctttacgaatattaaactgctttttagtgcagacaagttttgttccagatgaatactggcagtctcttgaagtttcacatcacatggttttcaattatggttatttgacttgggaatggacagagagactgaggagttacacttatcccttaatctttgcaagcatttacaagattcttcatcttttagggaaagatagtgttcagttgctgatttggattcctagacttgcccaagcacttctgtctgctgtagcagatgtgagactttactcattaatgaagcaactagaaaatcaggaagtggcaagatgggtggtaagtcctaaatactttagaagctgtatgccagttatttcgttcctatgggtataaagcacatggaaacattgattcccaaaacaattttagaagataattcatacaactttatagaggtacttccataaataagaacagtaatatgcaagtggcacctgccatatctttccttcggattaagccctgcacagtgtaagccactgatgccctcaaaccctatgagagtctaaaccctgggagacaacctttggaagccccttcactcctcaaaactgtccttgcctctctttccatagaattgagtagggatcgttctaaattaccagctacctcacaaagcatcttagctatttacaacccttgttctgttcctctagccagcctctatctgaggtgcagcccgagaaatctttttgcactgaaactctcacttctgaatgggatgttggaagtattaggttggtgcaaaagtaattgtcgtttgtgccacaac

SEQ ID NO: 459127 - DNA, 2622 bp, Homo sapiens
gtttccttccccctgaatcctggattcctctcaacctcctgttcatggtcttccaggaaggctgtttgcctgccttagtagttctgcttattcctagccagagaggggactgaagtggtcagatagggcaaagccagtgctcaatggctgctgtgggggcactaccctctgctccccaccactggtcctgccctttgcagacaacctaaagtcctcccttggccagagctctcccagtgttgatgctggcctggatgctgtgtgtctggaggctctttcacggaaggaggggtgttggaaaagaggaaaaggagcccagtgaggagctagaaggagaaaaggagaatgagggcaagtgggtgtggatatgcgtgtctgtgagtgcctgcctacccctctccaagcctgctgtctcttctgtatgtgcacgtgtctgtctcccagagaagctgtgctcagccagacagacggaaagggatcccagacttgggatctatgaatgagagcctcagactctgaagttgctcccagcgagatgcaccaggccccacggcaagagcgaaaaggcagcagcaagatgctgatggcgtgagaggtgtcaacatcagaggtgccagcatgaggaggatggcctcctctcccagcagggggcatgctgcagcccctgaagaccaccagccagagccctggtcagaaaccagtgtgattccattgccattcccctgtgaggcctggaaggagaggagtctgtctgaagaggagccactcaggccgccaagctgcctgggtgcccatccccagatcatgttgccccagctggggccctaccctgcccccaggtccctggcaccatgtgccccgcaggagcagacctccacatttaccctcctgcctttgggctgagagtctcccctccatcttccccatattcttgaggactctctgacacttggcagaaaccaggatctgttgggctgggcagtcaggttctttctccagcctcctctcctgtgagcatttcaagctggcgaggcactctgagccggaccctaccctgaggctggcagcatcccaggtgtgtggctgtgggagaggcctgtagccctcgctcactgctgtgttcttgcaccctgcagagatccagaagctggtgctggagggccgtgtgggcgaggccatcgagaccacccagcgcttctacccagggctgctggagcacaaccccaacctcctcttcatgctcaagtgccggcagtttgtggagatggtgaatgggacggacagtgaggtccgaagtttgagctcccgaagccccaagtcccaggacagctaccctggctcccccagcctcagtccccgacatggccccagtagttcccacatgcacaacacaggagcagacagtcccagctgtagcaatggcgtcgcgtccaccaagagcaaacagaaccacagtaaataccctgcacccagctcctcatcctcgtcctcctcctcctcctcgtcctcttccccatcctccgtcaattactccgagtccaactcaacagactccaccaagtcccagcaccacagcagtaccagtaaccaggagaccagcaacccatggctacagcttgaaaggaggcccaaccaggctgctccaaccacaccccctgggccaactcccacctcaacccctccccacagcgacagtgagatggagatggaggcagagcactaccccaacggtgtgctaggaagcatgtccacacgcattgttaatggtgcctacaagcatgaggacctgcagacggatgagtccagcatggatgacaggcatcctcggcggcagctctgcgggggcaaccaggctgccacagaaaggatcattctgtttggccgcgagttgcaggcattgagtgagcagttgggccgggagtacggcaagaatttggcccacacagagatgctgcaggatgccttcagcctgctggcatactcagacccctggagctgcccagttggccagcagcttgaccccatccagagggaacctgtgtgtgctgccctcaacagcgccattttagttctacccagggctgctggagcacaaccccaacctcctcttcatgctcaagtgccggcagtttgtggagatggtgaatgggacggacagtgaggtccgaagtttgagctcccgaagccccaagtcccaggacagctaccctggctcccccagcctcagtccccgacatggccccagtagttcccacatgcacaacacaggagcagacagtcccagctgtagcaatggcgtcgcgtccaccaagagcaaacagaaccacagtaaataccctgcacccagctcctcatcctcgtcctccgcattttcctctttgcattgggttttcctgcattagtaactacagctgcaacagacatcctccacattgtgcacactggttttgcctttgtcctcaagagttgatacttggcattagcatgaaacttgtgggtgtgggaggatggagagagaactctaacacaaaacatcttattaaaattgtacttgagagacaaaaaaaaaactctgttgtattttgacagaattatttttattaaaatacacatccatgagca

SEQ ID NO: 459128 - DNA, 904 bp, Homo sapiens
tagcaaaggtggactgggacccggcagcgggtgccctgagagtcaaccactacagccgatttgaccccagttacatgggaataggactctcggctcaaggcgtcaacatgaacagacttcctggttgggacaaacattcctatggttaccatggtgatgatgggcattcgttctgctcctcggggactggccagccctatggtcccacattcaccacaggagacgtgatcggctgctgtgtcaacctcatcaatggcacctgcttctacaccaagaatggccacagccttggtatagccttcacagacctcccggccaacctctaccccaccgtaggcctgcagacacctggggagattgtggacgccaactttgggcagcagcccttcctgtttgacattgaggactacatgcgggagtggcgtgccaaggtccagggcacggtccactgcttccccatcagtgcccggcttggcgagtggcaggcagtgctgcagaacatggtttcatcttacctcgtgcatcatgggtattgtgccacagccacggcttttgctcgaatgactgaaaccccgattcaggaagaacaggcgtccataaagaacagacaaaagatccagaagactggatgctgggagggacgagatggggcgaggccatcggagaaacaacccagacagctactaacccagggatgctggagaaaacaacacgaacatccttcttcaatggcatcaaaggtagacggaaggaacagaggaaagaatggctgaacatggaacggaaaagagaaagacacggaagataaggaacagccaagaaaagcgccaaaagccacaaggaacagaaaaccgagaagacacacagcacacaaaacccgagaaagagccaagagcgaccaaga

SEQ ID NO: 459129 - DNA, 5773 bp, Homo sapiens
tagcaaaggtggactgggacccggcagcgggtgccctgagagtcaaccactacagccgatttgaccccagttacatgggaataggactctcggctcaaggcgtcaacatgaacagacttcctggttgggacaaacattcctatggttaccatggtgatgatgggcattcgttctgctcctcggggactggccagccctatggtcccacattcaccacaggagacgtgatcggctgctgtgtcaacctcatcaatggcacctgcttctacaccaagaatggccacagccttggtatagccttcacagacctcccggccaacctctaccccaccgtaggcctgcagacacctggggagattgtggacgccaactttgggcagcagcccttcctgtttgacattgaggactacatgcgggagtggcgtgccaaggtccagggcacggtccactgcttccccatcagtgcccggcttggcgagtggcaggcagtgctgcagaacatggtttcatcttacctcgtgcatcatgggtattgtgccacagccacggcttttgctcgaatgactgaaaccccgattcaggaagaacaggcgtccataaagaacagacaaaagatccagaagctggtgctggagggccgtgtgggcgaggccatcgagaccacccagcgcttctacccagggctgctggagcacaaccccaacctcctcttcatgctcaagtgccggcagtttgtggagatggtgaatgggacggacagtgaggtccgaagtttgagctcccgaagccccaagtcccaggacagctaccctggctcccccagcctcagtccccgacatggccccagtagttcccacatgcacaacacaggagcagacagtcccagctgtagcaatggcgtcgcgtccaccaagagcaaacagaaccacagtaaataccctgcacccagctcctcatcctcgtcctcctcctcctcctcgtcctcttccccatcctccgtcaattactccgagtccaactcaacagactccaccaagtcccagcaccacagcagtaccagtaaccaggagaccagcaacccatggctacagcttgaaaggaggcccaaccaggctgctccaaccacaccccctgggccaactcccacctcaacccctccccacagcgacagtgagatggagatggaggcagagcactaccccaacggtgtgctaggaagcatgtccacacgcattgttaatggtgcctacaagcatgaggacctgcagacggatgagtccagcatggatgacaggcatcctcggcggcagctctgcgggggcaaccaggctgccacagaaaggatcattctgtttggccgcgagttgcaggcattgagtgagcagttgggccgggagtacggcaagaatttggcccacacagagatgctgcaggatgccttcagcctgctggcatactcagacccctggagctgcccagttggccagcagcttgaccccatccagagggaacctgtgtgtgctgccctcaacagcgccattttagagtcccagaacctgccaaagcagccccctctgatgctcgccctgggccaggcatctgagtgtctccggctcatggcccgagcaggcctgggttcttgctcctttgccagagttgatgactacttgcactagctgactgtgctggctggctctggctggccctccactggccccagggctggagctgccctgccctccataggcaactggtgcagggactgggaaaccatagacagagtccactcctcctgcctggcctttccccctctccctttccttccttccttcctttctctgcccaccaccccgctcagtctctctctctctccccttcacgtgcagcggcctgtaacacagtattggctggttactctcatgtagcgccttctattttgaaaggggggttttgttttgaggaggggttggggtttttaaatttttttctcctgactgagccaccagtatttatctctggagagtttgtgctgagctggtttctgctaatttagtgatgaagcctatccaagttggtgatagcttattattttcataagtaaaaaacaaatgagattatatatatatatataaaaatatatatattaaaaaaaaagacagtatttatcgtagcattagtggtccagcacctcttgggtgaggctgtccaggcaccatgttttctttgagtccaactcattaaaaaagaagaatctctgtcacctcagccaagtgatttattttttgctcccccttttttgagtcacaggccgagctgcagcctaggaaacccaaatagggtttggtgggccacttagtgggcatggttacattggtttatagcatcccaagaactgtagatccctaggcccctgagagctggacagagcagagaactacagggccaagggtccagagaagtgataacttggcccagggccacacagcagaggtagagggtccttggccagcacactatctaccactctaccccacctcccactgcctgccttgctcccctttcctcccttttcaataccctatcttcccttgttgttaagatggccaaataatacatttactctaaattgattgcctggaaactacctgccttcgtcctgagagcttctgtgtgtcaggctgctggaaagaagactccattcccaggacagaggcccttgagtacaggggctgctttcttcctgcctagatcttcaccatctctgcacagctctgagagaatggatgctttctgttgagaaaccagtaccttgtggaggcaggttcttgggctgctactccagggagtggatggaatccttggtcccctaggccagacttcactgccactgtgccagacagctccctgcagctgggccctagccactcttaggaaagactattgggagtatttgctggccagagaatgggactctatcagctttacacatgtcccaccagctgtttcagatagatccttacagctggcagagtaaaagtggtcccgctaccattggggaatcaggaaaggaaagactgagatggttgccaggacttggggtggcccacctgtggagaggactggctgccctggaggaggaaagggaggaagtctacacagaggagcaccaggacggctggaatttccatatgtgcttcacattgtgaggggagtgcacaagccgcccatgcaaagagtagggtcagccatggcaaggccggaagttgaactttcagtccctgcctgaatctgggctttgcaagctcctgctccatattggtggacatgggaatggttggtgtggcctgagatacccattgctcaccaggcctcactgggcccacagctgggcaacaagaaaaatgtttgaattggaccaactgctggtgatggggccagggccctgggccctgtgctgtcagaattctgccttgggaaatgatcctatagctgctgctttttcttggtccttggggctggcagacccatagaccatggcctgttaggaggcgtcctgtctgtaaaggaaattcatctcttgtgacagcctggggctacctagctcccaaacccagaagttggagacatcaggctgtttaaatgatcatagcctagcaggattggattaaaaccacaggcttttgcagctggaatggggttcagtgaacatctcccccattcctctcttgctacaaataaggaaacaggcccaggagattaagtgacttggctaaagtcacatagcaaattagtagcagagccgggactatcccttatccctgtgggttgggcaacactatttagtcctgaaaccgaatggcagataaaccccatgaggggtcaggctgatgtgccctccagcagtatctgagaagctgctaccttcaggggtgtgtcagggatgaggacgggtgcctgagcttaggttgtggagtggctgagagggcccaggagggctcgggacagctgtgtgctgcatggggttgggtgtctgcctggctcgcacttggtacccatggccacctccccattttctgtgccttatctcactgtttcagctgagtccaagttgtttactctgttcctctccagaggggctctctgtcccagttgggcagctcacctttgggacataagcctttgccccacaagctgtggagagggccaaaaccaagctgcttgagcccactctcttgctgagagtccaggcctgcctgcctgccagccagaggtgccccttatgcacatccagtcctaccagcctgcttccaggagcctagagtgggaaaggcacctgggggagccctggtgaagggctggacctgacccatggaggcaggaggaagacctggctttcttggtttgtccggccctggggagcagccttccctactcactttccccttgcggcaccaaatggtcactccttccagagcaaaaactggcactcatagcaagccagaacccccatccccatcctcatgggtctgtggctgggtgcaggccatcaaaatggacaccacgagacagaagtggggactgcctggccacctagcgccttcccactccttaagcaagcacaaagaagatgaggcagagaattgtcagagctgaaagttcctttggttgctcacaactcaggtatgcacccatgtggcagccaggcagcggagccctactagactgccagtctcatgcacccagacctgtggccagattgtggcctctggctgcctcaggcattttcctctttgcattgggttttcctgcattagtaactacagctgcaacagacatcctccacattgtgcacactggttttgcctttgtcctcaagagttgatacttggcattagcatgaaacttgtgggtgtgggaggatggagagagaactctaacacaaaacatcttattaaaattgtacttgagagacaaaaaaaaaactctgttgtattttgacagaattatttttattaaaatacacatccatgagcagtcatgtgtgtctggtctctgttttgagtcttactgaggttggcaccccttctgtgacacatcctgtcctaaaggatttgggcccttcccagcctctcaagtgcccaggccctcaggtgccttcttcaaggacctttgaaactgtgtatttgtaagaccccaaagaggacaggtacttaaacctcagttctctcttgaaacggctttcttcttatacaaggaaaaagtagcaaattcaactaaagagcctgggcacagtggctcacgcctataatctcagcacgttgggaggctgaggcaggtggatcccttgagctcaggagttcgagaacagcctgggcaacatggcaaaaccccatctctacaaaaaatacaaaaattagctgggcatgggggcgcattcctgtggtcccagctattcaggaggctgaggtgggaggatcactcgagcccaggaggtcaaggctgcagtgagttgagatcataccactgcactccggtctgggtgacagagtgagaccctgtctcaaaaaaaaaaaaaaaaaaaattcaactaaataaaggtgggccacaggaacttttccccacaaaaataaggtattaagaatacatttcagagccaggtgcagtggctcaccctgtaatcccagcactttgggaggccaaggcatgcagatcacctgaggtcaggagtttgagaccagcctagccaacatggtgaaaccccgtctctacaaaa

SEQ ID NO: 459130 - DNA, 5035 bp, Homo sapiens
tagcaaaggtggactgggacccggcagcgggtgccctgagagtcaaccactacagccgatttgaccccagttacatgggaataggactctcggctcaaggcgtcaacatgaacagacttcctggttgggacaaacattcctatggttaccatggtgatgatgggcattcgttctgctcctcggggactggccagccctatggtcccacattcaccacaggagacgtgatcggctgctgtgtcaacctcatcaatggcacctgcttctacaccaagaatggccacagccttggtatagccttcacagacctcccggccaacctctaccccaccgtaggcctgcagacacctggggagattgtggacgccaactttgggcagcagcccttcctgtttgacattgaggactacatgcgggagtggcgtgccaaggtccagggcacggtccactgcttccccatcagtgcccggcttggcgagtggcaggcagtgctgcagaacatggtttcatcttacctcgtgcatcatgggtattgtgccacagccacggcttttgctcgaatgactgaaaccccgattcaggaagaacaggcgtccataaagaacagacaaaagatccagaagctggtgctggagggccgtgtgggcgaggccatcgagaccacccagcgcttctacccagggctgctggagcacaaccccaacctcctcttcatgctcaagtgccggcagtttgtggagatggtgaatgggacggacagtgaggtccgaagtttgagctcccgaagccccaagtcccaggacagctaccctggctcccccagcctcagtccccgacatggccccagtagttcccacatgcacaacacaggagcagacagtcccagctgtagcaatggcgtcgcgtccaccaagagcaaacagaaccacagtaaataccctgcacccagctcctcatcctcgtcctcctcctcctcctcgtcctcttccccatcctccgtcaattactccgagtccaactcaacagactccaccaagtcccagcaccacagcagtaccagtaaccaggagaccagcaacccatggctacagcttgaaaggaggcccaaccaggctgctccaaccacaccccctgggccaactcccacctcaacccctccccacagcgacagtgagatggagatggaggcagagcactaccccaacggtgtgctaggaagcatgtccacacgcattgttaatggtgcctacaagcatgaggacctgcagacggatgagtccagcatggatgacaggcatcctcggcggcagctctgcgggggcaaccaggctgccacagaaaggatcattctgtttggccgcgagttgcaggcattgagtgagcagttgggccgggagtacggcaagaatttggcccacacagagatgctgcaggatgccttcagcctgctggcatactcagacccctggagctgcccagttggccagcagcttgaccccatccagagggaacctgtgtgtgctgccctcaacagcgccattttagagtcccagaacctgccaaagcagccccctctgatgctcgccctgggccaggcatctgagtgtctccggctcatggcccgagcaggcctgggttcttgctcctttgccagagttgatgactacttgcactagctgactgtgctggctggctctggctggccctccactggccccagggctggagctgccctgccctccataggcaactggtgcagggactgggaaaccatagacagagtccactcctcctgcctggcctttccccctctccctttccttccttccttcctttctctgcccaccaccccgctcagtctctctctctctccccttcacgtgcagcggcctgtaacacagtattggctggttactctcatgtagcgccttctattttgaaaggggggttttgttttgaggaggggttggggtttttaaatttttttctcctgactgagccaccagtatttatctctggagagtttgtgctgagctggtttctgctaatttagtgatgaagcctatccaagttggtgatagcttattattttcataagtaaaaaacaaatgagattatatatatatatataaaaatatatatattaaaaaaaaagacagtatttatcgtagcattagtggtccagcacctcttgggtgaggctgtccaggcaccatgttttctttgagtccaactcattaaaaaagaagaatctctgtcacctcagccaagtgatttattttttgctcccccttttttgagtcacaggccgagctgcagcctaggaaacccaaatagggtttggtgggccacttagtgggcatggttacattggtttatagcatcccaagaactgtagatccctaggcccctgagagctggacagagcagagaactacagggccaagggtccagagaagtgataacttggcccagggccacacagcagaggtagagggtccttggccagcacactatctaccactctaccccacctcccactgcctgccttgctcccctttcctcccttttcaataccctatcttcccttgttgttaagatggccaaataatacatttactctaaattgattgcctggaaactacctgccttcgtcctgagagcttctgtgtgtcaggctgctggaaagaagactccattcccaggacagaggcccttgagtacaggggctgctttcttcctgcctagatcttcaccatctctgcacagctctgagagaatggatgctttctgttgagaaaccagtaccttgtggaggcaggttcttgggctgctactccagggagtggatggaatccttggtcccctaggccagacttcactgccactgtgccagacagctccctgcagctgggccctagccactcttaggaaagactattgggagtatttgctggccagagaatgggactctatcagctttacacatgtcccaccagctgtttcagatagatccttacagctggcagagtaaaagtggtcccgctaccattggggaatcaggaaaggaaagactgagatggttgccaggacttggggtggcccacctgtggagaggactggctgccctggaggaggaaagggaggaagtctacacagaggagcaccaggacggctggaatttccatatgtgcttcacattgtgaggggagtgcacaagccgcccatgcaaagagtagggtcagccatggcaaggccggaagttgaactttcagtccctgcctgaatctgggctttgcaagctcctgctccatattggtggacatgggaatggttggtgtggcctgagatacccattgctcaccaggcctcactgggcccacagctgggcaacaagaaaaatgtttgaattggaccaactgctggtgatggggccagggccctgggccctgtgctgtcagaattctgccttgggaaatgatcctatagctgctgctttttcttggtccttggggctggcagacccatagaccatggcctgttaggaggcgtcctgtctgtaaaggaaattcatctcttgtgacagcctggggctacctagctcccaaacccagaagttggagacatcaggctgtttaaatgatcatagcctagcaggattggattaaaaccacaggcttttgcagctggaatggggttcagtgaacatctcccccattcctctcttgctacaaataaggaaacaggcccaggagattaagtgacttggctaaagtcacatagcaaattagtagcagagccgggactatcccttatccctgtgggttgggcaacactatttagtcctgaaaccgaatggcagataaaccccatgaggggtcaggctgatgtgccctccagcagtatctgagaagctgctaccttcaggggtgtgtcagggatgaggacgggtgcctgagcttaggttgtggagtggctgagagggcccaggagggctcgggacagctgtgtgctgcatggggttgggtgtctgcctggctcgcacttggtacccatggccacctccccattttctgtgccttatctcactgtttcagctgagtccaagttgtttactctgttcctctccagaggggctctctgtcccagttgggcagctcacctttgggacataagcctttgccccacaagctgtggagagggccaaaaccaagctgcttgagcccactctcttgctgagagtccaggcctgcctgcctgccagccagaggtgccccttatgcacatccagtcctaccagcctgcttccaggagcctagagtgggaaaggcacctgggggagccctggtgaagggctggacctgacccatggaggcaggaggaagacctggctttcttggtttgtccggccctggggagcagccttccctactcactttccccttgcggcaccaaatggtcactccttccagagcaaaaactggcactcatagcaagccagaacccccatccccatcctcatgggtctgtggctgggtgcaggccatcaaaatggacaccacgagacagaagtggggactgcctggccacctagcgccttcccactccttaagcaagcacaaagaagatgaggcagagaattgtcagagctgaaagttcctttggttgctcacaactcaggtatgcacccatgtggcagccaggcagcggagccctactagtttttttctctcgcgcaaagaaaatcaaatcagcccctcccccaggaaaagttttatttttttttgggcttgggggaaaaggaaccaagttaatttaaaaccgctgcttgaaaagggggacacattgtgcacactggttttgcctttgtcctcaagagttgatacttggcattagcatgaaacttgtgggtgtgggaggatggagagagaactctaacacaaaacatcttattaaaattgtacttgagagacaaaaaaaaaactctgttgtattttgacagaattatttttattaaaatacacatccatgagca

SEQ ID NO: 459131 - DNA, 311 bp, Homo sapiens
tctggtatgttccttccgggtcactgatggttttggttcctgttaaccgcagcatgggatcattcctctgtggggctacatcagctactttggcagtcacctgctggactcacagccagactctgtctattggtggctctgctagaagccaagagtgctgacagaggtggggcaggctgaggagaggctgagagacctgggtgggcttctgtgacttgtcttgttcctccctcaagtacctactcagttattgctgctctcttcccccacaggttgggacaaacattcctatggttaccatggtgatgatg

SEQ ID NO: 459132 - DNA, 310 bp, Homo sapiens
gtcatggcaaaaatcacaaagatgcggcctcagtgcgtgccacccaccccatacctgctgcctgtggcatttattactttgaagtgaagattgtcagcaaaggaagagatgggtaagcccttcatgaccaccctctttccctgatcatggagctgatccctgtggtcagagttcaggtcctttggctggcacttgttgctgatgtgagctggggagccgcatgggtctgggctgccattatttcctgactgtgggcatggtctggtctaagcagcagatcttgatggccagtgggtgtgttgggggtaaa

SEQ ID NO: 459133 - DNA, 154 bp, Homo sapiens
gtttgacattgaggactacatgcgggagtggcgtgccaaggtccagggcacggtccactgcttccccatcagtgcccggcttggcgagtggcaggcagtgctgcagaagtgagtgccctgctcctgcccttacccactcccaccccaccccagc

SEQ ID NO: 459134 - DNA, 5225 bp, Homo sapiens
ccaagatggcggcagcgacggcagacccgggagctgggaacccgcagcctggggactcctccggcgggggcgctgggggcgggctgccgtcccctggggagcaggagctgagccggcgcttgcagcgcctgtatcccgcggtcaaccagcaagagactccgctgccgcgctcctggagccccaaggacaaatacaactacattggtctctcccagggcaacctccgcgtcactacaaaggtcatggcaaaaatcacaaagatgcggcctcagtgcgtgccacccaccccatacctgctgcctgtggcatttattactttgaagtgaagattgtcagcaaaggaagagatggttacatgggaataggactctcggctcaaggcgtcaacatgaacagacttcctggttgggacaaacattcctatggttaccatggtgatgatgggcattcgttctgctcctcggggactggccagccctatggtcccacattcaccacaggagacgtgatcggctgctgtgtcaacctcatcaatggcacctgcttctacaccaagaatggccacagccttggtatagccttcacagacctcccggccaacctctaccccaccgtaggcctgcagacacctggggagattgtggacgccaactttgggcagcagcccttcctgtttgacattgaggactacatgcgggagtggcgtgccaaggtccagggcacggtccactgcttccccatcagtgcccggcttggcgagtggcaggcagtgctgcagaacatggtttcatcttacctcgtgcatcatgggtattgtgccacagccacggcttttgctcgaatgactgaaaccccgattcaggaagaacaggcgtccataaagaacagacaaaagatccagaagctggtgctggagggccgtgtgggcgaggccatcgagaccacccagcgcttctacccagggctgctggagcacaaccccaacctcctcttcatgctcaagtgccggcagtttgtggagatggtgaatgggacggacagtgaggtccgaagtttgagctcccgaagccccaagtcccaggacagctaccctggctcccccagcctcagtccccgacatggccccagtagttcccacatgcacaacacaggagcagacagtcccagctgtagcaatggcgtcgcgtccaccaagagcaaacagaaccacagtaaataccctgcacccagctcctcatcctcgtcctcctcctcctcctcgtcctcttccccatcctccgtcaattactccgagtccaactcaacagactccaccaagtcccagcaccacagcagtaccagtaaccaggagaccagcgacagtgagatggagatggaggcagagcactaccccaacggtgtgctaggaagcatgtccacacgcattgttaatggtgcctacaagcatgaggacctgcagacggatgagtccagcatggatgacaggcatcctcggcggcagctctgcgggggcaaccaggctgccacagaaaggatcattctgtttggccgcgagttgcaggcattgagtgagcagttgggccgggagtacggcaagaatttggcccacacagagatgctgcaggatgccttcagcctgctggcatactcagacccctggagctgcccagttggccagcagcttgaccccatccagagggaacctgtgtgtgctgccctcaacagcgccattttagagtcccagaacctgccaaagcagccccctctgatgctcgccctgggccaggcatctgagtgtctccggctcatggcccgagcaggcctgggttcttgctcctttgccagagttgatgactacttgcactagctgactgtgctggctggctctggctggccctccactggccccagggctggagctgccctgccctccataggcaactggtgcagggactgggaaaccatagacagagtccactcctcctgcctggcctttccccctctccctttccttccttccttcctttctctgcccaccaccccgctcagtctctctctctctccccttcacgtgcagcggcctgtaacacagtattggctggttactctcatgtagcgccttctattttgaaaggggggttttgttttgaggaggggttggggtttttaaatttttttctcctgactgagccaccagtatttatctctggagagtttgtgctgagctggtttctgctaatttagtgatgaagcctatccaagttggtgatagcttattattttcataagtaaaaaacaaatgagattatatatatatatataaaaatatatatattaaaaaaaaagacagtatttatcgtagcattagtggtccagcacctcttgggtgaggctgtccaggcaccatgttttctttgagtccaactcattaaaaaagaagaatctctgtcacctcagccaagtgatttattttttgctcccccttttttgagtcacaggccgagctgcagcctaggaaacccaaatagggtttggtgggccacttagtgggcatggttacattggtttatagcatcccaagaactgtagatccctaggcccctgagagctggacagagcagagaactacagggccaagggtccagagaagtgataacttggcccagggccacacagcagaggtagagggtccttggccagcacactatctaccactctaccccacctcccactgcctgccttgctcccctttcctcccttttcaataccctatcttcccttgttgttaagatggccaaataatacatttactctaaattgattgcctggaaactacctgccttcgtcctgagagcttctgtgtgtcaggctgctggaaagaagactccattcccaggacagaggcccttgagtacaggggctgctttcttcctgcctagatcttcaccatctctgcacagctctgagagaatggatgctttctgttgagaaaccagtaccttgtggaggcaggttcttgggctgctactccagggagtggatggaatccttggtcccctaggccagacttcactgccactgtgccagacagctccctgcagctgggccctagccactcttaggaaagactattgggagtatttgctggccagagaatgggactctatcagctttacacatgtcccaccagctgtttcagatagatccttacagctggcagagtaaaagtggtcccgctaccattggggaatcaggaaaggaaagactgagatggttgccaggacttggggtggcccacctgtggagaggactggctgccctggaggaggaaagggaggaagtctacacagaggagcaccaggacggctggaatttccatatgtgcttcacattgtgaggggagtgcacaagccgcccatgcaaagagtagggtcagccatggcaaggccggaagttgaactttcagtccctgcctgaatctgggctttgcaagctcctgctccatattggtggacatgggaatggttggtgtggcctgagatacccattgctcaccaggcctcactgggcccacagctgggcaacaagaaaaatgtttgaattggaccaactgctggtgatggggccagggccctgggccctgtgctgtcagaattctgccttgggaaatgatcctatagctgctgctttttcttggtccttggggctggcagacccatagaccatggcctgttaggaggcgtcctgtctgtaaaggaaattcatctcttgtgacagcctggggctacctagctcccaaacccagaagttggagacatcaggctgtttaaatgatcatagcctagcaggattggattaaaaccacaggcttttgcagctggaatggggttcagtgaacatctcccccattcctctcttgctacaaataaggaaacaggcccaggagattaagtgacttggctaaagtcacatagcaaattagtagcagagccgggactatcccttatccctgtgggttgggcaacactatttagtcctgaaaccgaatggcagataaaccccatgaggggtcaggctgatgtgccctccagcagtatctgagaagctgctaccttcaggggtgtgtcagggatgaggacgggtgcctgagcttaggttgtggagtggctgagagggcccaggagggctcgggacagctgtgtgctgcatggggttgggtgtctgcctggctcgcacttggtacccatggccacctccccattttctgtgccttatctcactgtttcagctgagtccaagttgtttactctgttcctctccagaggggctctctgtcccagttgggcagctcacctttgggacataagcctttgccccacaagctgtggagagggccaaaaccaagctgcttgagcccactctcttgctgagagtccaggcctgcctgcctgccagccagaggtgccccttatgcacatccagtcctaccagcctgcttccaggagcctagagtgggaaaggcacctgggggagccctggtgaagggctggacctgacccatggaggcaggaggaagacctggctttcttggtttgtccggccctggggagcagccttccctactcactttccccttgcggcaccaaatggtcactccttccagagcaaaaactggcactcatagcaagccagaacccccatccccatcctcatgggtctgtggctgggtgcaggccatcaaaatggacaccacgagacagaagtggggactgcctggccacctagcgccttcccactccttaagcaagcacaaagaagatgaggcagagaattgtcagagctgaaagttcctttggttgctcacaactcaggtatgcacccatgtggcagccaggcagcggagccctactagactgccagtctcatgcacccagacctgtggccagattgtggcctctggctgcctcaggcattttcctctttgcattgggttttcctgcattagtaactacagctgcaacagacatcctccacattgtgcacactggttttgcctttgtcctcaagagttgatacttggcattagcatgaaacttgtgggtgtgggaggatggagagagaactctaacacaaaacatcttattaaaattgtacttgagagacaaaaaaaaaactctgttgtattttgacagaattatttttattaaaatacacatccatgagca

SEQ ID NO: 459135 - DNA, 5034 bp, Homo sapiens
tagcaaaggtggactgggacccggcagcgggtgccctgagagtcaaccactacagccgatttgaccccagttacatgggaataggactctcggctcaaggcgtcaacatgaacagacttcctggttgggacaaacattcctatggttaccatggtgatgatgggcattcgttctgctcctcggggactggccagccctatggtcccacattcaccacaggagacgtgatcggctgctgtgtcaacctcatcaatggcacctgcttctacaccaagaatggccacagccttggtatagccttcacagacctcccggccaacctctaccccaccgtaggcctgcagacacctggggagattgtggacgccaactttgggcagcagcccttcctgtttgacattgaggactacatgcgggagtggcgtgccaaggtccagggcacggtccactgcttccccatcagtgcccggcttggcgagtggcaggcagtgctgcagaacatggtttcatcttacctcgtgcatcatgggtattgtgccacagccacggcttttgctcgaatgactgaaaccccgattcaggaagaacaggcgtccataaagaacagacaaaagatccagaagctggtgctggagggccgtgtgggcgaggccatcgagaccacccagcgcttctacccagggctgctggagcacaaccccaacctcctcttcatgctcaagtgccggcagtttgtggagatggtgaatgggacggacagtgaggtccgaagtttgagctcccgaagccccaagtcccaggacagctaccctggctcccccagcctcagtccccgacatggccccagtagttcccacatgcacaacacaggagcagacagtcccagctgtagcaatggcgtcgcgtccaccaagagcaaacagaaccacagtaaataccctgcacccagctcctcatcctcgtcctcctcctcctcctcgtcctcttccccatcctccgtcaattactccgagtccaactcaacagactccaccaagtcccagcaccacagcagtaccagtaaccaggagaccagcaacccatggctacagcttgaaaggaggcccaaccaggctgctccaaccacaccccctgggccaactcccacctcaacccctccccacagcgacagtgagatggagatggaggcagagcactaccccaacggtgtgctaggaagcatgtccacacgcattgttaatggtgcctacaagcatgaggacctgcagacggatgagtccagcatggatgacaggcatcctcggcggcagctctgcgggggcaaccaggctgccacagaaaggatcattctgtttggccgcgagttgcaggcattgagtgagcagttgggccgggagtacggcaagaatttggcccacacagagatgctgcaggatgccttcagcctgctggcatactcagacccctggagctgcccagttggccagcagcttgaccccatccagagggaacctgtgtgtgctgccctcaacagcgccattttagagtcccagaacctgccaaagcagccccctctgatgctcgccctgggccaggcatctgagtgtctccggctcatggcccgagcaggcctgggttcttgctcctttgccagagttgatgactacttgcactagctgactgtgctggctggctctggctggccctccactggccccagggctggagctgccctgccctccataggcaactggtgcagggactgggaaaccatagacagagtccactcctcctgcctggcctttccccctctccctttccttccttccttcctttctctgcccaccaccccgctcagtctctctctctctccccttcacgtgcagcggcctgtaacacagtattggctggttactctcatgtagcgccttctattttgaaaggggggttttgttttgaggaggggttggggtttttaaatttttttctcctgactgagccaccagtatttatctctggagagtttgtgctgagctggtttctgctaatttagtgatgaagcctatccaagttggtgatagcttattattttcataagtaaaaaacaaatgagattatatatatatatataaaaatatatatattaaaaaaaaagacagtatttatcgtagcattagtggtccagcacctcttgggtgaggctgtccaggcaccatgttttctttgagtccaactcattaaaaaagaagaatctctgtcacctcagccaagtgatttattttttgctcccccttttttgagtcacaggccgagctgcagcctaggaaacccaaatagggtttggtgggccacttagtgggcatggttacattggtttatagcatcccaagaactgtagatccctaggcccctgagagctggacagagcagagaactacagggccaagggtccagagaagtgataacttggcccagggccacacagcagaggtagagggtccttggccagcacactatctaccactctaccccacctcccactgcctgccttgctcccctttcctcccttttcaataccctatcttcccttgttgttaagatggccaaataatacatttactctaaattgattgcctggaaactacctgccttcgtcctgagagcttctgtgtgtcaggctgctggaaagaagactccattcccaggacagaggcccttgagtacaggggctgctttcttcctgcctagatcttcaccatctctgcacagctctgagagaatggatgctttctgttgagaaaccagtaccttgtggaggcaggttcttgggctgctactccagggagtggatggaatccttggtcccctaggccagacttcactgccactgtgccagacagctccctgcagctgggccctagccactcttaggaaagactattgggagtatttgctggccagagaatgggactctatcagctttacacatgtcccaccagctgtttcagatagatccttacagctggcagagtaaaagtggtcccgctaccattggggaatcaggaaaggaaagactgagatggttgccaggacttggggtggcccacctgtggagaggactggctgccctggaggaggaaagggaggaagtctacacagaggagcaccaggacggctggaatttccatatgtgcttcacattgtgaggggagtgcacaagccgcccatgcaaagagtagggtcagccatggcaaggccggaagttgaactttcagtccctgcctgaatctgggctttgcaagctcctgctccatattggtggacatgggaatggttggtgtggcctgagatacccattgctcaccaggcctcactgggcccacagctgggcaacaagaaaaatgtttgaattggaccaactgctggtgatggggccagggccctgggccctgtgctgtcagaattctgccttgggaaatgatcctatagctgctgctttttcttggtccttggggctggcagacccatagaccatggcctgttaggaggcgtcctgtctgtaaaggaaattcatctcttgtgacagcctggggctacctagctcccaaacccagaagttggagacatcaggctgtttaaatgatcatagcctagcaggattggattaaaaccacaggcttttgcagctggaatggggttcagtgaacatctcccccattcctctcttgctacaaataaggaaacaggcccaggagattaagtgacttggctaaagtcacatagcaaattagtagcagagccgggactatcccttatccctgtgggttgggcaacactatttagtcctgaaaccgaatggcagataaaccccatgaggggtcaggctgatgtgccctccagcagtatctgagaagctgctaccttcaggggtgtgtcagggatgaggacgggtgcctgagcttaggttgtggagtggctgagagggcccaggagggctcgggacagctgtgtgctgcatggggttgggtgtctgcctggctcgcacttggtacccatggccacctccccattttctgtgccttatctcactgtttcagctgagtccaagttgtttactctgttcctctccagaggggctctctgtcccagttgggcagctcacctttgggacataagcctttgccccacaagctgtggagagggccaaaaccaagctgcttgagcccactctcttgctgagagtccaggcctgcctgcctgccagccagaggtgccccttatgcacatccagtcctaccagcctgcttccaggagcctagagtgggaaaggcacctgggggagccctggtgaagggctggacctgacccatggaggcaggaggaagacctggctttcttggtttgtccggccctggggagcagccttccctactcactttccccttgcggcaccaaatggtcactccttccagagcaaaaactggcactcatagcaagccagaacccccatccccatcctcatgggtctgtggctgggtgcaggccatcaaaatggacaccacgagacagaagtggggactgcctggccacctagcgccttcccactccttaagcaagcacaaagaagatgaggcagagaattgtcagagctgaaagttcctttggttgctcacaactcaggtatgcacccatgtggcagccaggcagcggagccctactagactgccagtctcatgcacccagacctgtggccagattgtggcctctggctgcctcaggcattttcctctttgcattgggttttcctgcattagtaactacagctgcaacagacatcctccacattgtgcacactggttttgcctttgtcctcaagagttgatacttggcattagcatgaaacttgtgggtgtgggaggatggagagagaactctaacacaaaacatcttattaaaattgtacttgagagacaaaaaaaaaactctgttgtattttgacagaattatttttattaaaatacacatccatgagca

SEQ ID NO: 459136 - DNA, 5067 bp, Homo sapiens
tagcaaaggtggactgggacccggcagcgggtgccctgagagtcaaccactacagccgatttgaccccagttacatgggaataggactctcggctcaaggcgtcaacatgaacagacttcctggttgggacaaacattcctatggttaccatggtgatgatgggcattcgttctgctcctcggggactggccagccctatggtcccacattcaccacaggagacgtgatcggctgctgtgtcaacctcatcaatggcacctgcttctacaccaagaatggccacagccttggtatagccttcacagacctcccggccaacctctaccccaccgtaggcctgcagacacctggggagattgtggacgccaactttgggcagcagcccttcctgtttgacattgaggactacatgcgggagtggcgtgccaaggtccagggcacggtccactgcttccccatcagtgcccggcttggcgagtggcaggcagtgctgcagaacatggtttcatcttacctcgtgcatcatgggtattgtgccacagccacggcttttgctcgaatgactgaaaccccgattcaggaagaacaggcgtccataaagaacagacaaaagatccagaagctggtgctggagggccgtgtgggcgaggccatcgagaccacccagcgcttctacccagggctgctggagcacaaccccaacctcctcttcatgctcaagtgccggcagtttgtggagatggtgaatgggacggacagtgaggtccgaagtttgagctcccgaagccccaagtcccaggacagctaccctggctcccccagcctcagtccccgacatggccccagtagttcccacatgcacaacacaggagcagacagtcccagctgtagcaatggcgtcgcgtccaccaagagcaaacagaaccacagtaaataccctgcacccagctcctcatcctcgtcctcctcctcctcctcgtcctcttccccatcctccgtcaattactccgagtccaactcaacagactccaccaagtcccagcaccacagcagtaccagtaaccaggagaccagcaacccatggctacagcttgaaaggaggcccaaccaggctgctccaaccacaccccctgggccaactcccacctcaacccctccccacagcgacagtgagatggagatggaggcagagcactaccccaacggtgtgctaggaagcatgtccacacgcattgttaatggtgcctacaagcatgaggacctgcagacggatgagtccagcatggatgacaggcatcctcggcggcagctctgcgggggcaaccaggctgccacagaaaggatcattctgtttggccgcgagttgcaggcattgagtgagcagttgggccgggagtacggcaagaatttggcccacacagagatgctgcaggatgccttcagcctgctggcatactcagacccctggagctgcccagttggccagcagcttgaccccatccagagggaacctgtgtgtgctgccctcaacagcgccattttagagtcccagaacctgccaaagcagccccctctgatgctcgccctgggccaggcatctgagtgtctccggctcatggcccgagcaggcctgggttcttgctcctttgccagagttgatgactacttgcactagctgactgtgctggctggctctggctggccctccactggccccagggctggagctgccctgccctccataggcaactggtgcagggactgggaaaccatagacagagtccactcctcctgcctggcctttccccctctccctttccttccttccttcctttctctgcccaccaccccgctcagtctctctctctctccccttcacgtgcagcggcctgtaacacagtattggctggttactctcatgtagcgccttctattttgaaaggggggttttgttttgaggaggggttggggtttttaaatttttttctcctgactgagccaccagtatttatctctggagagtttgtgctgagctggtttctgctaatttagtgatgaagcctatccaagttggtgatagcttattattttcataagtaaaaaacaaatgagattatatatatatatataaaaatatatatattaaaaaaaaagacagtatttatcgtagcattagtggtccagcacctcttgggtgaggctgtccaggcaccatgttttctttgagtccaactcattaaaaaagaagaatctctgtcacctcagccaagtgatttattttttgctcccccttttttgagtcacaggccgagctgcagcctaggaaacccaaatagggtttggtgggccacttagtgggcatggttacattggtttatagcatcccaagaactgtagatccctaggcccctgagagctggacagagcagagaactacagggccaagggtccagagaagtgataacttggcccagggccacacagcagaggtagagggtccttggccagcacactatctaccactctaccccacctcccactgcctgccttgctcccctttcctcccttttcaataccctatcttcccttgttgttaagatggccaaataatacatttactctaaattgattgcctggaaactacctgccttcgtcctgagagcttctgtgtgtcaggctgctggaaagaagactccattcccaggacagaggcccttgagtacaggggctgctttcttcctgcctagatcttcaccatctctgcacagctctgagagaatggatgctttctgttgagaaaccagtaccttgtggaggcaggttcttgggctgctactccagggagtggatggaatccttggtcccctaggccagacttcactgccactgtgccagacagctccctgcagctgggccctagccactcttaggaaagactattgggagtatttgctggccagagaatgggactctatcagctttacacatgtcccaccagctgtttcagatagatccttacagctggcagagtaaaagtggtcccgctaccattggggaatcaggaaaggaaagactgagatggttgccaggacttggggtggcccacctgtggagaggactggctgccctggaggaggaaagggaggaagtctacacagaggagcaccaggacggctggaatttccatatgtgcttcacattgtgaggggagtgcacaagccgcccatgcaaagagtagggtcagccatggcaaggccggaagttgaactttcagtccctgcctgaatctgggctttgcaagctcctgctccatattggtggacatgggaatggttggtgtggcctgagatacccattgctcaccaggcctcactgggcccacagctgggcaacaagaaaaatgtttgaattggaccaactgctggtgatggggccagggccctgggccctgtgctgtcagaattctgccttgggaaatgatcctatagctgctgctttttcttggtccttggggctggcagacccatagaccatggcctgttaggaggcgtcctgtctgtaaaggaaattcatctcttgtgacagcctggggctacctagctcccaaacccagaagttggagacatcaggctgtttaaatgatcatagcctagcaggattggattaaaaccacaggcttttgcagctggaatggggttcagtgaacatctcccccattcctctcttgctacaaataaggaaacaggcccaggagattaagtgacttggctaaagtcacatagcaaattagtagcagagccgggactatcccttatccctgtgggttgggcaacactatttagtcctgaaaccgaatggcagataaaccccatgaggggtcaggctgatgtgccctccagcagtatctgagaagctgctaccttcaggggtgtgtcagggatgaggacgggtgcctgagcttaggttgtggagtggctgagagggcccaggagggctcgggacagctgtgtgctgcatggggttgggtgtctgcctggctcgcacttggtacccatggccacctccccattttctgtgccttatctcactgtttcagctgagtccaagttgtttactctgttcctctccagaggggctctctgtcccagttgggcagctcacctttgggacataagcctttgccccacaagctgtggagagggccaaaaccaagctgcttgagcccactctcttgctgagagtccaggcctgcctgcctgccagccagaggtgccccttatgcacatccagtcctaccagcctgcttccaggagcctagagtgggaaaggcacctgggggagccctggtgaagggctggacctgacccatggaggcaggaggaagacctggctttcttggtttgtccggccctggggagcagccttccctactcactttccccttgcggcaccaaatggtcactccttccagagcaaaaactggcactcatagcaagccagaacccccatccccatcctcatgggtctgtggctgggtgcaggccatcaaaatggacaccacgagacagaagtggggactgcctggccacctagcgccttcccactccttaagcaagcacaaagaagatgaggcagagaattgtcagagctgaaagttcctttggttgctcacaactcaggtatgcacccatgtggcagccaggcagcggagccctactagactgccagtctcatgcacccagacctgtggccagattgtggcctctggctgcctcaggcattttcctctttgcattgggttttcctgcattagtaactacagctgcaacagacatcctccacattgtgcacactggttttgcctttgtcctcaagagttgatacttggcattagcatgaaacttgtgggtgtgggaggatgcaaacatacattaatgctgaaagttggaaccatcctggacattgtgcaacggctggaacacgctgtagacaacttacaaggctataagactgacaaaaagcacctagtgaccgaagagtatttgaccaaatatctgctgggcctg

SEQ ID NO: 459137 - DNA, 2643 bp, Homo sapiens
tagcaaaggtggactgggacccggcagcgggtgccctgagagtcaaccactacagccgatttgaccccagttacatgggaataggactctcggctcaaggcgtcaacatgaacagacttcctggttgggacaaacattcctatggttaccatggtgatgatgggcattcgttctgctcctcggggactggccagccctatggtcccacattcaccacaggagacgtgatcggctgctgtgtcaacctcatcaatggcacctgcttctacaccaagaatggccacagccttggtatagccttcacagacctcccggccaacctctaccccaccgtaggcctgcagacacctggggagattgtggacgccaactttgggcagcagcccttcctgtttgacattgaggactacatgcgggagtggcgtgccaaggtccagggcacggtccactgcttccccatcagtgcccggcttggcgagtggcaggcagtgctgcagaacatggtttcatcttacctcgtgcatcatgggtattgtgccacagccacggcttttgctcgaatgactgaaaccccgattcaggaagaacaggcgtccataaagaacagacaaaagatccagaagctggtgctggagggccgtgtgggcgaggccatcgagaccacccagcgcttctacccagggctgctggagcacaaccccaacctcctcttcatgctcaagtgccggcagtttgtggagatggtgaatgggacggacagtgaggtccgaagtttgagctcccgaagccccaagtcccaggacagctaccctggctcccccagcctcagtccccgacatggccccagtagttcccacatgcacaacacaggagcagacagtcccagctgtagcaatggcgtcgcgtccaccaagagcaaacagaaccacagtaaataccctgcacccagctcctcatcctcgtcctcctcctcctcctcgtcctcttccccatcctccgtcaattactccgagtccaactcaacagactccaccaagtcccagcaccacagcagtaccagtaaccaggagaccagcaacccatggctacagcttgaaaggaggcccaaccaggctgctccaaccacaccccctgggccaactcccacctcaacccctccccacagcgacagtgagatggagatggaggcagagcactaccccaacggtgtgctaggaagcatgtccacacgcattgttaatggtgcctacaagcatgaggacctgcagacggatgagtccagcatggatgacaggcatcctcggcggcagctctgcgggggcaaccaggctgccacagaaaggatcattctgtttggccgcgagttgcaggcattgagtgagcagttgggccgggagtacggcaagaatttggcccacacagagatgctgcaggatgccttcagcctgctggcatactcagacccctggagctgcccagttggccagcagcttgaccccatccagagggaacctgtgtgtgctgccctcaacagcgccattttagagtcccagaacctgccaaagcagccccctctgatgctcgccctgggccaggcatctgagtgtctccggctcatggcccgagcaggcctgggttcttgctcctttgccagagttgatgactacttgcactagctgactgtgctggctggctctggctggccctccactggccccagggctggagctgccctgccctccataggcaactggtgcagggactgggaaaccatagacagagtccactcctcctgcctggcctttccccctctccctttccttccttccttcctttctctgcccaccaccccgctcagtctctctctctctccccttcacgtgcagcggcctgtaacacagtattggctggttactctcatgtagcgccttctattttgaaaggggggttttgttttgaggaggggttggggtttttaaatttttttctcctgactgagccaccagtatttatctctggagagtttgtgctgagctggtttctgctaatttagtgatgaagcctatccaagttggtgatagcttattattttcataagtaaaaaacaaatgagattatatatatatatataaaaatatatatattaaaaaaaaagacagtatttatcgtagcattagtggtccagcacctcttgggtgaggctgtccaggcaccatgttttctttgagtccaactcattaaaaaagaagaatctctgtcacctcagccaagtgatttattttttgctcccccttttttgagtcacaggccgagctgcagcctaggaaacccaaatagggtttggtgggccacttagtgggcatggttacattggtttatagcatcccaagaactgtagatccctaggcccctgagagctggacagagcagagaactacagggccaagggtccagagaagtgataacttggcccagggccacacagcagaggtagagggtccttggccagcacactatctaccactctaccccacctcccactgcctgccttgctcccctttcctcccttttcaataccctatcttcccttgttgttaagatggccaaataatacatttactctaaattgattgcctggaaact

SEQ ID NO: 459138 - DNA, 918 bp, Homo sapiens
ctgcgacgcgctccggcccaggtggcggccggccgcccagcctccccgcctgctggcgggagaaaccatctcctctggcgggggtaggggcggagctggcgtccgcccacaccggaagaggaagtctaagcgccggaagtggtgggcattctgggtaacgagctatttacttcctgcgggtgcacaggctgtggtcgtctatctccctgttgttcttcccatcggcgaagatggccctggagacggtgccgaaggacctgcggcatctgcgggcctgtttgctgtgttcgctggtcaagactatagaccagtttgaatatgatggttgtgacaattgtgatgcatatctacaaatgaagggtaaccgagagatggtatatgactgcactagctcttcctttgatggaatcattgcgatgatgagtccagaggacagctgggtctccaagtggcagcgagtcagtaactttaagccaggtgtatatgcggtgtcagtcactggtcgcctgccccaaggaatcgtgcgggagctgaaaagtcgaggagtggcctacaaatccagagacacagctataaagacctagcaagatgcaaggctgccagcatctttgctctccacctcctgcctctgcttatttcttgttctggaactaaatgaacagaacttcaaatacttcctaccctccaattcagactcagctgactgttgagagagcagcacatcattttatcattttatcttctttggactacaggtggggtgggagggatttgggttggtggattaacagatggaattgaggagagagtaggatgctgattttcctacccgtggcccaggtctgtgccttccccatgccaaggactctaggtcaaatgtcaataaatatgaacctcgagaaagttctgaaggccatg

SEQ ID NO: 459139 - DNA, 1844 bp, Homo sapiens
ctgcgacgcgctccggcccaggtggcggccggccgcccagcctccccgcctgctggcgggagaaaccatctcctctggcgggggtaggggcggagctggcgtccgcccacaccggaagaggaagtctaagcgccggaagtggtgggcattctgggtaacgagctatttacttcctgcgggtgcacaggctgtggtcgtctatctccctgttgttcttcccatcggcgaagatggccctggagacggtgccgaaggacctgcggcatctgcgggcctgtttgctgtgttcgctggtcaagactatagaccagtttgaatatgatggttgtgacaattgtgatgcatatctacaaatgaagggtaaccgagagatggtatatgactgcactagctcttcctttgatggaatcattgcgatgatgagtccagaggacagctgggtctccaagtggcagcgagtcagtaactttaagccaggtgtatatgcggtgtcagtcactggtcgcctgccccaaggaatcgtgcgggagctgaaaagtcgaggagtggcctacaaatccagagacacagctataaagacctagcaagatgcaaggctgccagcatctttgctctccacctcctgcctctgcttatttcttgttctggaactaaatgaacagaacttcaaatacttcctaccctccaattcagactcagctgactgttgagagagcagcacatcattttatcattttatcttctttggactacaggtggggtgggagggatttgggttggtggattaacagatggaattgaggagagagtaggatgctgattttcctacccgtggcccaggtctgtgccttccccatgccaaggactctaggtcaaatgtcaataaatatgaacctcgagaaagttctgaaggccatgacacctgccttgcctccctcttccattctcttaggcacagtaatagcttatttgccctataagaaccttcccagagcagcagaggcccttctactccctcttgactgtctcagcctctgggattgcagcctttgtagtgtgcttccttgcttcctatcagagggtgctgatccagaggctcagtaaccccatcaacttggtggccctggtgtctcacacttgtatccttctgccctcgagacctggcacagcagtatcccttgaagaaatcctgaggctttgtagagtgctccttgaccatgtttaataattcttccctcccctgcttgtctattttcttctcttcacggctcttcctataccttaggccagtctcaagcactcactggagacccttgggccttgggcgaccattgagtcctagtctcccttgtttgtgcccctgtaggaggtaggtccttttctcctccggcctagtaggggaccttgggtaacatcccatttttcggccaaggtgagttgttttaggataaaaaaatttaccacaaattctcatttaaatttccacagaaatcctgttcgtatccccattttgatttccctaagttccttgttctccctctaaaaagagaatgattgcaccctgcctgtttacctcaggattgttgtgattgtagaaacgaagctatgtgaaaattatataagtattataaaggtgaaatacttttgctctcaaaaaaaaaaagcgggcgcaaaagatcccctgaggggccaggttagcgtaaccgcttctgtgcaagggcccataggaggggaaaagaagcacggcggtttcacctcggcggaccccctcggcctggaggcccttgcgggcatggccccccgatagcgggataatagtatggcctcccgtggtaccgaccgcc

SEQ ID NO: 459140 - DNA, 856 bp, Homo sapiens
ctgcgacgcgctccggcccaggtggcggccggccgcccagcctccccgcctgctggcgggagaaaccatctcctctggcgggggtaggggcggagctggcgtccgcccacaccggaagaggaagtctaagcgccggaagtggtgggcattctgggtaacgagctatttacttcctgcgggtgcacaggctgtggtcgtctatctccctgttgttcttcccatcggcgaagatggccctggagacggtgccgaaggacctgcggcatctgcgggcctgtttgctgtgttcgctggtcaagactatagaccagtttgaatatgatggttgtgacaattgtgatgcatatctacaaatgaagggtaaccgagagatggtatatgactgcactagctcttcctttgatggaatcattgcgatgatgagtccagaggacagctgggtctccaagtggcagcgagtcagtaactttaagccaggtgtatatgcggtgtcagtcactggtcgcctgccccaagacctagcaagatgcaaggctgccagcatctttgctctccacctcctgcctctgcttatttcttgttctggaactaaatgaacagaacttcaaatacttcctaccctccaattcagactcagctgactgttgagagagcagcacatcattttatcattttatcttctttggactacaggtggggtgggagggatttgggttggtggattaacagatggaattgaggagagagtaggatgctgattttcctacccgtggcccaggtctgtgccttccccatgccaaggactctaggtcaaatgtcaataaatatgaacctcgagaaagttctgaaggccatg

SEQ ID NO: 459141 - DNA, 1597 bp, Homo sapiens
ctgcgacgcgctccggcccaggtggcggccggccgcccagcctccccgcctgctggcgggagaaaccatctcctctggcgggggtaggggcggagctggcgtccgcccacaccggaagaggaagtctaagcgccggaagtggtgggcattctgggtaacgagctatttacttcctgcgggtgcacaggctgtggtcgtctatctccctgttgttcttcccatcggcgaagatggccctggagacggtgccgaaggacctgcggcatctgcgggcctgtttgctgtgttcgctggtcaagactatagaccagtttgaatatgatggttgtgacaattgtgatgcatatctacaaatgaagggtaaccgagagatggtatatgactgcactagctcttcctttgatggaatcattgcgatgatgagtccagaggacagctgggtctccaagtggcagcgagtcagtaactttaagccaggtgtatatgcggtgtcagtcactggtcgcctgccccaaggaatcgtgcgggagctgaaaagtcgaggagtggcctacaaatccagagacacagctataaagacctagcaagatgcaaggctgccagcatctttgctctccacctcctgcctctgcttatttcttgttctggaactaaatgaacagaacttcaaatacttcctaccctccaattcagactcagctgactgttgagagagcagcacatcattttatcattttatcttctttggactacaggtggggtgggagggatttgggttggtggattaacagatggaattgaggagagagtaggatgctgattttcctacccgtggcccaggtctgtgccttccccatgccaaggactctaggtcaaatgtcaataaatatgaacctcgagaaagttctgaaggccatgacacctgccttgcctccctcttccattctcttaggcacagtaatagcttatttgccctataagaaccttcccagagcagcagaggcccttctactccctcttgactgtctcagcctctgggattgcagcctttgtagtgtgcttccttgcttcctatcagagggtgctgatccagaggctcagtaaccccatcaacttggtggccctggtgtctcacacttgtatccttctgccctcgagacctggcacagcagtatcccttgaagaaatcctgaggctttgtagagtgctccttgaccatgtttaataattcttccctcccctgcttgtctattttcttctcttcacggctcttcctataccttaggccagtctcaagcagtgcccctgtaggaggtaggtccttttctcctccggcctagtaggggaccttgggtaacatcccatttttcggccaaggtgagttgttttaggataaaaaaatttaccacaaattctcatttaaatttccacagaaatcctgttcgtatccccattttgatttccctaagttccttgttctccctctaaaaagagaatgattgcaccctgcctgtttacctcaggattgttgtgattgtagaaacgaagctatgtgaaaattatataagtattataaaggtgaaatacttttgctctc

SEQ ID NO: 459142 - DNA, 1538 bp, Homo sapiens
ctgcgacgcgctccggcccaggtggcggccggccgcccagcctccccgcctgctggcgggagaaaccatctcctctggcgggggtaggggcggagctggcgtccgcccacaccggaagaggaagtctaagcgccggaagtggtgggcattctgggtaacgagctatttacttcctgcgggtgcacaggctgtggtcgtctatctccctgttgttcttcccatcggcgaagatggccctggagacggtgccgaaggacctgcggcatctgcgggcctgtttgctgtgttcgctggtcaagactatagaccagtttgaatatgatggttgtgacaattgtgatgcatatctacaaatgaagggtaaccgagagatggtatatgactgcactagctcttcctttgatggaatcattgcgatgatgagtccagaggacagctgggtctccaagtggcagcgagtcagtaactttaagccaggtgtatatgcggtgtcagtcactggtcgcctgccccaaggaatcgtgcgggagctgaaaagtcgaggagtggcctacaaatccagagacacagctataaagacctagcaagatgcaaggctgccagcatctttgctctccacctcctgcctctgcttatttcttgttctggaactaaatgaacagaacttcaaatacttcctaccctccaattcagactcagctgactgttgagagagcagcacatcattttatcattttatcttctttggactacaggtggggtgggagggatttgggttggtggattaacagatggaattgaggagagagtaggatgctgattttcctacccgtggcccaggtctgtgccttccccatgccaaggactctaggtcaaatgtcaataaatatgaacctcgagaaagttctgaaggccatgacacctgccttgcctccctcttccattctcttaggcacagtaatagcttatttgccctataagaaccttcccagagcagcagaggcccttctactccctcttgactgtctcagcctctgggattgcagcctttgtagtgtgcttccttgcttcctatcagagggtgctgatccagaggctcagtaaccccatcaacttggtggccctggtgtctcacacttgtatccttctgccctcgagacctggcacagcagtatcccttgaagaaatcctgaggctttgtagagtgctccttgaccatgtttaataattcttccctcccgtgcccctgtaggaggtaggtccttttctcctccggcctagtaggggaccttgggtaacatcccatttttcggccaaggtgagttgttttaggataaaaaaatttaccacaaattctcatttaaatttccacagaaatcctgttcgtatccccattttgatttccctaagttccttgttctccctctaaaaagagaatgattgcaccctgcctgtttacctcaggattgttgtgattgtagaaacgaagctatgtgaaaattatataagtattataaaggtgaaatacttttgctctc

SEQ ID NO: 459143 - DNA, 1596 bp, Homo sapiens
ctgcgacgcgctccggcccaggtggcggccggccgcccagcctccccgcctgctggcgggagaaaccatctcctctggcgggggtaggggcggagctggcgtccgcccacaccggaagaggaagtctaagcgccggaagtggtgggcattctgggtaacgagctatttacttcctgcgggtgcacaggctgtggtcgtctatctccctgttgttcttcccatcggcgaagatggccctggagacggtgccgaaggacctgcggcatctgcgggcctgtttgctgtgttcgctggtcaagactatagaccagtttgaatatgatggttgtgacaattgtgatgcatatctacaaatgaagggtaaccgagagatggtatatgactgcactagctcttcctttgatgggtaactttaagccaggtgtatatgcggtgtcagtcactggtcgcctgccccaaggaatcgtgcgggagctgaaaagtcgaggagtggcctacaaatccagagacacagctataaagacctagcaagatgcaaggctgccagcatctttgctctccacctcctgcctctgcttatttcttgttctggaactaaatgaacagaacttcaaatacttcctaccctccaattcagactcagctgactgttgagagagcagcacatcattttatcattttatcttctttggactacaggtggggtgggagggatttgggttggtggattaacagatggaattgaggagagagtaggatgctgattttcctacccgtggcccaggtctgtgccttccccatgccaaggactctaggtcaaatgtcaataaatatgaacctcgagaaagttctgaaggccatgacacctgccttgcctccctcttccattctcttaggcacagtaatagcttatttgccctataagaaccttcccagagcagcagaggcccttctactccctcttgactgtctcagcctctgggattgcagcctttgtagtgtgcttccttgcttcctatcagagggtgctgatccagaggctcagtaaccccatcaacttggtggccctggtgtctcacacttgtatccttctgccctcgagacctggcacagcagtatcccttgaagaaatcctgaggctttgtagagtgctccttgaccatgtttaataattcttccctcccctgcttgtctattttcttctcttcacggctcttcctataccttaggccagtctcaagcactcactggagacccttgggccttgggcgaccattgagtcctagtctcccttgtttgtgcccctgtaggaggtaggtccttttctcctccggcctagtaggggaccttgggtaacatcccatttttcggccaaggtgagttgttttaggataaaaaaatttaccacaaattctcatttaaatttccacagaaatcctgttcgtatccccattttgatttccctaagttccttgttctccctctaaaaagagaatgattgcaccctgcctgtttacctcaggattgttgtgattgtagaaacgaagctatgtgaaaattatataagtattataaaggtgaaatacttttgctctc

SEQ ID NO: 459144 - DNA, 1073 bp, Homo sapiens
ctgcgacgcgctccggcccaggtggcggccggccgcccagcctccccgcctgctggcgggagaaaccatctcctctggcgggggtaggggcggagctggcgtccgcccacaccggaagaggaagtctaagcgccggaagtggtgggcattctgggtaacgagctatttacttcctgcgggtgcacaggctgtggtcgtctatctccctgttgttcttcccatcggcgaagatggccctggagacggtgccgaaggacctgcggcatctgcgggcctgtttgctgtgttcgctggtcaagactatagaccagtttgaatatgatggttgtgacaattgtgatgcatatctacaaatgaagggtaaccgagagatggtatatgactgcactagctcttcctttgatggaatcattgcgatgatgagtccagaggacagctgggtctccaagtggcagcgagtcagtaactttaagccaggtgtatatgcggtgtcagtcactggtcgcctgccccaaggaatcgtgcgggagctgaaaagtcgaggagtggcctacaaatccagagacacagctataaagacctagcaagatgcaaggctgccagcatctttgctctccacctcctgcctctgcttatttcttgttctggaactaaatgaacagaacttcaaatacttcctaccctccaattcagactcagctgactgttgagagagcagcacatcattttatcattttatcttctttggactacaggtggggtgggagggatttgggttggtggattaacagatggaattgaggagagagtaggatgctgattttcctacccgtggcccaggtctgtgccttccccatgccaaggactctaggtcaaatgtcaataaatatgaacctcgagaaagttctgaaggccatgacacctgccttgcctccctcttccattctcttaggcacagtaatagcttatttgccctataagaaccttcccagagcagcagaggcctttatcctctgatggttagccttgggatggagcatgaaggggatcctgttctatagaggggtgatcaa

SEQ ID NO: 459145 - DNA, 423 bp, Homo sapiens
gaacgagagaggaaggagtgggagggtgggacttaggaatgaagctttgagagtagtaggtggggaaccttaggatacacagtcaacatagggaaacaagaaattgagcaggtcgaagtattgagaaagctactttttctcttggtcttgttcatgcttatctctccttttcctttatttttctttcactcccagactatagaccagtttgaatatgatggttgtgacaattgtgatgcatatctacaaatgaagggtaaccgagagatggtatatgactgcactagctcttcctttgatgggtaagccgcttcagtttccatcattcacttctgcattacccaacctgcacccagagaagtaaatgcagggcaagtgttaatcctagttgggcccagccattcgtttttgggggttattttg

SEQ ID NO: 459146 - DNA, 1652 bp, Homo sapiens
ctgcgacgcgctccggcccaggtggcggccggccgcccagcctccccgcctgctggcgggagaaaccatctcctctggcgggggtaggggcggagctggcgtccgcccacaccggaagaggaagtctaagcgccggaagtggtgggcattctgggtaacgagctatttacttcctgcgggtgcacaggctgtggtcgtctatctccctgttgttcttcccatcggcgaagatggccctggagacggtgccgaaggacctgcggcatctgcgggcctgtttgctgtgttcgctggtcaagactatagaccagtttgaatatgatggttgtgacaattgtgatgcatatctacaaatgaagggtaaccgagagatggtatatgactgcactagctcttcctttgatggaatcattgcgatgatgagtccagaggacagctgggtctccaagtggcagcgagtcagtaactttaagccaggtgtatatgcggtgtcagtcactggtcgcctgccccaaggaatcgtgcgggagctgaaaagtcgaggagtggcctacaaatccagagacacagctataaagacctagcaagatgcaaggctgccagcatctttgctctccacctcctgcctctgcttatttcttgttctggaactaaatgaacagaacttcaaatacttcctaccctccaattcagactcagctgactgttgagagagcagcacatcattttatcattttatcttctttggactacaggtggggtgggagggatttgggttggtggattaacagatggaattgaggagagagtaggatgctgattttcctacccgtggcccaggtctgtgccttccccatgccaaggactctaggtcaaatgtcaataaatatgaacctcgagaaagttctgaaggccatgacacctgccttgcctccctcttccattctcttaggcacagtaatagcttatttgccctataagaaccttcccagagcagcagaggcccttctactccctcttgactgtctcagcctctgggattgcagcctttgtagtgtgcttccttgcttcctatcagagggtgctgatccagaggctcagtaaccccatcaacttggtggccctggtgtctcacacttgtatccttctgccctcgagacctggcacagcagtatcccttgaagaaatcctgaggctttgtagagtgctccttgaccatgtttaataattcttccctcccctgcttgtctattttcttctcttcacggctcttcctataccttaggccagtctcaagcactcactggagacccttgggccttgggcgaccattgagtcctagtctcccttgtttgtgcccctgtaggaggtaggtccttttctcctccggcctagtaggggaccttgggtaacatcccatttttcggccaaggtgagttgttttaggataaaaaaatttaccacaaattctcatttaaatttccacagaaatcctgttcgtatccccattttgatttccctaagttccttgttctccctctaaaaagagaatgattgcaccctgcctgtttacctcaggattgttgtgattgtagaaacgaagctatgtgaaaattatataagtattataaaggtgaaatacttttgctctc

SEQ ID NO: 459147 - DNA, 862 bp, Homo sapiens
ctgcgacgcgctccggcccaggtggcggccggccgcccagcctccccgcctgctggcgggagaaaccatctcctctggcgggggtaggggcggagctggcgtccgcccacaccggaagaggaagtctaagcgccggaagtggtgggcattctgggtaacgagctatttacttcctgcgggtgcacaggctgtggtcgtctatctccctgttgttcttcccatcggcgaagatggccctggagacggtgccgaaggacctgcggcatctgcgggcctgtttgctgtgttcgctggtcaagactatagaccagtttgaatatgatggttgtgacaattgtgatgcatatctacaaatgaagggtaaccgagagatggtatatgactgcactagctcttcctttgatgggtaactttaagccaggtgtatatgcggtgtcagtcactggtcgcctgccccaaggaatcgtgcgggagctgaaaagtcgaggagtggcctacaaatccagagacacagctataaagacctagcaagatgcaaggctgccagcatctttgctctccacctcctgcctctgcttatttcttgttctggaactaaatgaacagaacttcaaatacttcctaccctccaattcagactcagctgactgttgagagagcagcacatcattttatcattttatcttctttggactacaggtggggtgggagggatttgggttggtggattaacagatggaattgaggagagagtaggatgctgattttcctacccgtggcccaggtctgtgccttccccatgccaaggactctaggtcaaatgtcaataaatatgaacctcgagaaagttctgaaggccatg

SEQ ID NO: 459148 - DNA, 2006 bp, Homo sapiens
ctgcgacgcgctccggcccaggtggcggccggccgcccagcctccccgcctgctggcgggagaaaccatctcctctggcgggggtaggggcggagctggcgtccgcccacaccggaagaggaagtctaagcgccggaagtggtgggcattctgggtaacgagctatttacttcctgcgggtgcacaggctgtggtcgtctatctccctgttgttcttcccatcggcgaagatggccctggagacggtgccgaaggacctgcggcatctgcgggcctgtttgctgtgttcgctggtcaagactatagaccagtttgaatatgatggttgtgacaattgtgatgcatatctacaaatgaagggtaaccgagagatggtatatgactgcactagctcttcctttgatggaatcattgcgatgatgagtccagaggacagctgggtctccaagtggcagcgagtcagtaactttaagccaggtgtatatgcggtgtcagtcactggtcgcctgccccaaggaatcgtgcgggagctgaaaagtcgaggagtggcctacaaatccagagacacagctataaagacctagcaagatgcaaggctgccagcatctttgctctccacctcctgcctctgcttatttcttgttctggaactaaatgaacagaacttcaaatacttcctaccctccaattcagactcagctgactgttgagagagcagcacatcattttatcattttatcttctttggactacaggtggggtgggagggatttgggttggtggattaacagatggaattgaggagagagtaggatgctgattttcctacccgtggcccaggtctgtgccttccccatgccaaggactctaggtcaaatgtcaataaatatgaacctcgagaaagttctgaaggccatgacacctgccttgcctccctcttccattctcttaggcacagtaatagcttatttgccctataagaaccttcccagagcagcagaggcccttctactccctcttgactgtctcagcctctgggattgcagcctttgtagtgtgcttccttgcttcctatcagagggtgctgatccagaggctcagtaaccccatcaacttggtggccctggtgtctcacacttgtatccttctgccctcgagacctggcacagcagtatcccttgaagaaatcctgaggctttgtagagtgctccttgaccatgtttaataattcttccctcccctgcttgtctattttcttctcttcacggctcttcctataccttaggccagtctcaagcactcactggagacccttgggccttgggcgaccattgagtcctagtctcccttgtttgtgcccctgtaggaggtaggtccttttctcctccggcctagtaggggaccttgggtaacatcccatttttcggccaaggtgagttgttttaggataaaaaaatttaccacaaattctcatttaaatttccacagaaatcctgttcgtatccccattttgatttccctaagttccttgttctccctctaaaaagagaatgattgcaccctgcctgtttacctcaggattgttgtgattgtagaaacgaagctatgtgaaaattatataagtattataaaggtgaaatacttttgctctcaaaaaaacaacaaaaaaaaattggtggggggcgctccgcgacccagaaaagttttcgaaaccatcgtcggggccgcgcgcacccgagaggtattgaaactgggccacaagggtggtccaaaagaaacctggggccgggaaagcgggggcgtctccccaaaaaaaaccgcgggggcaccggcggttggacacaccgagggggttggggcctcggggctcccacgggcacgagcatcatccccccgcgcgtgtgggtgaacaacaccgaagagcagataaaagagagaagaaaaagaaaaaagagaacagagaaaaagaagaagaaagcacgcaacaaagaacgaacagaagagag

SEQ ID NO: 459149 - DNA, 1695 bp, Homo sapiens
ctgcgacgcgctccggcccaggtggcggccggccgcccagcctccccgcctgctggcgggagaaaccatctcctctggcgggggtaggggcggagctggcgtccgcccacaccggaagaggaagtctaagcgccggaagtggtgggcattctgggtaacgagctatttacttcctgcgggtgcacaggctgtggtcgtctatctccctgttgttcttcccatcggcgaagatggccctggagacggtgccgaaggacctgcggcatctgcgggcctgtttgctgtgttcgctggtcaaggtgtcagtcggggacctggttgtagggcccatgggggaccaagactatagaccagtttgaatatgatggttgtgacaattgtgatgcatatctacaaatgaagggtaaccgagagatggtatatgactgcactagctcttcctttgatggaatcattgcgatgatgagtccagaggacagctgggtctccaagtggcagcgagtcagtaactttaagccaggtgtatatgcggtgtcagtcactggtcgcctgccccaaggaatcgtgcgggagctgaaaagtcgaggagtggcctacaaatccagagacacagctataaagacctagcaagatgcaaggctgccagcatctttgctctccacctcctgcctctgcttatttcttgttctggaactaaatgaacagaacttcaaatacttcctaccctccaattcagactcagctgactgttgagagagcagcacatcattttatcattttatcttctttggactacaggtggggtgggagggatttgggttggtggattaacagatggaattgaggagagagtaggatgctgattttcctacccgtggcccaggtctgtgccttccccatgccaaggactctaggtcaaatgtcaataaatatgaacctcgagaaagttctgaaggccatgacacctgccttgcctccctcttccattctcttaggcacagtaatagcttatttgccctataagaaccttcccagagcagcagaggcccttctactccctcttgactgtctcagcctctgggattgcagcctttgtagtgtgcttccttgcttcctatcagagggtgctgatccagaggctcagtaaccccatcaacttggtggccctggtgtctcacacttgtatccttctgccctcgagacctggcacagcagtatcccttgaagaaatcctgaggctttgtagagtgctccttgaccatgtttaataattcttccctcccctgcttgtctattttcttctcttcacggctcttcctataccttaggccagtctcaagcactcactggagacccttgggccttgggcgaccattgagtcctagtctcccttgtttgtgcccctgtaggaggtaggtccttttctcctccggcctagtaggggaccttgggtaacatcccatttttcggccaaggtgagttgttttaggataaaaaaatttaccacaaattctcatttaaatttccacagaaatcctgttcgtatccccattttgatttccctaagttccttgttctccctctaaaaagagaatgattgcaccctgcctgtttacctcaggattgttgtgattgtagaaacgaagctatgtgaaaattatataagtattataaaggtgaaatacttttgctctc

SEQ ID NO: 459150 - DNA, 1590 bp, Homo sapiens
ctgcgacgcgctccggcccaggtggcggccggccgcccagcctccccgcctgctggcgggagaaaccatctcctctggcgggggtaggggcggagctggcgtccgcccacaccggaagaggaagtctaagcgccggaagtggtgggcattctgggtaacgagctatttacttcctgcgggtgcacaggctgtggtcgtctatctccctgttgttcttcccatcggcgaagatggccctggagacggtgccgaaggacctgcggcatctgcgggcctgtttgctgtgttcgctggtcaagactatagaccagtttgaatatgatggttgtgacaattgtgatgcatatctacaaatgaagggtaaccgagagatggtatatgactgcactagctcttcctttgatggaatcattgcgatgatgagtccagaggacagctgggtctccaagtggcagcgagtcagtaactttaagccaggtgtatatgcggtgtcagtcactggtcgcctgccccaagacctagcaagatgcaaggctgccagcatctttgctctccacctcctgcctctgcttatttcttgttctggaactaaatgaacagaacttcaaatacttcctaccctccaattcagactcagctgactgttgagagagcagcacatcattttatcattttatcttctttggactacaggtggggtgggagggatttgggttggtggattaacagatggaattgaggagagagtaggatgctgattttcctacccgtggcccaggtctgtgccttccccatgccaaggactctaggtcaaatgtcaataaatatgaacctcgagaaagttctgaaggccatgacacctgccttgcctccctcttccattctcttaggcacagtaatagcttatttgccctataagaaccttcccagagcagcagaggcccttctactccctcttgactgtctcagcctctgggattgcagcctttgtagtgtgcttccttgcttcctatcagagggtgctgatccagaggctcagtaaccccatcaacttggtggccctggtgtctcacacttgtatccttctgccctcgagacctggcacagcagtatcccttgaagaaatcctgaggctttgtagagtgctccttgaccatgtttaataattcttccctcccctgcttgtctattttcttctcttcacggctcttcctataccttaggccagtctcaagcactcactggagacccttgggccttgggcgaccattgagtcctagtctcccttgtttgtgcccctgtaggaggtaggtccttttctcctccggcctagtaggggaccttgggtaacatcccatttttcggccaaggtgagttgttttaggataaaaaaatttaccacaaattctcatttaaatttccacagaaatcctgttcgtatccccattttgatttccctaagttccttgttctccctctaaaaagagaatgattgcaccctgcctgtttacctcaggattgttgtgattgtagaaacgaagctatgtgaaaattatataagtattataaaggtgaaatacttttgctctc

SEQ ID NO: 459151 - DNA, 3611 bp, Homo sapiens
acggcgcgctgggctcacactgtcccgccgcggacgggctttgtggttgggggcgcgcgtgcgagtgccagtgagagtgtgggtgcgcgctgtgggccgcggcgcgggtgggtggccgtgcgttcttgcgagccggcctgcaggaggcgaggctcccctggcctcccgcacccagcggcggaccgagcccctggagggaagttgccgcagccgcccgggccgccggccctcctgtcccgcgccaggtacacagcttctcctagcatgacttcgatctgatcagcaaacaagaaaatttgtctcccgtagttctggggcgtgttcaccacctacaaccacagagctgtcatggctgccatctctacttccatccctgtaatttcacagccccagttcacagccatgaatgaaccacagtgcttctacaacgagtccattgccttcttttataaccgaagtggaaagcatcttgccacagaatggaacacagtcagcaagctggtgatgggacttggaatcactgtttgtatcttcatcatgttggccaacctattggtcatggtggcaatctatgtcaaccgccgcttccattttcctatttattacctaatggctaatctggctgctgcagacttctttgctgggttggcctacttctatctcatgttcaacacaggacccaatactcggagactgactgttagcacatggctccttcgtcagggcctcattgacaccagcctgacggcatctgtggccaacttactggctattgcaatcgagaggcacattacggttttccgcatgcagctccacacacggatgagcaaccggcgggtagtggtggtcattgtggtcatctggactatggccatcgttatgggtgctatacccagtgtgggctggaactgtatctgtgatattgaaaattgttccaacatggcacccctctacagtgactcttacttagtcttctgggccattttcaacttggtgacctttgtggtaatggtggttctctatgctcacatctttggctatgttcgccagaggactatgagaatgtctcggcatagttctggaccccggcggaatcgggataccatgatgagtcttctgaagactgtggtcattgtgcttggggcctttatcatctgctggactcctggattggttttgttacttctagacgtgtgctgtccacagtgcgacgtgctggcctatgagaaattcttccttctccttgctgaattcaactctgccatgaaccccatcatttactcctaccgcgacaaagaaatgagcgccacctttaggcagatcctctgctgccagcgcagtgagaaccccaccggccccacagaaggctcagaccgctcggcttcctccctcaaccacaccatcttggctggagttcacagcaatgaccactctgtggtttagaacggaaactgagatgaggaaccagccgtcctctcttggaggataaacagcctccccctacccaattgccagggcaaggtggggtgtgagagaggagaaaagtcaactcatgtacttaaacactaaccaatgacagtatttgttcctggaccccacaagacttgatatatattgaaaattagcttatgtgacaaccctcatcttgatccccatcccttctgaaagtaggaagttggagctcttgcaatggaattcaagaacagactctggagtgtccatttagactacactaactagacttttaaaagattttgtgtggtttggtgcaagtcagaataaattctggctagttgaatccacaacttcatttatatacaggcttcccttttttatttttaaaggatacgtttcacttaataaacacgtttatgcctatcagcatgtttgtgatggatgagactatggactgcttttaaactaccataattccattttttcccttacataggaaaactgtaagttggaattatcttttgtttagaaagcatgcatgtaatgtatgtatgcagtatgccttacttaaaaagattaaaaggatactaatgttaaatcttctaggaaatagaacctagacttcaaagccagtatttgtttaggtcatgaagcaaacaatgctctaatcacaatattaactgtttaattaaaatgttgtaacaagtataaaacagggaatgtaagtttattaccaaagtgatatgtattccaaaaaagtcatagaagatgaagcactataatattgttcccatatatttaaaatacccaagtacattctaattaccagtatatcagaggaaaattttcgtagtctttgtaaaataatatactcatcatagaaaacttgaaaaatgcagaaatgtataaaaaagcaaaaatgattactgataatatcacaacccagaagtaaccacctttaaaaagcaacccccatgtatgcctatatgtgtattgtatactttttttacataattggagtcatactgtaaacagttttataagtagatctttttcattgcaaaattgccacattttcttatggcattaaaaattttacaaaaacataattttaatggctatattatattccatttaatggatgcaactcagtttatttaaccattcccatgttgttaactatttaggttgtttctaattttcattattataaagttgcagaaatttggtgtacataaaactgtctccatataattgattattaggatatattcccatgaaggattctttttttaaaaaaatgtgaaatgtcatcttgtacttacacctttcatgcaaagggatttcctgcttttgtactgcatgggtggcagttgtgaggaaaagccagtcaaatgacctttttacaaaagaaatgcagtggtcacttcagttgagagtgactttttaatacaacaagatcaactagaagaattcaactgtctcaagaatcaaggtaccccaatatatctcgcaattccaaactttgtttgagggactcgttatccagctcttggtagccacacctgcaatgtaaaatggaagaaaatgcaaagaaaccaaatgtgccgagtgaataaaggattgtcatatcaattagtgtgggtccatctgtagcaaatgggttgagtgtgtcagtatgtggttggttactgtgtattcgccaggaatcaccccgataggctgccaccctattaggtgatacctgtttaatatgttgtccaggtagactagtagttgcatcagtttgctgtaacaagtaaccagtgaggtaacacagtggtgaagcaggtcaggggaggtcaggaggatgtctgagagaaagaagtccgggagatgaatggctgtctaggaaggaggatgtcagtgcacggttagtgtttgagcagagggcagacttgtaaagtacctgtagtgaaaagaatgtggggacccgattagcagaaaggtgtttgcacatactttatacaaaatacagaatactttatattggaagtgaaagaaatgaacgtggacttttacacatgtgcatatttttctggaggctatatggattatttgaaatgaaaagcatactaattggactttaataaatcattttcaatcaaaaaaggtaa

SEQ ID NO: 459152 - DNA, 3557 bp, Homo sapiens
acggcgcgctgggctcacactgtcccgccgcggacgggctttgtggttgggggcgcgcgtgcgagtgccagtgagagtgtgggtgcgcgctgtgggccgcggcgcgggtgggtggccgtgcgttcttgcgagccggcctgcaggaggcgaggctcccctggcctcccgcacccagcggcggaccgagcccctggagggaagttgccgcagccgcccgggccgccggccctcctgtcccgcgccaggtacacagcttctcctagcatgacttcgatctgatcagcaaacaagaaaatttgtctcccgtagttctggggcgtgttcaccacctacaaccacagagctgtcatggctgccatctctacttccatccctgtaatttcacagccccagttcacagccatgaatgaaccacagtgcttctacaacgagtccattgccttcttttataaccgaagtggaaagcatcttgccacagaatggaacacagtcagcaagctggtgatgggacttggaatcactgtttgtatcttcatcatgttggccaacctattggtcatggtggcaatctatgtcaaccgccgcttccattttcctatttattacctaatggctaatctggctgctgcagacttctttgctgggttggcctacttctatctcatgttcaacacaggacccaatactcggagactgactgttagcacatggctccttcgtcagggcctcattgacaccagcctgacggcatctgtggccaacttactggctattgcaatcgagaggcacattacggttttccgcatgcagctccacacacggatgagcaaccggcgggtagtggtggtcattgtggtcatctggactatggccatcgttatgggtgctatacccagtgtgggctggaactgtatctgtgatattgaaaattgttccaacatggcacccctctacagtgactcttacttagtcttctgggccattttcaacttggtgacctttgtggtaatggtggttctctatgctcacatctttggctatgttcgccagaggactatgagaatgtctcggcatagttctggaccccggcggaatcgggataccatgatgagtcttctgaagactgtggtcattgtgcttggggcctttatcatctgctggactcctggattggttttgttacttctagacgtgtgctgtccacagtgcgacgtgctggcctatgagaaattcttccttctccttgctgaattcaactctgccatgaaccccatcatttactcctaccgcgacaaagaaatgagcgccacctttaggcagatcctctgctgccagcgcagtgagaaccccaccggccccacagaaggctcagaccgctcggcttcctccctcaaccacaccatcttggctggagttcacagcaatgaccactctgtggtttagaacggaaactgagatgaggaaccagccgtcctctcttggaggataaacagcctccccctacccaattgccagggcaaggtggggtgtgagagaggagaaaagtcaactcatgtacttaaacactaaccaatgacagtatttgttcctggaccccacaagacttgatatatattgaaaattagcttatgtgacaaccctcatcttgatccccatcccttctgaaagtaggaagttggagctcttgcaatggaattcaagaacagactctggagtgtccatttagactacactaactagacttttaaaagattttgtgtggtttggtgcaagtcagaataaattctggctagttgaatccacaacttcatttatatacaggcttcccttttttatttttaaaggatacgtttcacttaataaacacgtttatgcctatcagcatgtttgtgatggatgagactatggactgcttttaaactaccataattccattttttcccttacataggaaaactgtaagttggaattatcttttgtttagaaagcatgcatgtaatgtatgtatgcagtatgccttacttaaaaagattaaaaggatactaatgttaaatcttctaggaaatagaacctagacttcaaagccagtatttgtttaggtcatgaagcaaacaatgctctaatcacaatattaactgtttaattaaaatgttgtaacaagtataaaacagggaatgtaagtttattaccaaagtgatatgtattccaaaaaagtcatagaagatgaagcactataatattgttcccatatatttaaaatacccaagtacattctaattaccagtatatcagaggaaaattttcgtagtctttgtaaaataatatactcatcatagaaaacttgaaaaatgcagaaatgtataaaaaagcaaaaatgattactgataatatcacaacccagaagtaaccacctttaaaaagcaacccccatgtatgcctatatgtgtattgtatactttttttacataattggagtcatactgtaaacagttttataagtagatctttttcattgcaaaattgccacattttcttatggcattaaaaattttacaaaaacataattttaatggctatattatattccatttaatggatgcaactcagtttatttaaccattcccatgttgttaactatttaggttgtttctaattttcattattataaagttgcagaaatttggtgtacataaaactgtctccatataattgattattaggatatattcccatgaaggattctttttttaaaaaaatgtgaaatgtcatcttgtacttacacctttcatgcaaagggatttcctgcttttgtactgcatgggtggcagttgtgaggaaaagccagtcaaatgacctttttacaaaagaaatgcagtggtcacttcagttgagagtgactttttaatacaacaagatcaactagaagaattcaactgtctcaagaatcaaggtaccccaatatatctcgcaattccaaactttgtttgagggactcgttatccagctcttggtagccacacctgcaatgtaaaatggaagaaaatgcaaagaaaccaaatgtgccgagtgaataaaggattgtcatatcaattagtgtgggtccatctgtagcaaatgggttgagtgtgtcagtatgtggttggttactgtgtattcgccaggaatcaccccgataggctgccaccctattaggtgatacctgtttaatatgttgtccaggtagactagtagttgcatcagtttgctgtaacaagtaaccagtgaggtaacacagtggtgaagcaggtcaggggaggtcaggaggatgtctgagagaaagaagtccgggagatgaatggctgtctaggaaggaggatgtcagtgcacggttagtgtttgagcagagggcagacttgtaaagtacctgtagtgaaaagaatgtggggacccgattagcagaaagaaatgaacgtggacttttacacatgtgcatatttttctggaggctatatggattatttgaaatgaaaagcatactaattggactttaataaatcattttcaatcaaaaaaggtaa

SEQ ID NO: 459153 - DNA, 3499 bp, Homo sapiens
cctgaagccagcccgggggcggcaggagagggacgcgcggcggcagcgagcgcaggtggacgtctgatttatgaagctccccatccacctatctgagtacctgacttctcaggactgacacctacagcatcaggtacacagcttctcctagcatgacttcgatctgatcagcaaacaagaaaatttgtctcccgtagttctggggcgtgttcaccacctacaaccacagagctgtcatggctgccatctctacttccatccctgtaatttcacagccccagttcacagccatgaatgaaccacagtgcttctacaacgagtccattgccttcttttataaccgaagtggaaagcatcttgccacagaatggaacacagtcagcaagctggtgatgggacttggaatcactgtttgtatcttcatcatgttggccaacctattggtcatggtggcaatctatgtcaaccgccgcttccattttcctatttattacctaatggctaatctggctgctgcagacttctttgctgggttggcctacttctatctcatgttcaacacaggacccaatactcggagactgactgttagcacatggctccttcgtcagggcctcattgacaccagcctgacggcatctgtggccaacttactggctattgcaatcgagaggcacattacggttttccgcatgcagctccacacacggatgagcaaccggcgggtagtggtggtcattgtggtcatctggactatggccatcgttatgggtgctatacccagtgtgggctggaactgtatctgtgatattgaaaattgttccaacatggcacccctctacagtgactcttacttagtcttctgggccattttcaacttggtgacctttgtggtaatggtggttctctatgctcacatctttggctatgttcgccagaggactatgagaatgtctcggcatagttctggaccccggcggaatcgggataccatgatgagtcttctgaagactgtggtcattgtgcttggggcctttatcatctgctggactcctggattggttttgttacttctagacgtgtgctgtccacagtgcgacgtgctggcctatgagaaattcttccttctccttgctgaattcaactctgccatgaaccccatcatttactcctaccgcgacaaagaaatgagcgccacctttaggcagatcctctgctgccagcgcagtgagaaccccaccggccccacagaaggctcagaccgctcggcttcctccctcaaccacaccatcttggctggagttcacagcaatgaccactctgtggtttagaacggaaactgagatgaggaaccagccgtcctctcttggaggataaacagcctccccctacccaattgccagggcaaggtggggtgtgagagaggagaaaagtcaactcatgtacttaaacactaaccaatgacagtatttgttcctggaccccacaagacttgatatatattgaaaattagcttatgtgacaaccctcatcttgatccccatcccttctgaaagtaggaagttggagctcttgcaatggaattcaagaacagactctggagtgtccatttagactacactaactagacttttaaaagattttgtgtggtttggtgcaagtcagaataaattctggctagttgaatccacaacttcatttatatacaggcttcccttttttatttttaaaggatacgtttcacttaataaacacgtttatgcctatcagcatgtttgtgatggatgagactatggactgcttttaaactaccataattccattttttcccttacataggaaaactgtaagttggaattatcttttgtttagaaagcatgcatgtaatgtatgtatgcagtatgccttacttaaaaagattaaaaggatactaatgttaaatcttctaggaaatagaacctagacttcaaagccagtatttgtttaggtcatgaagcaaacaatgctctaatcacaatattaactgtttaattaaaatgttgtaacaagtataaaacagggaatgtaagtttattaccaaagtgatatgtattccaaaaaagtcatagaagatgaagcactataatattgttcccatatatttaaaatacccaagtacattctaattaccagtatatcagaggaaaattttcgtagtctttgtaaaataatatactcatcatagaaaacttgaaaaatgcagaaatgtataaaaaagcaaaaatgattactgataatatcacaacccagaagtaaccacctttaaaaagcaacccccatgtatgcctatatgtgtattgtatactttttttacataattggagtcatactgtaaacagttttataagtagatctttttcattgcaaaattgccacattttcttatggcattaaaaattttacaaaaacataattttaatggctatattatattccatttaatggatgcaactcagtttatttaaccattcccatgttgttaactatttaggttgtttctaattttcattattataaagttgcagaaatttggtgtacataaaactgtctccatataattgattattaggatatattcccatgaaggattctttttttaaaaaaatgtgaaatgtcatcttgtacttacacctttcatgcaaagggatttcctgcttttgtactgcatgggtggcagttgtgaggaaaagccagtcaaatgacctttttacaaaagaaatgcagtggtcacttcagttgagagtgactttttaatacaacaagatcaactagaagaattcaactgtctcaagaatcaaggtaccccaatatatctcgcaattccaaactttgtttgagggactcgttatccagctcttggtagccacacctgcaatgtaaaatggaagaaaatgcaaagaaaccaaatgtgccgagtgaataaaggattgtcatatcaattagtgtgggtccatctgtagcaaatgggttgagtgtgtcagtatgtggttggttactgtgtattcgccaggaatcaccccgataggctgccaccctattaggtgatacctgtttaatatgttgtccaggtagactagtagttgcatcagtttgctgtaacaagtaaccagtgaggtaacacagtggtgaagcaggtcaggggaggtcaggaggatgtctgagagaaagaagtccgggagatgaatggctgtctaggaaggaggatgtcagtgcacggttagtgtttgagcagagggcagacttgtaaagtacctgtagtgaaaagaatgtggggacccgattagcagaaaggtgtttgcacatactttatacaaaatacagaatactttatattggaagtgaaagaaatgaacgtggacttttacacatgtgcatatttttctggaggctatatggattatttgaaatgaaaagcatactaattggactttaataaatcattttcaatcaaaaaaggtaa

SEQ ID NO: 459154 - DNA, 3600 bp, Homo sapiens
tcagccccgctgcggagcgcggcgctggactctatggggctggcagtgagagtggacgctgccgcggaggagaagcgcaagggtctcactcgttgctcaggctggagtacagtggtgccatcacagtatactgcaacctccacctcctgggctcaggtggacgtctgatttatgaagctccccatccacctatctgagtacctgacttctcaggactgacacctacagcatcaggtacacagcttctcctagcatgacttcgatctgatcagcaaacaagaaaatttgtctcccgtagttctggggcgtgttcaccacctacaaccacagagctgtcatggctgccatctctacttccatccctgtaatttcacagccccagttcacagccatgaatgaaccacagtgcttctacaacgagtccattgccttcttttataaccgaagtggaaagcatcttgccacagaatggaacacagtcagcaagctggtgatgggacttggaatcactgtttgtatcttcatcatgttggccaacctattggtcatggtggcaatctatgtcaaccgccgcttccattttcctatttattacctaatggctaatctggctgctgcagacttctttgctgggttggcctacttctatctcatgttcaacacaggacccaatactcggagactgactgttagcacatggctccttcgtcagggcctcattgacaccagcctgacggcatctgtggccaacttactggctattgcaatcgagaggcacattacggttttccgcatgcagctccacacacggatgagcaaccggcgggtagtggtggtcattgtggtcatctggactatggccatcgttatgggtgctatacccagtgtgggctggaactgtatctgtgatattgaaaattgttccaacatggcacccctctacagtgactcttacttagtcttctgggccattttcaacttggtgacctttgtggtaatggtggttctctatgctcacatctttggctatgttcgccagaggactatgagaatgtctcggcatagttctggaccccggcggaatcgggataccatgatgagtcttctgaagactgtggtcattgtgcttggggcctttatcatctgctggactcctggattggttttgttacttctagacgtgtgctgtccacagtgcgacgtgctggcctatgagaaattcttccttctccttgctgaattcaactctgccatgaaccccatcatttactcctaccgcgacaaagaaatgagcgccacctttaggcagatcctctgctgccagcgcagtgagaaccccaccggccccacagaaggctcagaccgctcggcttcctccctcaaccacaccatcttggctggagttcacagcaatgaccactctgtggtttagaacggaaactgagatgaggaaccagccgtcctctcttggaggataaacagcctccccctacccaattgccagggcaaggtggggtgtgagagaggagaaaagtcaactcatgtacttaaacactaaccaatgacagtatttgttcctggaccccacaagacttgatatatattgaaaattagcttatgtgacaaccctcatcttgatccccatcccttctgaaagtaggaagttggagctcttgcaatggaattcaagaacagactctggagtgtccatttagactacactaactagacttttaaaagattttgtgtggtttggtgcaagtcagaataaattctggctagttgaatccacaacttcatttatatacaggcttcccttttttatttttaaaggatacgtttcacttaataaacacgtttatgcctatcagcatgtttgtgatggatgagactatggactgcttttaaactaccataattccattttttcccttacataggaaaactgtaagttggaattatcttttgtttagaaagcatgcatgtaatgtatgtatgcagtatgccttacttaaaaagattaaaaggatactaatgttaaatcttctaggaaatagaacctagacttcaaagccagtatttgtttaggtcatgaagcaaacaatgctctaatcacaatattaactgtttaattaaaatgttgtaacaagtataaaacagggaatgtaagtttattaccaaagtgatatgtattccaaaaaagtcatagaagatgaagcactataatattgttcccatatatttaaaatacccaagtacattctaattaccagtatatcagaggaaaattttcgtagtctttgtaaaataatatactcatcatagaaaacttgaaaaatgcagaaatgtataaaaaagcaaaaatgattactgataatatcacaacccagaagtaaccacctttaaaaagcaacccccatgtatgcctatatgtgtattgtatactttttttacataattggagtcatactgtaaacagttttataagtagatctttttcattgcaaaattgccacattttcttatggcattaaaaattttacaaaaacataattttaatggctatattatattccatttaatggatgcaactcagtttatttaaccattcccatgttgttaactatttaggttgtttctaattttcattattataaagttgcagaaatttggtgtacataaaactgtctccatataattgattattaggatatattcccatgaaggattctttttttaaaaaaatgtgaaatgtcatcttgtacttacacctttcatgcaaagggatttcctgcttttgtactgcatgggtggcagttgtgaggaaaagccagtcaaatgacctttttacaaaagaaatgcagtggtcacttcagttgagagtgactttttaatacaacaagatcaactagaagaattcaactgtctcaagaatcaaggtaccccaatatatctcgcaattccaaactttgtttgagggactcgttatccagctcttggtagccacacctgcaatgtaaaatggaagaaaatgcaaagaaaccaaatgtgccgagtgaataaaggattgtcatatcaattagtgtgggtccatctgtagcaaatgggttgagtgtgtcagtatgtggttggttactgtgtattcgccaggaatcaccccgataggctgccaccctattaggtgatacctgtttaatatgttgtccaggtagactagtagttgcatcagtttgctgtaacaagtaaccagtgaggtaacacagtggtgaagcaggtcaggggaggtcaggaggatgtctgagagaaagaagtccgggagatgaatggctgtctaggaaggaggatgtcagtgcacggttagtgtttgagcagagggcagacttgtaaagtacctgtagtgaaaagaatgtggggacccgattagcagaaaggtgtttgcacatactttatacaaaatacagaatactttatattggaagtgaaagaaatgaacgtggacttttacacatgtgcatatttttctggaggctatatggattatttgaaatgaaaagcatactaattggactttaataaatcattttcaatcaaaaaaggtaa

SEQ ID NO: 459155 - DNA, 3089 bp, Homo sapiens
acggcgcgctgggctcacactgtcccgccgcggacgggctttgtggttgggggcgcgcgtgcgagtgccagtgagagtgtgggtgcgcgctgtgggccgcggcgcgggtgggtggccgtgcgttcttgcgagccggcctgcaggaggcgaggctcccctggcctcccgcacccagcggcggaccgagcccctggagggaagttgccgcagccgcccgggccgccggccctcctgtcccgcgccaggtacacagcttctcctagcatgacttcgatctgatcagcaaacaagaaaatttgtctcccgtagttctggggcgtgttcaccacctacaaccacagagctgtcatggctgccatctctacttccatccctgtaatttcacagccccagttcacagccatgaatgaaccacagtgcttctacaacgagtccattgccttcttttataaccgaagtggaaagcatcttgccacagaatggaacacagtcagcaagctggtgatgggacttggaatcactgtttgtatcttcatcatgttggccaacctattggtcatggtggcaatctatgtcaaccgccgcttccattttcctatttattacctaatggctaatctggctgctgcagacttctttgctgggttggcctacttctatctcatgttcaacacaggacccaatactcggagactgactgttagcacatggctccttcgtcagggcctcattgacaccagcctgacggcatctgtggccaacttactggctattgcaatcgagaggcacattacggttttccgcatgcagctccacacacggatgagcaaccggcgggtagtggtggtcattgtggtcatctggactatggccatcgttatgggtgctatacccagtgtgggctggaactgtatctgtgatattgaaaattgttccaacatggcacccctctacagtgactcttacttagtcttctgggccattttcaacttggtgacctttgtggtaatggtggttctctatgctcacatctttggctatgttcgccagaggactatgagaatgtctcggcatagttctggaccccggcggaatcgggataccatgatgagtcttctgaagactgtggtcattgtgcttggggcctttatcatctgctggactcctggattggttttgttacttctagacgtgtgctgtccacagtgcgacgtgctggcctatgagaaattcttccttctccttgctgaattcaactctgccatgaaccccatcatttactcctaccgcgacaaagaaatgagcgccacctttaggcagatcctctgctgccagcgcagtgagaaccccaccggccccacagaaggctcagaccgctcggcttcctccctcaaccacaccatcttggctggagttcacagcaatgaccactctgtggtttagaacggaaactgagatgaggaaccagccgtcctctcttggaggataaacagcctccccctacccaattgccagggcaaggtggggtgtgagagaggagaaaagtcaactcatgtacttaaacactaaccaatgacagtatttgttcctggaccccacaagacttgatatatattgaaaattagcttatgtgacaaccctcatcttgatccccatcccttctgaaagtaggaagttggagctcttgcaatggaattcaagaacagactctggagtgtccatttagactacactaactagacttttaaaagattttgtgtggtttggtgcaagtcagaataaattctggctagttgaatccacaacttcatttatatacaggcttcccttttttatttttaaaggatacgtttcacttaataaacacgtttatgcctatcagcatgtttgtgatggatgagactatggactgcttttaaactaccataattccattttttcccttacataggaaaactgtaagttggaattatcttttgtttagaaagcatgcatgtaatgtatgtatgcagtatgccttacttaaaaagattaaaaggatactaatgttaaatcttctaggaaatagaacctagacttcaaagccagtatttgtttaggtcatgaagcaaacaatgctctaatcacaatattaactgtttaattaaaatgttgtaacaagtataaaacagggaatgtaagtttattaccaaagtgatatgtattccaaaaaagtcatagaagatgaagcactataatattgttcccatatatttaaaatacccaagtacattctaattaccagtatatcagaggaaaattttcgtagtctttgtaaaataatatactcatcatagaaaacttgaaaaatgcagaaatgtataaaaaagcaaaaatgattactgataatatcacaacccagaagtaaccacctttaaaaagcaacccccatgtatgcctatatgtgtattgtatactttttttacataattggagtcatactgtaaacagttttataagtagatctttttcattgcaaaattgccacattttcttatggcattaaaaattttacaaaaacataattttaatggctatattatattccatttaatggatgcaactcagtttatttaaccattcccatgttgttaactatttaggttgtttctaattttcattattataaagttgcagaaatttggtgtacataaaactgtctccatataattgattattaggatatattcccatgaaggattctttttttaaaaaaatgtgaaatgtcatcttgtacttacacctttcatgcaaagggatttcctgcttttgtactgcatgggtggcagttgtgaggaaaagccagtcaaatgacctttttacaaaagaaatgcagtggtcacttcagttgagagtgactttttaatacaacaagatcaactagaagaattcaactgtctcaagaatcaaggtaccccaatatatctcgcaattccaaactttgtttgagggactcgttatccagctcttggtagccacacctgcaatgtaaaatggaagaaaatgcaaagaaaccaaatgtgccgagtgaataaaggattgtcatatca

SEQ ID NO: 459156 - DNA, 2548 bp, Homo sapiens
cttagcgcccgaagcgagtctgtataagcgagagcgcacgccttgctgcatacactctcttaatttttcaccgctacagggcctttatcatctgctggactcctggattggttttgttacttctagacgtgtgctgtccacagtgcgacgtgctggcctatgagaaattcttccttctccttgctgaattcaactctgccatgaaccccatcatttactcctaccgcgacaaagaaatgagcgccacctttaggcagatcctctgctgccagcgcagtgagaaccccaccggccccacagaaggctcagaccgctcggcttcctccctcaaccacaccatcttggctggagttcacagcaatgaccactctgtggtttagaacggaaactgagatgaggaaccagccgtcctctcttggaggataaacagcctccccctacccaattgccagggcaaggtggggtgtgagagaggagaaaagtcaactcatgtacttaaacactaaccaatgacagtatttgttcctggaccccacaagacttgatatatattgaaaattagcttatgtgacaaccctcatcttgatccccatcccttctgaaagtaggaagttggagctcttgcaatggaattcaagaacagactctggagtgtccatttagactacactaactagacttttaaaagattttgtgtggtttggtgcaagtcagaataaattctggctagttgaatccacaacttcatttatatacaggcttcccttttttatttttaaaggatacgtttcacttaataaacacgtttatgcctatcagcatgtttgtgatggatgagactatggactgcttttaaactaccataattccattttttcccttacataggaaaactgtaagttggaattatcttttgtttagaaagcatgcatgtaatgtatgtatgcagtatgccttacttaaaaagattaaaaggatactaatgttaaatcttctaggaaatagaacctagacttcaaagccagtatttgtttaggtcatgaagcaaacaatgctctaatcacaatattaactgtttaattaaaatgttgtaacaagtataaaacagggaatgtaagtttattaccaaagtgatatgtattccaaaaaagtcatagaagatgaagcactataatattgttcccatatatttaaaatacccaagtacattctaattaccagtatatcagaggaaaattttcgtagtctttgtaaaataatatactcatcatagaaaacttgaaaaatgcagaaatgtataaaaaagcaaaaatgattactgataatatcacaacccagaagtaaccacctttaaaaagcaacccccatgtatgcctatatgtgtattgtatactttttttacataattggagtcatactgtaaacagttttataagtagatctttttcattgcaaaattgccacattttcttatggcattaaaaattttacaaaaacataattttaatggctatattatattccatttaatggatgcaactcagtttatttaaccattcccatgttgttaactatttaggttgtttctaattttcattattataaagttgcagaaatttggtgtacataaaactgtctccatataattgattattaggatatattcccatgaaggattctttttttaaaaaaatgtgaaatgtcatcttgtacttacacctttcatgcaaagggatttcctgcttttgtactgcatgggtggcagttgtgaggaaaagccagtcaaatgacctttttacaaaagaaatgcagtggtcacttcagttgagagtgactttttaatacaacaagatcaactagaagaattcaactgtctcaagaatcaaggtaccccaatatatctcgcaattccaaactttgtttgagggactcgttatccagctcttggtagccacacctgcaatgtaaaatggaagaaaatgcaaagaaaccaaatgtgccgagtgaataaaggattgtcatatcaattagtgtgggtccatctgtagcaaatgggttgagtgtgtcagtatgtggttggttactgtgtattcgccaggaatcaccccgataggctgccaccctattaggtgatacctgtttaatatgttgtccaggtagactagtagttgcatcagtttgctgtaacaagtaaccagtgaggtaacacagtggtgaagcaggtcaggggaggtcaggaggatgtctgagagaaagaagtccgggagatgaatggctgtctaggaaggaggatgtcagtgcacggttagtgtttgagcagagggcagacttgtaaagtacctgtagtgaaaagaatgtggggacccgattagcagaaaggtgtttgcacatactttatacaaaatacagaatactttatattggaagtgaaagaaatgaacgtggacttttacacatgtgcatatttttctggaggctatatggattatttgaaatgaaaagcatactaattggactttaataaatcattttcaatcaaaaaaggtaa

SEQ ID NO: 459157 - DNA, 3713 bp, Homo sapiens
tcagctctccactgtggattattcaattcctttattatttaatggcaggatggcttttcccccgactcaccctcctcagctctgcaacttgaaactgtcttcccaaaacatctagctgggatgttggattcaaacctatgaaaattcctcaacttaagagtatttggacagatagcacagaagtcgtggcttttagaccttagcttttccctaccggctttctgtttgcattaagctagtatttgacacttgatgtctagggattcttacctcctttggccaatggtacttcacacccatatgctagtccttttatgctaaatgtgggttttcctgttgttttccaggtacacagcttctcctagcatgacttcgatctgatcagcaaacaagaaaatttgtctcccgtagttctggggcgtgttcaccacctacaaccacagagctgtcatggctgccatctctacttccatccctgtaatttcacagccccagttcacagccatgaatgaaccacagtgcttctacaacgagtccattgccttcttttataaccgaagtggaaagcatcttgccacagaatggaacacagtcagcaagctggtgatgggacttggaatcactgtttgtatcttcatcatgttggccaacctattggtcatggtggcaatctatgtcaaccgccgcttccattttcctatttattacctaatggctaatctggctgctgcagacttctttgctgggttggcctacttctatctcatgttcaacacaggacccaatactcggagactgactgttagcacatggctccttcgtcagggcctcattgacaccagcctgacggcatctgtggccaacttactggctattgcaatcgagaggcacattacggttttccgcatgcagctccacacacggatgagcaaccggcgggtagtggtggtcattgtggtcatctggactatggccatcgttatgggtgctatacccagtgtgggctggaactgtatctgtgatattgaaaattgttccaacatggcacccctctacagtgactcttacttagtcttctgggccattttcaacttggtgacctttgtggtaatggtggttctctatgctcacatctttggctatgttcgccagaggactatgagaatgtctcggcatagttctggaccccggcggaatcgggataccatgatgagtcttctgaagactgtggtcattgtgcttggggcctttatcatctgctggactcctggattggttttgttacttctagacgtgtgctgtccacagtgcgacgtgctggcctatgagaaattcttccttctccttgctgaattcaactctgccatgaaccccatcatttactcctaccgcgacaaagaaatgagcgccacctttaggcagatcctctgctgccagcgcagtgagaaccccaccggccccacagaaggctcagaccgctcggcttcctccctcaaccacaccatcttggctggagttcacagcaatgaccactctgtggtttagaacggaaactgagatgaggaaccagccgtcctctcttggaggataaacagcctccccctacccaattgccagggcaaggtggggtgtgagagaggagaaaagtcaactcatgtacttaaacactaaccaatgacagtatttgttcctggaccccacaagacttgatatatattgaaaattagcttatgtgacaaccctcatcttgatccccatcccttctgaaagtaggaagttggagctcttgcaatggaattcaagaacagactctggagtgtccatttagactacactaactagacttttaaaagattttgtgtggtttggtgcaagtcagaataaattctggctagttgaatccacaacttcatttatatacaggcttcccttttttatttttaaaggatacgtttcacttaataaacacgtttatgcctatcagcatgtttgtgatggatgagactatggactgcttttaaactaccataattccattttttcccttacataggaaaactgtaagttggaattatcttttgtttagaaagcatgcatgtaatgtatgtatgcagtatgccttacttaaaaagattaaaaggatactaatgttaaatcttctaggaaatagaacctagacttcaaagccagtatttgtttaggtcatgaagcaaacaatgctctaatcacaatattaactgtttaattaaaatgttgtaacaagtataaaacagggaatgtaagtttattaccaaagtgatatgtattccaaaaaagtcatagaagatgaagcactataatattgttcccatatatttaaaatacccaagtacattctaattaccagtatatcagaggaaaattttcgtagtctttgtaaaataatatactcatcatagaaaacttgaaaaatgcagaaatgtataaaaaagcaaaaatgattactgataatatcacaacccagaagtaaccacctttaaaaagcaacccccatgtatgcctatatgtgtattgtatactttttttacataattggagtcatactgtaaacagttttataagtagatctttttcattgcaaaattgccacattttcttatggcattaaaaattttacaaaaacataattttaatggctatattatattccatttaatggatgcaactcagtttatttaaccattcccatgttgttaactatttaggttgtttctaattttcattattataaagttgcagaaatttggtgtacataaaactgtctccatataattgattattaggatatattcccatgaaggattctttttttaaaaaaatgtgaaatgtcatcttgtacttacacctttcatgcaaagggatttcctgcttttgtactgcatgggtggcagttgtgaggaaaagccagtcaaatgacctttttacaaaagaaatgcagtggtcacttcagttgagagtgactttttaatacaacaagatcaactagaagaattcaactgtctcaagaatcaaggtaccccaatatatctcgcaattccaaactttgtttgagggactcgttatccagctcttggtagccacacctgcaatgtaaaatggaagaaaatgcaaagaaaccaaatgtgccgagtgaataaaggattgtcatatcaattagtgtgggtccatctgtagcaaatgggttgagtgtgtcagtatgtggttggttactgtgtattcgccaggaatcaccccgataggctgccaccctattaggtgatacctgtttaatatgttgtccaggtagactagtagttgcatcagtttgctgtaacaagtaaccagtgaggtaacacagtggtgaagcaggtcaggggaggtcaggaggatgtctgagagaaagaagtccgggagatgaatggctgtctaggaaggaggatgtcagtgcacggttagtgtttgagcagagggcagacttgtaaagtacctgtagtgaaaagaatgtggggacccgattagcagaaaggtgtttgcacatactttatacaaaatacagaatactttatattggaagtgaaagaaatgaacgtggacttttacacatgtgcatatttttctggaggctatatggattatttgaaatgaaaagcatactaattggactttaataaatcattttcaatcaaaaaaggtaa

SEQ ID NO: 459158 - DNA, 3689 bp, Homo sapiens
acggcgcgctgggctcacactgtcccgccgcggacgggctttgtggttgggggcgcgcgtgcgagtgccagtgagagtgtgggtgcgcgctgtgggccgcggcgcgggtgggtggccgtgcgttcttgcgagccggcctgcaggaggcgaggctcccctggcctcccgcacccagcggcggaccgagcccctggagggaagttgccgcagccgcccgggccgccggccctcctgtcccgcgccaggtggacgtctgatttatgaagctccccatccacctatctgagtacctgacttctcaggactgacacctacagcatcaggtacacagcttctcctagcatgacttcgatctgatcagcaaacaagaaaatttgtctcccgtagttctggggcgtgttcaccacctacaaccacagagctgtcatggctgccatctctacttccatccctgtaatttcacagccccagttcacagccatgaatgaaccacagtgcttctacaacgagtccattgccttcttttataaccgaagtggaaagcatcttgccacagaatggaacacagtcagcaagctggtgatgggacttggaatcactgtttgtatcttcatcatgttggccaacctattggtcatggtggcaatctatgtcaaccgccgcttccattttcctatttattacctaatggctaatctggctgctgcagacttctttgctgggttggcctacttctatctcatgttcaacacaggacccaatactcggagactgactgttagcacatggctccttcgtcagggcctcattgacaccagcctgacggcatctgtggccaacttactggctattgcaatcgagaggcacattacggttttccgcatgcagctccacacacggatgagcaaccggcgggtagtggtggtcattgtggtcatctggactatggccatcgttatgggtgctatacccagtgtgggctggaactgtatctgtgatattgaaaattgttccaacatggcacccctctacagtgactcttacttagtcttctgggccattttcaacttggtgacctttgtggtaatggtggttctctatgctcacatctttggctatgttcgccagaggactatgagaatgtctcggcatagttctggaccccggcggaatcgggataccatgatgagtcttctgaagactgtggtcattgtgcttggggcctttatcatctgctggactcctggattggttttgttacttctagacgtgtgctgtccacagtgcgacgtgctggcctatgagaaattcttccttctccttgctgaattcaactctgccatgaaccccatcatttactcctaccgcgacaaagaaatgagcgccacctttaggcagatcctctgctgccagcgcagtgagaaccccaccggccccacagaaggctcagaccgctcggcttcctccctcaaccacaccatcttggctggagttcacagcaatgaccactctgtggtttagaacggaaactgagatgaggaaccagccgtcctctcttggaggataaacagcctccccctacccaattgccagggcaaggtggggtgtgagagaggagaaaagtcaactcatgtacttaaacactaaccaatgacagtatttgttcctggaccccacaagacttgatatatattgaaaattagcttatgtgacaaccctcatcttgatccccatcccttctgaaagtaggaagttggagctcttgcaatggaattcaagaacagactctggagtgtccatttagactacactaactagacttttaaaagattttgtgtggtttggtgcaagtcagaataaattctggctagttgaatccacaacttcatttatatacaggcttcccttttttatttttaaaggatacgtttcacttaataaacacgtttatgcctatcagcatgtttgtgatggatgagactatggactgcttttaaactaccataattccattttttcccttacataggaaaactgtaagttggaattatcttttgtttagaaagcatgcatgtaatgtatgtatgcagtatgccttacttaaaaagattaaaaggatactaatgttaaatcttctaggaaatagaacctagacttcaaagccagtatttgtttaggtcatgaagcaaacaatgctctaatcacaatattaactgtttaattaaaatgttgtaacaagtataaaacagggaatgtaagtttattaccaaagtgatatgtattccaaaaaagtcatagaagatgaagcactataatattgttcccatatatttaaaatacccaagtacattctaattaccagtatatcagaggaaaattttcgtagtctttgtaaaataatatactcatcatagaaaacttgaaaaatgcagaaatgtataaaaaagcaaaaatgattactgataatatcacaacccagaagtaaccacctttaaaaagcaacccccatgtatgcctatatgtgtattgtatactttttttacataattggagtcatactgtaaacagttttataagtagatctttttcattgcaaaattgccacattttcttatggcattaaaaattttacaaaaacataattttaatggctatattatattccatttaatggatgcaactcagtttatttaaccattcccatgttgttaactatttaggttgtttctaattttcattattataaagttgcagaaatttggtgtacataaaactgtctccatataattgattattaggatatattcccatgaaggattctttttttaaaaaaatgtgaaatgtcatcttgtacttacacctttcatgcaaagggatttcctgcttttgtactgcatgggtggcagttgtgaggaaaagccagtcaaatgacctttttacaaaagaaatgcagtggtcacttcagttgagagtgactttttaatacaacaagatcaactagaagaattcaactgtctcaagaatcaaggtaccccaatatatctcgcaattccaaactttgtttgagggactcgttatccagctcttggtagccacacctgcaatgtaaaatggaagaaaatgcaaagaaaccaaatgtgccgagtgaataaaggattgtcatatcaattagtgtgggtccatctgtagcaaatgggttgagtgtgtcagtatgtggttggttactgtgtattcgccaggaatcaccccgataggctgccaccctattaggtgatacctgtttaatatgttgtccaggtagactagtagttgcatcagtttgctgtaacaagtaaccagtgaggtaacacagtggtgaagcaggtcaggggaggtcaggaggatgtctgagagaaagaagtccgggagatgaatggctgtctaggaaggaggatgtcagtgcacggttagtgtttgagcagagggcagacttgtaaagtacctgtagtgaaaagaatgtggggacccgattagcagaaaggtgtttgcacatactttatacaaaatacagaatactttatattggaagtgaaagaaatgaacgtggacttttacacatgtgcatatttttctggaggctatatggattatttgaaatgaaaagcatactaattggactttaataaatcattttcaatcaaaaaaggtaa

SEQ ID NO: 459159 - DNA, 3524 bp, Homo sapiens
tgttttagaaagcagggctgcatggtgtggggatgctgctgctactcattcctgctcattccagtgttctggaaaatgaggtggacgtctgatttatgaagctccccatccacctatctgagtacctgacttctcaggactgacacctacagcatcaggtacacagcttctcctagcatgacttcgatctgatcagcaaacaagaaaatttgtctcccgtagttctggggcgtgttcaccacctacaaccacagagctgtcatggctgccatctctacttccatccctgtaatttcacagccccagttcacagccatgaatgaaccacagtgcttctacaacgagtccattgccttcttttataaccgaagtggaaagcatcttgccacagaatggaacacagtcagcaagctggtgatgggacttggaatcactgtttgtatcttcatcatgttggccaacctattggtcatggtggcaatctatgtcaaccgccgcttccattttcctatttattacctaatggctaatctggctgctgcagacttctttgctgggttggcctacttctatctcatgttcaacacaggacccaatactcggagactgactgttagcacatggctccttcgtcagggcctcattgacaccagcctgacggcatctgtggccaacttactggctattgcaatcgagaggcacattacggttttccgcatgcagctccacacacggatgagcaaccggcgggtagtggtggtcattgtggtcatctggactatggccatcgttatgggtgctatacccagtgtgggctggaactgtatctgtgatattgaaaattgttccaacatggcacccctctacagtgactcttacttagtcttctgggccattttcaacttggtgacctttgtggtaatggtggttctctatgctcacatctttggctatgttcgccagaggactatgagaatgtctcggcatagttctggaccccggcggaatcgggataccatgatgagtcttctgaagactgtggtcattgtgcttggggcctttatcatctgctggactcctggattggttttgttacttctagacgtgtgctgtccacagtgcgacgtgctggcctatgagaaattcttccttctccttgctgaattcaactctgccatgaaccccatcatttactcctaccgcgacaaagaaatgagcgccacctttaggcagatcctctgctgccagcgcagtgagaaccccaccggccccacagaaggctcagaccgctcggcttcctccctcaaccacaccatcttggctggagttcacagcaatgaccactctgtggtttagaacggaaactgagatgaggaaccagccgtcctctcttggaggataaacagcctccccctacccaattgccagggcaaggtggggtgtgagagaggagaaaagtcaactcatgtacttaaacactaaccaatgacagtatttgttcctggaccccacaagacttgatatatattgaaaattagcttatgtgacaaccctcatcttgatccccatcccttctgaaagtaggaagttggagctcttgcaatggaattcaagaacagactctggagtgtccatttagactacactaactagacttttaaaagattttgtgtggtttggtgcaagtcagaataaattctggctagttgaatccacaacttcatttatatacaggcttcccttttttatttttaaaggatacgtttcacttaataaacacgtttatgcctatcagcatgtttgtgatggatgagactatggactgcttttaaactaccataattccattttttcccttacataggaaaactgtaagttggaattatcttttgtttagaaagcatgcatgtaatgtatgtatgcagtatgccttacttaaaaagattaaaaggatactaatgttaaatcttctaggaaatagaacctagacttcaaagccagtatttgtttaggtcatgaagcaaacaatgctctaatcacaatattaactgtttaattaaaatgttgtaacaagtataaaacagggaatgtaagtttattaccaaagtgatatgtattccaaaaaagtcatagaagatgaagcactataatattgttcccatatatttaaaatacccaagtacattctaattaccagtatatcagaggaaaattttcgtagtctttgtaaaataatatactcatcatagaaaacttgaaaaatgcagaaatgtataaaaaagcaaaaatgattactgataatatcacaacccagaagtaaccacctttaaaaagcaacccccatgtatgcctatatgtgtattgtatactttttttacataattggagtcatactgtaaacagttttataagtagatctttttcattgcaaaattgccacattttcttatggcattaaaaattttacaaaaacataattttaatggctatattatattccatttaatggatgcaactcagtttatttaaccattcccatgttgttaactatttaggttgtttctaattttcattattataaagttgcagaaatttggtgtacataaaactgtctccatataattgattattaggatatattcccatgaaggattctttttttaaaaaaatgtgaaatgtcatcttgtacttacacctttcatgcaaagggatttcctgcttttgtactgcatgggtggcagttgtgaggaaaagccagtcaaatgacctttttacaaaagaaatgcagtggtcacttcagttgagagtgactttttaatacaacaagatcaactagaagaattcaactgtctcaagaatcaaggtaccccaatatatctcgcaattccaaactttgtttgagggactcgttatccagctcttggtagccacacctgcaatgtaaaatggaagaaaatgcaaagaaaccaaatgtgccgagtgaataaaggattgtcatatcaattagtgtgggtccatctgtagcaaatgggttgagtgtgtcagtatgtggttggttactgtgtattcgccaggaatcaccccgataggctgccaccctattaggtgatacctgtttaatatgttgtccaggtagactagtagttgcatcagtttgctgtaacaagtaaccagtgaggtaacacagtggtgaagcaggtcaggggaggtcaggaggatgtctgagagaaagaagtccgggagatgaatggctgtctaggaaggaggatgtcagtgcacggttagtgtttgagcagagggcagacttgtaaagtacctgtagtgaaaagaatgtggggacccgattagcagaaaggtgtttgcacatactttatacaaaatacagaatactttatattggaagtgaaagaaatgaacgtggacttttacacatgtgcatatttttctggaggctatatggattatttgaaatgaaaagcatactaattggactttaataaatcattttcaatcaaaaaaggtaa

SEQ ID NO: 459160 - DNA, 3361 bp, Homo sapiens
gtgtcatccttgaaggatagaataaatcagctgtcgtgttctcagtgaaaagtggaaagaagttttaaaggatctgcaaaatagaattatgagacagaggaaagaaagaaacagacaatctgatctctatcttcatcggccagttcacagccatgaatgaaccacagtgcttctacaacgagtccattgccttcttttataaccgaagtggaaagcatcttgccacagaatggaacacagtcagcaagctggtgatgggacttggaatcactgtttgtatcttcatcatgttggccaacctattggtcatggtggcaatctatgtcaaccgccgcttccattttcctatttattacctaatggctaatctggctgctgcagacttctttgctgggttggcctacttctatctcatgttcaacacaggacccaatactcggagactgactgttagcacatggctccttcgtcagggcctcattgacaccagcctgacggcatctgtggccaacttactggctattgcaatcgagaggcacattacggttttccgcatgcagctccacacacggatgagcaaccggcgggtagtggtggtcattgtggtcatctggactatggccatcgttatgggtgctatacccagtgtgggctggaactgtatctgtgatattgaaaattgttccaacatggcacccctctacagtgactcttacttagtcttctgggccattttcaacttggtgacctttgtggtaatggtggttctctatgctcacatctttggctatgttcgccagaggactatgagaatgtctcggcatagttctggaccccggcggaatcgggataccatgatgagtcttctgaagactgtggtcattgtgcttggggcctttatcatctgctggactcctggattggttttgttacttctagacgtgtgctgtccacagtgcgacgtgctggcctatgagaaattcttccttctccttgctgaattcaactctgccatgaaccccatcatttactcctaccgcgacaaagaaatgagcgccacctttaggcagatcctctgctgccagcgcagtgagaaccccaccggccccacagaaggctcagaccgctcggcttcctccctcaaccacaccatcttggctggagttcacagcaatgaccactctgtggtttagaacggaaactgagatgaggaaccagccgtcctctcttggaggataaacagcctccccctacccaattgccagggcaaggtggggtgtgagagaggagaaaagtcaactcatgtacttaaacactaaccaatgacagtatttgttcctggaccccacaagacttgatatatattgaaaattagcttatgtgacaaccctcatcttgatccccatcccttctgaaagtaggaagttggagctcttgcaatggaattcaagaacagactctggagtgtccatttagactacactaactagacttttaaaagattttgtgtggtttggtgcaagtcagaataaattctggctagttgaatccacaacttcatttatatacaggcttcccttttttatttttaaaggatacgtttcacttaataaacacgtttatgcctatcagcatgtttgtgatggatgagactatggactgcttttaaactaccataattccattttttcccttacataggaaaactgtaagttggaattatcttttgtttagaaagcatgcatgtaatgtatgtatgcagtatgccttacttaaaaagattaaaaggatactaatgttaaatcttctaggaaatagaacctagacttcaaagccagtatttgtttaggtcatgaagcaaacaatgctctaatcacaatattaactgtttaattaaaatgttgtaacaagtataaaacagggaatgtaagtttattaccaaagtgatatgtattccaaaaaagtcatagaagatgaagcactataatattgttcccatatatttaaaatacccaagtacattctaattaccagtatatcagaggaaaattttcgtagtctttgtaaaataatatactcatcatagaaaacttgaaaaatgcagaaatgtataaaaaagcaaaaatgattactgataatatcacaacccagaagtaaccacctttaaaaagcaacccccatgtatgcctatatgtgtattgtatactttttttacataattggagtcatactgtaaacagttttataagtagatctttttcattgcaaaattgccacattttcttatggcattaaaaattttacaaaaacataattttaatggctatattatattccatttaatggatgcaactcagtttatttaaccattcccatgttgttaactatttaggttgtttctaattttcattattataaagttgcagaaatttggtgtacataaaactgtctccatataattgattattaggatatattcccatgaaggattctttttttaaaaaaatgtgaaatgtcatcttgtacttacacctttcatgcaaagggatttcctgcttttgtactgcatgggtggcagttgtgaggaaaagccagtcaaatgacctttttacaaaagaaatgcagtggtcacttcagttgagagtgactttttaatacaacaagatcaactagaagaattcaactgtctcaagaatcaaggtaccccaatatatctcgcaattccaaactttgtttgagggactcgttatccagctcttggtagccacacctgcaatgtaaaatggaagaaaatgcaaagaaaccaaatgtgccgagtgaataaaggattgtcatatcaattagtgtgggtccatctgtagcaaatgggttgagtgtgtcagtatgtggttggttactgtgtattcgccaggaatcaccccgataggctgccaccctattaggtgatacctgtttaatatgttgtccaggtagactagtagttgcatcagtttgctgtaacaagtaaccagtgaggtaacacagtggtgaagcaggtcaggggaggtcaggaggatgtctgagagaaagaagtccgggagatgaatggctgtctaggaaggaggatgtcagtgcacggttagtgtttgagcagagggcagacttgtaaagtacctgtagtgaaaagaatgtggggacccgattagcagaaaggtgtttgcacatactttatacaaaatacagaatactttatattggaagtgaaagaaatgaacgtggacttttacacatgtgcatatttttctggaggctatatggattatttgaaatgaaaagcatactaattggactttaataaatcattttcaatcaaaaaaggtaa

SEQ ID NO: 459161 - DNA, 2607 bp, Homo sapiens
tcagctctccactgtggattattcaattcctttattatttaatggcaggatggcttttcccccgactcaccctcctcagctctgcaacttgaaactgtcttcccaaaacatctagctgggatgttggattcaaacctatgaaaattcctcaacttaagagtatttggacagatagcacagaagtcgtggcttttagaccttagcttttccctaccggctttctgtttgcattaagctagtatttgacacttgatgtctagggattcttacctcctttggccaatggtacttcacacccatatgctagtccttttatgctaaatgtgggttttcctgttgttttccaggtacacagcttctcctagcatgacttcgatctgatcagcaaacaagaaaatttgtctcccgtagttctggggcgtgttcaccacctacaaccacagagctgtcatggctgccatctctacttccatccctgtaatttcacagccccagttcacagccatgaatgaaccacagtgcttctacaacgagtccattgccttcttttataaccgaagtggaaagcatcttgccacagaatggaacacagtcagcaagctggtgatgggacttggaatcactgtttgtatcttcatcatgttggccaacctattggtcatggtggcaatctatgtcaaccgccgcttccattttcctatttattacctaatggctaatctggctgctgcagacttctttgctgggttggcctacttctatctcatgttcaacacaggacccaatactcggagactgactgttagcacatggctccttcgtcagggcctcattgacaccagcctgacggcatctgtggccaacttactggctattgcaatcgagaggcacattacggttttccgcatgcagctccacacacggatgagcaaccggcgggtagtggtggtcattgtggtcatctggactatggccatcgttatgggtgctatacccagtgtgggctggaactgtatctgtgatattgaaaattgttccaacatggcacccctctacagtgactcttacttagtcttctgggccattttcaacttggtgacctttgtggtaatggtggttctctatgctcacatctttggctatgttcgccagaggactatgagaatgtctcggcatagttctggaccccggcggaatcgggataccatgatgagtcttctgaagactgtggtcattgtgcttggggcctttatcatctgctggactcctggattggttttgttacttctagacgtgtgctgtccacagtgcgacgtgctggcctatgagaaattcttccttctccttgctgaattcaactctgccatgaaccccatcatttactcctaccgcgacaaagaaatgagcgccacctttaggcagatcctctgctgccagcgcagtgagaaccccaccggccccacagaaggctcagaccgctcggcttcctccctcaaccacaccatcttggctggagttcacagcaatgaccactctgtggtttagaacggaaactgagatgaggaaccagccgtcctctcttggaggataaacagcctccccctacccaattgccagggcaaggtggggtgtgagagaggagaaaagtcaactcatgtacttaaacactaaccaatgacagtatttgttcctggaccccacaagacttgatatatattgaaaattagcttatgtgacaaccctcatcttgatccccatcccttctgaaagtaggaagttggagctcttgcaatggaattcaagaacagactctggagtgtccatttagactacactaactagacttttaaaagattttgtgtggtttggtgcaagtcagaataaattctggctagttgaatccacaacttcatttatatacaggcttcccttttttatttttaaaggatacgtttcacttaataaacacgtttatgcctatcaaaaaaaaaaaaaaaaaaaaaaaaaaaaaaaaaaaaaaaaaaaaaaaaaaaaaaaaaaaaaaaaaaaaaaaaaaagagagaggaggggcgcgcgcccacaaattctccccccgcgaggaggagcccccacgacacggcacccccccgttttttgtcaacgaaggggcgccccctaagagagggagcgacgtatattaaataagcgcccgagagacgcgaggcggcgccgcggcgatataaccacaacgcgggggagcgagggagagaaaacaatgcgccagacgggagcatcctcgtgaggagaagaggcgccaccaaacaagggggggaggagcgaaaaatcaggtgggagcgaccaaccactccctctcccaccgagacgacgaatttattatacatacgcagccctcccgcgaggaaggaagcgaaacatcacaaagcgatccctatacgcacgaggagtgctactaacaggtgggtggttgtccccaccaccagccgtcgaaggcaatttataactactggccgggcgcgtcgaaaagaaaaactatcgtcgctgccacacgcgacggttagtacatcatcaccatgcagcaaccaccttttattcaccagcgcgggggga

SEQ ID NO: 459162 - DNA, 5140 bp, Homo sapiens
agtcgtaccttcgcggccgcaactcgctcggccgccgccatcttgcgagctcgtcgtactgaccgagcggggaggctgtcttgaggcggcaccgctcaccgacaccgaggcggactggcagccctgagcgtcgcagtcatgccggccggacccgtgcaggcggtgcccccgccgccgcccgtgcccacggagcccaaacagcccacagaagaagaagcatcttcaaaggaggattctgcaccttctaagccagttgtggggattatttaccctcctccagaggtcagaaatattgttgacaagactgccagctttgtggccagaaacgggcctgaatttgaagctaggatccgacagaacgagatcaacaaccccaagttcaactttctgaaccccaatgacccttaccatgcctactaccgccacaaggtcagcgagttcaaggaagggaaggctcaggagccgtccgccgccatccccaaggtcatgcagcagcagcagcagaccacccagcagcagctgccccagaaggtccaagcccaagtaatccaagagaccatcgtgcccaaagagcctcctcctgagtttgagttcattgctgatcctccctctatctcagccttcgacttggatgtggtgaagctgacggctcagtttgtggccaggaatgggcgccagtttctgacccagctgatgcagaaagagcagcgcaactaccagtttgactttctccgcccacagcacagcctcttcaactacttcacgaagctagtggaacagtacaccaagatcttgattccacccaaaggtttattttcaaagctcaagaaagaggctgaaaacccccgagaagttttggatcaggtgtgttaccgagtggaatgggccaaattccaggaacgtgagaggaagaaggaagaagaggagaaggagaaggagcgggtggcctatgctcagatcgactggcatgattttgtggtggtggaaacagtggacttccaacccaatgagcaagggaacttccctccccccaccacgccagaggagctgggggcccgaatcctcattcaggagcgctatgaaaagtttggggagagtgaggaagttgagatggaggtcgagtctgatgaggaggatgacaaacaggagaaggcggaggagcctccttcccagctggaccaggacacccaagtacaagatatggatgagggttcagatgatgaagaagaagggcagaaagtgcccccacccccagagacacccatgcctccacctctgcccccaactccagaccaagtcattgtccgcaaggattatgatcccaaagcctccaagcccttgcctccagcccctgctccagatgagtatcttgtgtcccccattactggggagaagatccccgccagcaaaatgcaggaacacatgcgcattggacttcttgaccctcgctggctggagcagcgggatcgctccatccgtgagaagcagagcgatgatgaggtgtacgcaccaggtctggatattgagagcagcttgaagcagttggctgagcggcgtactgacatcttcggtgtagaggaaacagccattggtaagaagatcggtgaggaggagatccagaagccagaggaaaaggtgacctgggatggccactcaggcagcatggcccggacccagcaggctgcccaggccaacatcaccctccaggagcagattgaggccattcacaaggccaaaggcctggtgccagaggatgacactaaagagaagattggccccagcaagcccaatgaaatccctcaacagccaccgccaccatcttcagccaccaacatccccagctcggctccacccatcacttcagtgccccgaccacccacaatgccacctccagttcgtactacagttgtctccgcagtacccgtcatgccccggcccccaatggcatctgtggtccggctgcccccaggctcagtgatcgcccccatgccgcccatcatccacgcgcccagaatcaacgtggtgcccatgcctccctcggcccctcctattatggccccccgcccaccccccatgattgtgccaacagcctttgtgcctgctccacctgtggcacctgtcccagctccagccccaatgccccctgtgcatcccccacctcccatggaagatgagcccacctccaaaaaactgaagacagaggacagcctcatgccagaggaggagttcctgcgcagaaacaagggtccagtgtccatcaaagtccaggtgcccaacatgcaggataagacggaatggaaactgaatgggcaggtgctggtcttcaccctcccactcacggaccaggtctctgtcattaaggtgaagattcatgaagccacaggcatgcctgcagggaaacagaagctacagtatgagggtatcttcatcaaagattccaactcactggcttactacaacatggccaatggcgcagtcatccacctggccctcaaggagagaggcgggaggaagaagtagacaagaggaacctgctgtcaagtccctgccattttgcctctcctgtctcccaccccctgccccagacccaggagcccccctgaggctttgccttgcctgcatatttgtttcgctcttactcagtttgggaattcaaattgtcctgcagaggttcattcccctgaccctttccccacattggtaagagtagctgggttttctaagccactctctggaatctctttgtgttagggtctcgatttgaggacattcatttcttcagcagcccattagcaactgagagcccagggatgtcctacaggatagtttcatagtgacaggtggcacttggctaatagaatatggctgatattgtcattaatcattttgtaccttgacatgggttgtctaataaaactcggacccttcttgtgaaatcagttaaataagacttgtctcggtcacctgtgccctgtccagactcgaggcagtggtaacactgcacagtgctatgtggcttctctttgaggatttttgggttttgtaactaaattcttgctgccctcatactttttatgtattagaatcatattcgtattgcccttttaaaacattgggatcctccaaaggcctgccccatgtatttaacagtaatacaggaagcatggcaggcaccatgcaaaccaaggatggatggtgcagtccctgtgtcagtgggcggtggtttcctgctggcctggaatcactcatcacctgattgattggctctgtggtcctgggcaggtgcctcataggtgtgtggatatgatgacgtttctttaaaatgtatgtatttaacaaatacttaattgtattaaggtcatgtaccaaggatttgataaagtttaaataatttactctctatctacttttatccattttatccattttaactcatgtaatcctcatgtgagtattcctgtttaacacttgagtaaactgaggcacagagaacataagttgcatgccatagtcacacactgtgaaagtgaaaagagaatgtgtgcaaaacacgtcacagtcctggtttctgagtaaaggcaggctgttatctttagaatcaagctatcacagggagataggcaatgctgtgggtgttggaggaaggtgagagcctgttgctaacaatttcctggttttaaagctaaggctgattttattgggaagatctcacatgtgtgtggcccctgagagttcccagtgccttttatttgcagtccttccatttggacctcctagctgccccatcaggtcatctccagggctcagaggggtgagaccatttcccaaggtcacagaaccagctctctagtcaccaccctgcctctccctctcacccagagtcagtaccagttttatggctttattacaaactgctgggtccctcccattttcaacttgattgatgggatgtcatcccttatcctgtctgacatttgcctctggcctggttgctagaagtttgccccaggggcaagagttgaaatttggcttcctgaggtgggctttgtggtttgcgtccctaaagtgagcccactactggttgcttgtccatggccaacaccagaaatcccctgagcactacctgggtctcattccaagaaggaagagggtcaggagaccttggggagtctcatattccaagttcttctttctttctgggagcagtgggcagttcatggtgttagggcactcacccccacagactggcaaaccctgcaggacttccgtggctgaggctgtgaccggaggccaggaatgccgttgggtggattgtgagtgaatgggccctttgagctgccctctagagagcaaatccagtttcctggagctcctgaatgaatatctgtactggctcgctcagatgcagaagctccattgaccatgaggccttgtgaacatcagtggccacaggcccagtgtgctgcttggcactgcactagtttaggacctgcagcatgtaggtagcgtcctagtgtttataatacaaagctgctctgcacagcttttctgattcttcttgcaatctcctgaggattatctgccccatttttaaaacgaggtggaatacccaaggtcatgtagccagtgagtgctctggaaagccaaagcagctcatcccttcctggggaccacactgctctgctccaccagaccacactatgaaataggaataagtgctcctgttgcaggactgctgggaaaacaggtggggtgggacttaagtcaccataattttgaagacttgcatgcagagggctccaggaattgtagacattaaggaatttcactttcagttctacccactacttaagtacttgtcatgtactcttagaggaggccagtaatgatcagaaccattttactttaaaattaataatattgtattagagaatatattaaatggttatattgggttatgttaggatatatacttgaatggaaatacatgtactattagcaatcatatttcatttatccctgtaattagacaagaaagcataatatagctctactcatgggtacacataccagtgtataagatttttagaagtttactttttaaaaataaaagcaaaatgtaagatcttaaaaaaaaaga

SEQ ID NO: 459163 - DNA, 2943 bp, Homo sapiens
agtcgtaccttcgcggccgcaactcgctcggccgccgccatcttgcgagctcgtcgtactgaccgagcggggaggctgtcttgaggcggcaccgctcaccgacaccgaggcggactggcagccctgagcgtcgcagtcatgccggccggacccgtgcaggcggtgcccccgccgccgcccgtgcccacggagcccaaacagcccacagaagaagaagcatcttcaaaggaggattctgcaccttctaagccagttgtggggattatttaccctcctccagaggtcagaaatattgttgacaagactgccagctttgtggccagaaacgggcctgaatttgaagctaggatccgacagaacgagatcaacaaccccaagttcaactttctgaaccccaatgacccttaccatgcctactaccgccacaaggtcagcgagttcaaggaagggaaggctcaggagccgtccgccgccatccccaaggtcatgcagcagcagcagcagaccacccagcagcagctgccccagaaggtccaagcccaagtaatccaagagaccatcgtgcccaaagagcctcctcctgagtttgagttcattgctgatcctccctctatctcagccttcgacttggatgtggtgaagctgacggctcagtttgtggccaggaatgggcgccagtttctgacccagctgatgcagaaagagcagcgcaactaccagtttgactttctccgcccacagcacagcctcttcaactacttcacgaagctagtggaacagtacaccaagatcttgattccacccaaaggtttattttcaaagctcaagaaagaggctgaaaacccccgagaagttttggatcaggtgtgttaccgagtggaatgggccaaattccaggaacgtgagaggaagaaggaagaagaggagaaggagaaggagcgggtggcctatgctcagatcgactggcatgattttgtggtggtggaaacagtggacttccaacccaatgagcaagggaacttccctccccccaccacgccagaggagctgggggcccgaatcctcattcaggagcgctatgaaaagtttggggagagtgaggaagttgagatggaggtcgagtctgatgaggaggatgacaaacaggagaaggcggaggagcctccttcccagctggaccaggacacccaagtacaagatatggatgagggttcagatgatgaagaagaagggcagaaagtgcccccacccccagagacacccatgcctccacctctgcccccaactccagaccaagtcattgtccgcaaggattatgatcccaaagcctccaagcccttgcctccagcccctgctccagatgagtatcttgtgtcccccattactggggagaagatccccgccagcaaaatgcaggaacacatgcgcattggacttcttgaccctcgctggctggagcagcgggatcgctccatccgtgagaagcagagcgatgatgaggtgtacgcaccaggtctggatattgagagcagcttgaagcagttggctgagcggcgtactgacatcttcggtgtagaggaaacagccattggtaagaagatcggtgaggaggagatccagaagccagaggaaaaggtgacctgggatggccactcaggcagcatggcccggacccagcaggctgcccaggccaacatcaccctccaggagcagattgaggccattcacaaggccaaaggcctggtgccagaggatgacactaaagagaagattggccccagcaagcccaatgaaatccctcaacagccaccgccaccatcttcagccaccaacatccccagctcggctccacccatcacttcagtgccccgaccacccacaatgccacctccagttcgtactacagttgtctccgcagtacccgtcatgccccggcccccaatggcatctgtggtccggctgcccccaggctcagtgatcgcccccatgccgcccatcatccacgcgcccagaatcaacgtggtgcccatgcctccctcggcccctcctattatggccccccgcccaccccccatgattgtgccaacagcctttgtgcctgctccacctgtggcacctgtcccagctccagccccaatgccccctgtgcatcccccacctcccatggaagatgagcccacctccaaaaaactgaagacagaggacagcctcatgccagaggaggagttcctgcgcagaaacaagggtccagtgtccatcaaagtccaggtgcccaacatgcaggataagacggaatggaaactgaatgggcaggtgctggtcttcaccctcccactcacggaccaggtctctgtcattaaggtgaagattcatgaagccacaggcatgcctgcagggaaacagaagctacagtatgagggtatcttcatcaaagattccaactcactggcttactacaacatggccaatggcgcagtcatccacctggccctcaaggagagaggcgggaggaagaagtagacaagaggaacctgctgtcaagtccctgccattttgcctctcctgtctcccaccccctgccccagacccaggagcccccctgaggctttgccttgcctgcatatttgtttcgctcttactcagtttgggaattcaaattgtcctgcagaggttcattcccctgaccctttccccacattggtaagagtagctgggttttctaagccactctctggaatctctttgtgttagggtctcgatttgaggacattcatttcttcagcagcccattagcaactgagagcccagggatgtcctacaggatagtttcatagtgacaggtggcacttggctaatagaatatggctgatattgtcattaatcattttgtaccttgacatgggttgtctaataaaactcggacccttcttgtgaaatcagtta

SEQ ID NO: 459164 - DNA, 3655 bp, Homo sapiens
agtcgtaccttcgcggccgcaactcgctcggccgccgccatcttgcgagctcgtcgtactgaccgagcggggaggctgtcttgaggcggcaccgctcaccgacaccgaggcggactggcagccctgagcgtcgcagtcatgccggccggacccgtgcaggcggtgcccccgccgccgcccgtgcccacggagcccaaacagcccacagaagaagaagcatcttcaaaggaggattctgcaccttctaagccagttgtggggattatttaccctcctccagaggtcagaaatattgttgacaagactgccagctttgtggccagaaacgggcctgaatttgaagctaggatccgacagaacgagatcaacaaccccaagttcaactttctgaaccccaatgacccttaccatgcctactaccgccacaaggtcagcgagttcaaggaagggaaggctcaggagccgtccgccgccatccccaaggtcatgcagcagcagcagcagaccacccagcagcagctgccccagaaggtccaagcccaagtaatccaagagaccatcgtgcccaaagagcctcctcctgagtttgagttcattgctgatcctccctctatctcagccttcgacttggatgtggtgaagctgacggctcagtttgtggccaggaatgggcgccagtttctgacccagctgatgcagaaagagcagcgcaactaccagtttgactttctccgcccacagcacagcctcttcaactacttcacgaagctagtggaacagtacaccaagatcttgattccacccaaaggtttattttcaaagctcaagaaagaggctgaaaacccccgagaagttttggatcaggtgtgttaccgagtggaatgggccaaattccaggaacgtgagaggaagaaggaagaagaggagaaggagaaggagcgggtggcctatgctcagatcgactggcatgattttgtggtggtggaaacagtggacttccaacccaatgagcaagggaacttccctccccccaccacgccagaggagctgggggcccgaatcctcattcaggagcgctatgaaaagtttggggagagtgaggaagttgagatggaggtcgagtctgatgaggaggatgacaaacaggagaaggcggaggagcctccttcccagctggaccaggacacccaagtacaagatatggatgagggttcagatgatgaagaagaagggcagaaagtgcccccacccccagagacacccatgcctccacctctgcccccaactccagaccaagtcattgtccgcaaggattatgatcccaaagcctccaagcccttgcctccagcccctgctccagatgagtatcttgtgtcccccattactggggagaagatccccgccagcaaaatgcaggaacacatgcgcattggacttcttgaccctcgctggctggagcagcgggatcgctccatccgtgagaagcagagcgatgatgaggtgtacgcaccaggtctggatattgagagcagcttgaagcagttggctgagcggcgtactgacatcttcggtgtagaggaaacagccattggtaagaagatcggtgaggaggagatccagaagccagaggaaaaggtgacctgggatggccactcaggcagcatggcccggacccagcaggctgcccaggccaacatcaccctccaggagcagattgaggccattcacaaggccaaaggcctggtgccagaggatgacactaaagagaagattggccccagcaagcccaatgaaatccctcaacagccaccgccaccatcttcagccaccaacatccccagctcggctccacccatcacttcagtgccccgaccacccacaatgccacctccagttcgtactacagttgtctccgcagtacccgtcatgccccggcccccaatggcatctgtggtccggctgcccccaggctcagtgatcgcccccatgccgcccatcatccacgcgcccagaatcaacgtggtgcccatgcctccctcggcccctcctattatggccccccgcccaccccccatgattgtgccaacagcctttgtgcctgctccacctgtggcacctgtcccagctccagccccaatgccccctgtgcatcccccacctcccatggaagatgagcccacctccaaaaaactgaagacagaggacagcctcatgccagaggaggagttcctgcgcagaaacaagggtccagtgtccatcaaagtccaggtgcccaacatgcaggataagacggaatggaaactgaatgggcaggtgctggtcttcaccctcccactcacggaccaggtctctgtcattaaggtgaagattcatgaagccacaggcatgcctgcagggaaacagaagctacagtatgagggtatcttcatcaaagattccaactcactggcttactacaacatggccaatggcgcagtcatccacctggccctcaaggagagaggcgggaggaagaagtagacaagaggaacctgctgtcaagtccctgccattttgcctctcctgtctcccaccccctgccccagacccaggagcccccctgaggctttgccttgcctgcatatttgtttcgctcttactcagtttgggaattcaaattgtcctgcagaggttcattcccctgaccctttccccacattggtaagagtagctgggttttctaagccactctctggaatctctttgtgttagggtctcgatttgaggacattcatttcttcagcagcccattagcaactgagagcccagggatgtcctacaggatagtttcatagtgacaggtggcacttggctaatagaatatggctgatattgtcattaatcattttgtaccttgacatgggttgtctaataaaactcggacccttcttgtgaaatcagttaaataagacttgtctcggtcacctgtgccctgtccagactcgaggcagtggtaacactgcacagtgctatgtggcttctctttgaggatttttgggttttgtaactaaattcttgctgccctcatactttttatgtattagaatcatattcgtattgcccttttaaaacattgggatcctccaaaggcctgccccatgtatttaacagtaatacaggaagcatggcaggcaccatgcaaaccaaggatggatggtgcagtccctgtgtcagtgggcggtggtttcctgctggcctggaatcactcatcacctgattgattggctctgtggtcctgggcaggtgcctcataggtgtgtggatatgatgacgtttctttaaaatgtatgtatttaacaaatacttaattgtattaaggtcatgtaccaaggatttgataaagtttaaataatttactctctaaaaaaaaaaaaggggggggtctaatatcctcgagggccagtagctaccaggttctgtcaagtggcctttaggagggattaagaggcaggggcggttaaagctgtgggaatgtgttggtctggaggacctctctcggctggctttgggaccaccacgaataagcccggattaaataggtgagtggacgttttggtgattgtcgtataaataaacacaaaatagacctacaacaagctcctaattcttcgcttgt

SEQ ID NO: 459165 - DNA, 3207 bp, Homo sapiens
agtcgtaccttcgcggccgcaactcgctcggccgccgccatcttgcgagctcgtcgtactgaccgagcggggaggctgtcttgaggcggcaccgctcaccgacaccgaggcggactggcagccctgagcgtcgcagtcatgccggccggacccgtgcaggcggtgcccccgccgccgcccgtgcccacggagcccaaacagcccacagaagaagaagcatcttcaaaggaggattctgcaccttctaagccagttgtggggattatttaccctcctccagaggtcagaaatattgttgacaagactgccagctttgtggccagaaacgggcctgaatttgaagctaggatccgacagaacgagatcaacaaccccaagttcaactttctgaaccccaatgacccttaccatgcctactaccgccacaaggtcagcgagttcaaggaagggaaggctcagtttgtggccaggaatgggcgccagtttctgacccagctgatgcagaaagagcagcgcaactaccagtttgactttctccgcccacagcacagcctcttcaactacttcacgaagctagtggaacagtacaccaagatcttgattccacccaaaggtttattttcaaagctcaagaaagaggctgaaaacccccgagaagttttggatcaggtgtgttaccgagtggaatgggccaaattccaggaacgtgagaggaagaaggaagaagaggagaaggagaaggagcgggtggcctatgctcagatcgactggcatgattttgtggtggtggaaacagtggacttccaacccaatgagcaagggaacttccctccccccaccacgccagaggagctgggggcccgaatcctcattcaggagcgctatgaaaagtttggggagagtgaggaagttgagatggaggtcgagtctgatgaggaggatgacaaacaggagaaggcggaggagcctccttcccagctggaccaggacacccaagtacaagatatggatgagggttcagatgatgaagaagaagggcagaaagtgcccccacccccagagacacccatgcctccacctctgcccccaactccagaccaagtcattgtccgcaaggattatgatcccaaagcctccaagcccttgcctccagcccctgctccagatgagtatcttgtgtcccccattactggggagaagatccccgccagcaaaatgcaggaacacatgcgcattggacttcttgaccctcgctggctggagcagcgggatcgctccatccgtgagaagcagagcgatgatgaggtgtacgcaccaggtctggatattgagagcagcttgaagcagttggctgagcggcgtactgacatcttcggtgtagaggaaacagccattggtaagaagatcggtgaggaggagatccagaagccagaggaaaaggtgacctgggatggccactcaggcagcatggcccggacccagcaggctgcccaggccaacatcaccctccaggagcagattgaggccattcacaaggccaaaggcctggtgccagaggatgacactaaagagaagattggccccagcaagcccaatgaaatccctcaacagccaccgccaccatcttcagccaccaacatccccagctcggctccacccatcacttcagtgccccgaccacccacaatgccacctccagttcgtactacagttgtctccgcagtacccgtcatgccccggcccccaatggcatctgtggtccggctgcccccaggctcagtgatcgcccccatgccgcccatcatccacgcgcccagaatcaacgtggtgcccatgcctccctcggcccctcctattatggccccccgcccaccccccatgattgtgccaacagcctttgtgcctgctccacctgtggcacctgtcccagctccagccccaatgccccctgtgcatcccccacctcccatggaagatgagcccacctccaaaaaactgaagacagaggacagcctcatgccagaggaggagttcctgcgcagaaacaagggtccagtgtccatcaaagtccaggtgcccaacatgcaggataagacggaatggaaactgaatgggcaggtgctggtcttcaccctcccactcacggaccaggtctctgtcattaaggtgaagattcatgaagccacaggcatgcctgcagggaaacagaagctacagtatgagggtatcttcatcaaagattccaactcactggcttactacaacatggccaatggcgcagtcatccacctggccctcaaggagagaggcgggaggaagaagtagacaagaggaacctgctgtcaagtccctgccattttgcctctcctgtctcccaccccctgccccagacccaggagcccccctgaggctttgccttgcctgcatatttgtttcgctcttactcagtttgggaattcaaattgtcctgcagaggttcattcccctgaccctttccccacattggtaagagtagctgggttttctaagccactctctggaatctctttgtgttagggtctcgatttgaggacattcatttcttcagcagcccattagcaactgagagcccagggatgtcctacaggatagtttcatagtgacaggtggcacttggctaatagaatatggctgatattgtcattaatcattttgtaccttgacatgggttgtctaataaaactcggacccttcttgtgaaatcagttaaataagacttgtctcggtcacctgtgccctgtccagactcgaggcagtggtaacactgcacagtgctatgtggcttctctttgaggatttttgggttttgtaactaaattcttgctgccctcatactttttatgtattagaatcatattcgtattgcccttttaaaacattgggatcctccaaaggcctgccccatgtatttaacagtaatacaggaagcatggcaggcaccatgcaaaccaaggatggatggtgcagtccctgtgtcagtgggcggtggtttcctgctggcctggaatcactcatcacctgattgattggctctgtggtcctgggcaggtgcctcataggtgtgtggatatgatgacgtttctttaaaatgtatgtatttaacaaatacttaattgtattaaggtcatgtaccaaggatttgataaagtttaaataatttactctcta

SEQ ID NO: 459166 - DNA, 2851 bp, Homo sapiens
aagaaacctggagtccggatgcttcccaacataccacaactttctgctttgctctcagcctcaatatatctccctcttttccactctagctagaagacagaaggccagctcccaagcagatcagagggtggaattttcattctgtcccaactctgcacctgggtggaaccaggtgcaaatgccatagtttggaaccatacttccattctgttccgaaggaggcgctgactttgatgaaagccctggaggtggtagcctcatcaggagcagaccctgcttcagcgtagcaccaagctgtttcccatctctgcaggtgtgttaccgagtggaatgggccaaattccaggaacgtgagaggaagaaggaagaagaggagaaggagaaggagcgggtggcctatgctcagatcgactggcatgattttgtggtggtggaaacagtggacttccaacccaatgagcaagggaacttccctccccccaccacgccagaggagctgggggcccgaatcctcattcaggagcgctatgaaaagtttggggagagtgaggaagttgagatggaggtcgagtctgatgaggaggatgacaaacaggagaaggcggaggagcctccttcccagctggaccaggacacccaagtacaagatatggatgagggttcagatgatgaagaagaagggcagaaagtgcccccacccccagagacacccatgcctccacctctgcccccaactccagaccaagtcattgtccgcaaggattatgatcccaaagcctccaagcccttgcctccagcccctgctccagatgagtatcttgtgtcccccattactggggagaagatccccgccagcaaaatgcaggaacacatgcgcattggacttcttgaccctcgctggctggagcagcgggatcgctccatccgtgagaagcagagcgatgatgaggtgtacgcaccaggtctggatattgagagcagcttgaagcagttggctgagcggcgtactgacatcttcggtgtagaggaaacagccattggtaagaagatcggtgaggaggagatccagaagccagaggaaaaggtgacctgggatggccactcaggcagcatggcccggacccagcaggctgcccaggccaacatcaccctccaggagcagattgaggccattcacaaggccaaaggcctggtgccagaggatgacactaaagagaagattggccccagcaagcccaatgaaatccctcaacagccaccgccaccatcttcagccaccaacatccccagctcggctccacccatcacttcagtgccccgaccacccacaatgccacctccagttcgtactacagttgtctccgcagtacccgtcatgccccggcccccaatggcatctgtggtccggctgcccccaggctcagtgatcgcccccatgccgcccatcatccacgcgcccagaatcaacgtggtgcccatgcctccctcggcccctcctattatggccccccgcccaccccccatgattgtgccaacagcctttgtgcctgctccacctgtggcacctgtcccagctccagccccaatgccccctgtgcatcccccacctcccatggaagatgagcccacctccaaaaaactgaagacagaggacagcctcatgccagaggaggagttcctgcgcagaaacaagggtccagtgtccatcaaagtccaggtgcccaacatgcaggataagacggaatggaaactgaatgggcaggtgctggtcttcaccctcccactcacggaccaggtctctgtcattaaggtgaagattcatgaagccacaggcatgcctgcagggaaacagaagctacagtatgagggtatcttcatcaaagattccaactcactggcttactacaacatggccaatggcgcagtcatccacctggccctcaaggagagaggcgggaggaagaagtagacaagaggaacctgctgtcaagtccctgccattttgcctctcctgtctcccaccccctgccccagacccaggagcccccctgaggctttgccttgcctgcatatttgtttcgctcttactcagtttgggaattcaaattgtcctgcagaggttcattcccctgaccctttccccacattggtaagagtagctgggttttctaagccactctctggaatctctttgtgttagggtctcgatttgaggacattcatttcttcagcagcccattagcaactgagagcccagggatgtcctacaggatagtttcatagtgacaggtggcacttggctaatagaatatggctgatattgtcattaatcattttgtaccttgacatgggttgtctaataaaactcggacccttcttgtgaaatcagttaaataagacttgtctcggtcacctgtgccctgtccagactcgaggcagtggtaacactgcacagtgctatgtggcttctctttgaggatttttgggttttgtaactaaattcttgctgccctcatactttttatgtattagaatcatattcgtattgcccttttaaaacattgggatcctccaaaggcctgccccatgtatttaacagtaatacaggaagcatggcaggcaccatgcaaaccaaggatggatggtgcagtccctgtgtcagtgggcggtggtttcctgctggcctggaatcactcatcacctgattgattggctctgtggtcctgggcaggtgcctcataggtgtgtggatatgatgacgtttctttaaaatgtatgtatttaacaaatacttaattgtattaaggtcatgtaccaaggatttgataaagtttaaataatttactctcta

SEQ ID NO: 459167 - DNA, 2062 bp, Homo sapiens
ggatctctagacgtgatcatgtatgttgttgtcgcttggtactgggcgcgtacatatccccgccagcaaaatgcaggaacacatgcgcattggacttcttgaccctcgctggctggagcagcgggatcgctccatccgtgagaagcagagcgatgatgaggtgtacgcaccaggtctggatattgagagcagcttgaagcagttggctgagcggcgtactgacatcttcggtgtagaggaaacagccattggtaagaagatcggtgaggaggagatccagaagccagaggaaaaggtgacctgggatggccactcaggcagcatggcccggacccagcaggctgcccaggccaacatcaccctccaggagcagattgaggccattcacaaggccaaaggcctggtgccagaggatgacactaaagagaagattggccccagcaagcccaatgaaatccctcaacagccaccgccaccatcttcagccaccaacatccccagctcggctccacccatcacttcagtgccccgaccacccacaatgccacctccagttcgtactacagttgtctccgcagtacccgtcatgccccggcccccaatggcatctgtggtccggctgcccccaggctcagtgatcgcccccatgccgcccatcatccacgcgcccagaatcaacgtggtgcccatgcctccctcggcccctcctattatggccccccgcccaccccccatgattgtgccaacagcctttgtgcctgctccacctgtggcacctgtcccagctccagccccaatgccccctgtgcatcccccacctcccatggaagatgagcccacctccaaaaaactgaagacagaggacagcctcatgccagaggaggagttcctgcgcagaaacaagggtccagtgtccatcaaagtccaggtgcccaacatgcaggataagacggaatggaaactgaatgggcaggtgctggtcttcaccctcccactcacggaccaggtctctgtcattaaggtgaagattcatgaagccacaggcatgcctgcagggaaacagaagctacagtatgagggtatcttcatcaaagattccaactcactggcttactacaacatggccaatggcgcagtcatccacctggccctcaaggagagaggcgggaggaagaagtagacaagaggaacctgctgtcaagtccctgccattttgcctctcctgtctcccaccccctgccccagacccaggagcccccctgaggctttgccttgcctgcatatttgtttcgctcttactcagtttgggaattcaaattgtcctgcagaggttcattcccctgaccctttccccacattggtaagagtagctgggttttctaagccactctctggaatctctttgtgttagggtctcgatttgaggacattcatttcttcagcagcccattagcaactgagagcccagggatgtcctacaggatagtttcatagtgacaggtggcacttggctaatagaatatggctgatattgtcattaatcattttgtaccttgacatgggttgtctaataaaactcggacccttcttgtgaaatcagttaaataagacttgtctcggtcacctgtgccctgtccagactcgaggcagtggtaacactgcacagtgctatgtggcttctctttgaggatttttgggttttgtaactaaattcttgctgccctcatactttttatgtattagaatcatattcgtattgcccttttaaaacattgggatcctccaaaggcctgccccatgtatttaacagtaatacaggaagcatggcaggcaccatgcaaaccaaggatggatggtgcagtccctgtgtcagtgggcggtggtttcctgctggcctggaatcactcatcacctgattgattggctctgtggtcctgggcaggtgcctcataggtgtgtggatatgatgacgtttctttaaaatgtatgtatttaacaaatacttaattgtattaaggtcatgtaccaaggatttgataaagtttaaataatttactctcta

SEQ ID NO: 459168 - DNA, 536 bp, Homo sapiens
agtcgtaccttcgcggccgcaactcgctcggccgccgccatcttgcgagctcgtcgtactgaccgagcggggaggctgtcttgaggcggcaccgctcaccgacaccgaggcggactggcagccctgagcgtcgcagtcatgccggccggacccgtgcaggcggtgcccccgccgccgcccgtgcccacggagcccaaacagcccacagaagaagaagcatcttcaaaggaggattctgcaccttctaagccagttgtggggattatttaccctcctccagaggtcagaaatattgttgacaagactgccagctttgtggccagaaacgggcctgaatttgaagctaggatccgacagaacgagatcaacaaccccaagttcaactttctgaaccccaatgacccttaccatgcctactaccgccacaaggtcagcgagttcaaggaagggaaggctctttgggcacgatggtctcttggattacttgggcttgaccttctggggcagctgctgctgtgtctgctgctgctgctgca

SEQ ID NO: 459169 - DNA, 617 bp, Homo sapiens
  misc_feature (507)..(507): n is a, c, g, or t
agtcgtaccttcgcggccgcaactcgctcggccgccgccatcttgcgagctcgtcgtactgaccgagcggggaggctgtcttgaggcggcaccgctcaccgacaccgaggcggactggcagccctgagcgtcgcagtcatgccggccggacccgtgcaggcggtgcccccgccgccgcccgtgcccacggagcccaaacagcccacagaagaagaagcatcttcaaaggaggattctgcaccttctaagccagttgtggggattatttaccctcctccagaggtcagaaatattgttgacaagactgccagctttgtggccagaaacgggcctgaatttgaatctccagtgatctgtaaaatcttagatacagcagatgaaaatggacttctttctctccccaactaaaggatattaaagttaggggaaagaaaagatcattgaaagtcatgataatttctgtcccactgtgtctcattatagagttctcagccattggacctcttntaaaggatggtataaaatgactctcaaccactttgtgaatacatatgtgtatataagaggttattgataaacttctgaggcagacatttgtctcgctttttttcaaaaaa

SEQ ID NO: 459170 - DNA, 391 bp, Homo sapiens
ctgctaatcctcgaagccacctttttaagttcatggtgccaactttgagtggtggtgccattattttggagaaggaaatcaagttactgaggttaagtaacttgccctaagtcccacagccaagtggagctgggattgggacacagaatcccatgcttcctcatctcctgtgctttatcacaggcccaggaaggctgcctctttgtactgcgttgtaaagcactgacagttgctttaactcttctgtatttcagatcttgattccacccaaaggtttattttcaaagctcaagaaagaggctgaaaacccccgagaagttttggatcagcaggtaaactgaatagcatttcttgcaaccagttactggtggttggttctgttttatgtctg

SEQ ID NO: 459171 - DNA, 3402 bp, Homo sapiens
agtcgtaccttcgcggccgcaactcgctcggccgccgccatcttgcgagctcgtcgtactgaccgagcggggaggctgtcttgaggcggcaccgctcaccgacaccgaggcggactggcagccctgagcgtcgcagtcatgccggccggacccgtgcaggcggtgcccccgccgccgcccgtgcccacggagcccaaacagcccacagaagaagaagcatcttcaaaggaggattctgcaccttctaagccagttgtggggattatttaccctcctccagaggtcagaaatattgttgacaagactgccagctttgtggccagaaacgggcctgaatttgaagctaggatccgacagaacgagatcaacaaccccaagttcaactttctgaaccccaatgacccttaccatgcctactaccgccacaaggtcagcgagttcaaggaagggaaggctcaggagccgtccgccgccatccccaaggtcatgcagcagcagcagcagaccacccagcagcagctgccccagaaggtccaagcccaagtaatccaagagaccatcgtgcccaaagagcctcctcctgagtttgagttcattgctgatcctccctctatctcagccttcgacttggatgtggtgaagctgacggctcagtttgtggccaggaatgggcgccagtttctgacccagctgatgcagaaagagcagcgcaactaccagtttgactttctccgcccacagcacagcctcttcaactacttcacgaagctagtggaacagtacaccaagatcttgattccacccaaaggtttattttcaaagctcaagaaagaggctgaaaacccccgagaagttttggatcaggtgtgttaccgagtggaatgggccaaattccaggaacgtgagaggaagaaggaagaagaggagaaggagaaggagcgggtggcctatgctcagatcgactggcatgattttgtggtggtggaaacagtggacttccaacccaatgagcaagggaacttccctccccccaccacgccagaggagctgggggcccgaatcctcattcaggagcgctatgaaaagtttggggagagtgaggaagttgagatggaggtcgagtctgatgaggaggatgacaaacaggagaaggcggaggagcctccttcccagctggaccaggacacccaagtacaagatatggatgagggttcagatgatgaagaagaagggcagaaagtgcccccacccccagagacacccatgcctccacctctgcccccaactccagaccaagtcattgtccgcaaggattatgatcccaaagcctccaagcccttgcctccagcccctgctccagatgagtatcttgtgtcccccattactggggagaagatccccgccagcaaaatgcaggaacacatgcgcattggacttcttgaccctcgctggctggagcagcgggatcgctccatccgtgagaagcagagcgatgatgaggtgtacgcaccaggtctggatattgagagcagcttgaagcagttggctgagcggcgtactgacatcttcggtgtagaggaaacagccattggtaagaagatcggtgaggaggagatccagaagccagaggaaaaggtgacctgggatggccactcaggcagcatggcccggacccagcaggctgcccaggccaacatcaccctccaggagcagattgaggccattcacaaggccaaaggcctggtgccagaggatgacactaaagagaagattggccccagcaagcccaatgaaatccctcaacagccaccgccaccatcttcagccaccaacatccccagctcggctccacccatcacttcagtgccccgaccacccacaatgccacctccagttcgtactacagttgtctccgcagtacccgtcatgccccggcccccaatggcatctgtggtccggctgcccccaggctcagtgatcgcccccatgccgcccatcatccacgcgcccagaatcaacgtggtgcccatgcctccctcggcccctcctattatggccccccgcccaccccccatgattgtgccaacagcctttgtgcctgctccacctgtggcacctgtcccagctccagccccaatgccccctgtgcatcccccacctcccatggaagatgagcccacctccaaaaaactgaagacagaggacagcctcatgccagaggaggagttcctgcgcagaaacaagggtccagtgtccatcaaagtccaggtgcccaacatgcaggataagacggaatggaaactgaatgggcaggtgctggtcttcaccctcccactcacggaccaggtctctgtcattaaggtgaagattcatgaagccacaggcatgcctgcagggaaacagaagctacagtatgagggtatcttcatcaaagattccaactcactggcttactacaacatggccaatggcgcagtcatccacctggccctcaaggagagaggcgggaggaagaagtagacaagaggaacctgctgtcaagtccctgccattttgcctctcctgtctcccaccccctgccccagacccaggagcccccctgaggctttgccttgcctgcatatttgtttcgctcttactcagtttgggaattcaaattgtcctgcagaggttcattcccctgaccctttccccacattggtaagagtagctgggttttctaagccactctctggaatctctttgtgttagggtctcgatttgaggacattcatttcttcagcagcccattagcaactgagagcccagggatgtcctacaggatagtttcatagtgacaggtggcacttggctaatagaatatggctgatattgtcattaatcattttgtaccttgacatgggttgtctaataaaactcggacccttcttgtgaaatcagttaaataagacttgtctcggtcacctgtgccctgtccagactcgaggcagtggtaacactgcacagtgctatgtggcttctctttgaggatttttgggttttgtaactaaattcttgctgccctcatactttttatgtattagaatcatattcgtattgcccttttaaaacattgggatcctccaaaggcctgccccatgtatttaacagtaatacaggaagcatggcaggcaccatgcaaaccaaggatggatggtgcagtccctgtgtcagtgggcggtggtttcctgctggcctggaatcactcatcacctgattgattggctctgtggtcctgggcaggtgcctcataggtgtgtggatatgatgacgtttctttaaaatgtatgtatttaacaaatacttaattgtattaaggtcatgtaccaaggatttgataaagtttaaataatttactctcta

SEQ ID NO: 459172 - DNA, 5086 bp, Homo sapiens
agtcgtaccttcgcggccgcaactcgctcggccgccgccatcttgcgagctcgtcgtactgaccgagcggggaggctgtcttgaggcggcaccgctcaccgacaccgaggcggactggcagccctgagcgtcgcagtcatgccggccggacccgtgcaggcggtgcccccgccgccgcccgtgcccacggagcccaaacagcccacagaagaagaagcatcttcaaaggaggattctgcaccttctaagccagttgtggggattatttaccctcctccagaggtcagaaatattgttgacaagactgccagctttgtggccagaaacgggcctgaatttgaagctaggatccgacagaacgagatcaacaaccccaagttcaactttctgaaccccaatgacccttaccatgcctactaccgccacaaggtcagcgagttcaaggaagggaaggctcaggagccgtccgccgccatccccaaggtcatgcagcagcagcagcagaccacccagcagcagctgccccagaaggtccaagcccaagtaatccaagagaccatcgtgcccaaagagcctcctcctgagtttgagttcattgctgatcctccctctatctcagccttcgacttggatgtggtgaagctgacggctcagtttgtggccaggaatgggcgccagtttctgacccagctgatgcagaaagagcagcgcaactaccagtttgactttctccgcccacagcacagcctcttcaactacttcacgaagctagtggaacagtacaccaagatcttgattccacccaaaggtttattttcaaagctcaagaaagaggctgaaaacccccgagaagttttggatcaggtgtgttaccgagtggaatgggccaaattccaggaacgtgagaggaagaaggaagaagaggagaaggagaaggagcgggtggcctatgctcagatcgactggcatgattttgtggtggtggaaacagtggacttccaacccaatgagcaagggaacttccctccccccaccacgccagaggagctgggggcccgaatcctcattcaggagcgctatgaaaagtttggggagagtgaggaagttgagatggaggtcgagtctgatgaggaggatgacaaacaggagaaggcggaggagcctccttcccagctggaccaggacacccaagtacaagatatggatgagggttcagatgatgaagaagaagggcagaaagtgcccccacccccagagacacccatgcctccacctctgcccccaactccagaccaagtcattgtccgcaaggattatgatcccaaagcctccaagcccttgcctccagcccctgctccagatgagtatcttgtgtcccccattactggggagaagatccccgccagcaaaatgcaggaacacatgcgcattggacttcttgaccctcgctggctggagcagcgggatcgctccatccgtgagaagcagagcgatgatgaggtgtacgcaccaggtctggatattgagagcagcttgaagcagttggctgagcggcgtactgacatcttcggtgtagaggaaacagccattggtaagaagatcggtgaggaggagatccagaagccagaggaaaaggtgacctgggatggccactcaggcagcatggcccggacccagcaggctgcccaggccaacatcaccctccaggagcagattgaggccattcacaaggccaaaggcctggtgccagaggatgacactaaagagaagattggccccagcaagcccaatgaaatccctcaacagccaccgccaccatcttcagccaccaacatccccagctcggctccacccatcacttcagtgccccgaccacccacaatgccacctccagttcgtactacagttgtctccgcagtacccgtcatgccccggcccccaatggcatctgtggtccggctgcccccaggctcagtgatcgcccccatgccgcccatcatccacgcgcccagaatcaacgtggtgcccatgcctccctcggcccctcctattatggccccccgcccaccccccatgattgtgccaacagcctttgtgcctgctccacctgtggcacctgtcccagctccagccccaatgccccctgtgcatcccccacctcccatggaagatgagcccacctccaaaaaactgaagacagaggacagcctcatgccagaggaggagttcctgcgcagaaacaagggtccagtgtccatcaaagtccaggtgcccaacatgcaggataagacggaatggaaactgaatgggcaggtgctggtcttcaccctcccactcacggaccaggtctctgtcattaaggtgaagattcatgaagccacaggcatgcctgcagggaaacagaagctacagtatgagggtatcttcatcaaagattccaactcactggcttactacaacatggccaatggcgcagtcatccacctggccctcaaggagagaggcgggaggaagaagtagacaagaggaacctgctgtcaagtccctgccattttgcctctcctgtctcccaccccctgccccagacccaggagcccccctgaggctttgccttgcctgcatatttgtttcgctcttactcagtttgggaattcaaattgtcctgcagaggttcattcccctgaccctttccccacattggtaagagtagctgggttttctaagccactctctggaatctctttgtgttagggtctcgatttgaggacattcatttcttcagcagcccattagcaactgagagcccagggatgtcctacaggatagtttcatagtgacaggtggcacttggctaatagaatatggctgatattgtcattaatcattttgtaccttgacatgggttgtctaataaaactcggacccttcttgtgaaatcagttaaataagacttgtctcggtcacctgtgccctgtccagactcgaggcagtggtaacactgcacagtgctatgtggcttctctttgaggatttttgggttttgtaactaaattcttgctgccctcatactttttatgtattagaatcatattcgtattgcccttttaaaacattgggatcctccaaaggcctgccccatgtatttaacagtaatacaggaagcatggcaggcaccatgcaaaccaaggatggatggtgcagtccctgtgtcagtgggcggtggtttcctgctggcctggaatcactcatcacctgattgattggctctgtggtcctgggcaggtgcctcataggtgtgtggatatgatgacgtttctttaaaatgtatgtatttaacaaatacttaattgtattaaggtcatgtaccaaggatttgataaagtttaaataatttactctctatctacttttatccattttatccattttaactcatgtaatcctcatgtgagtattcctgtttaacacttgagtaaactgaggcacagagaacataagttgcatgccatagtcacacactgtgaaagtgaaaagagaatgtgtgcaaaacacgtcacagtcctggtttctgagtaaaggcaggctgttatctttagaatcaagctatcacagggagataggcaatgctgtgggtgttggaggaaggtgagagcctgttgctaacaatttcctggttttaaagctaaggctgattttattgggaagatctcacatgtgtgtggcccctgagagttcccagtgccttttatttgcagtccttccatttggacctcctagctgccccatcaggtcatctccagggctcagaggggtgagaccatttcccaaggtcacagaaccagctctctagtcaccaccctgcctctccctctcacccagagtcagtaccagttttatggctttattacaaactgctgggtccctcccattttcaacttgattgatgggatgtcatcccttatcctgtctgacatttgcctctggcctggttgctagaattgcgtccctaaagtgagcccactactggttgcttgtccatggccaacaccagaaatcccctgagcactacctgggtctcattccaagaaggaagagggtcaggagaccttggggagtctcatattccaagttcttctttctttctgggagcagtgggcagttcatggtgttagggcactcacccccacagactggcaaaccctgcaggacttccgtggctgaggctgtgaccggaggccaggaatgccgttgggtggattgtgagtgaatgggccctttgagctgccctctagagagcaaatccagtttcctggagctcctgaatgaatatctgtactggctcgctcagatgcagaagctccattgaccatgaggccttgtgaacatcagtggccacaggcccagtgtgctgcttggcactgcactagtttaggacctgcagcatgtaggtagcgtcctagtgtttataatacaaagctgctctgcacagcttttctgattcttcttgcaatctcctgaggattatctgccccatttttaaaacgaggtggaatacccaaggtcatgtagccagtgagtgctctggaaagccaaagcagctcatcccttcctggggaccacactgctctgctccaccagaccacactatgaaataggaataagtgctcctgttgcaggactgctgggaaaacaggtggggtgggacttaagtcaccataattttgaagacttgcatgcagagggctccaggaattgtagacattaaggaatttcactttcagttctacccactacttaagtacttgtcatgtactcttagaggaggccagtaatgatcagaaccattttactttaaaattaataatattgtattagagaatatattaaatggttatattgggttatgttaggatatatacttgaatggaaatacatgtactattagcaatcatatttcatttatccctgtaattagacaagaaagcataatatagctctactcatgggtacacataccagtgtataagatttttagaagtttactttttaaaaataaaagcaaaatgtaagatcttaaaaaaaaaga

SEQ ID NO: 459173 - DNA, 4695 bp, Homo sapiens
agtcgtaccttcgcggccgcaactcgctcggccgccgccatcttgcgagctcgtcgtactgaccgagcggggaggctgtcttgaggcggcaccgctcaccgacaccgaggcggactggcagccctgagcgtcgcagtcatgccggccggacccgtgcaggcggtgcccccgccgccgcccgtgcccacggagcccaaacagcccacagaagaagaagcatcttcaaaggaggattctgcaccttctaagccagttgtggggattatttaccctcctccagaggtcagaaatattgttgacaagactgccagctttgtggccagaaacgggcctgaatttgaagctaggatccgacagaacgagatcaacaaccccaagttcaactttctgaaccccaatgacccttaccatgcctactaccgccacaaggtcagcgagttcaaggaagggaaggctcaggagccgtccgccgccatccccaaggtcatgcagcagcagcagcagaccacccagcagcagctgccccagaaggtccaagcccaagtaatccaagagaccatcgtgcccaaagagcctcctcctgagtttgagttcattgctgatcctccctctatctcagccttcgacttggatgtggtgaagctgacggctcagtttgtggccaggaatgggcgccagtttctgacccagctgatgcagaaagagcagcgcaactaccagtttgactttctccgcccacagcacagcctcttcaactacttcacgaagctagtggaacagtacaccaagatcttgattccacccaaaggtttattttcaaagctcaagaaagaggctgaaaacccccgagaagttttggatcaggtgtgttaccgagtggaatgggccaaattccaggaacgtgagaggaagaaggaagaagaggagaaggagaaggagcgggtggcctatgctcagatcgactggcatgattttgtggtggtggaaacagtggacttccaacccaatgagcaagggaacttccctccccccaccacgccagaggagctgggggcccgaatcctcattcaggagcgctatgaaaagtttggggagagtgaggaagttgagatggaggtcgagtctgatgaggaggatgacaaacaggagaaggcggaggagcctccttcccagctggaccaggacacccaagtacaagatatggatgagggttcagatgatgaagaagaagggcagaaagtgcccccacccccagagacacccatgcctccacctctgcccccaactccagaccaagtcattgtccgcaaggattatgatcccaaagcctccaagcccttgcctccagcccctgctccagatgagtatcttgtgtcccccattactggggagaagatccccgccagcaaaatgcaggaacacatgcgcattggacttcttgaccctcgctggctggagcagcgggatcgctccatccgtgagaagcagagcgatgatgaggtgtacgcaccaggtctggatattgagagcagcttgaagcagttggctgagcggcgtactgacatcttcggtgtagaggaaacagccattggtaagaagatcggtgaggaggagatccagaagccagaggaaaaggtgacctgggatggccactcaggcagcatggcccggacccagcaggctgcccaggccaacatcaccctccaggagcagattgaggccattcacaaggccaaaggcctggtgccagaggatgacactaaagagaagattggccccagcaagcccaatgaaatccctcaacagccaccgccaccatcttcagccaccaacatccccagctcggctccacccatcacttcagtgccccgaccacccacaatgccacctccagttcgtactacagttgtctccgcagtacccgtcatgccccggcccccaatggcatctgtggtccggctgcccccaggctcagtgatcgcccccatgccgcccatcatccacgcgcccagaatcaacgtggtgcccatgcctccctcggcccctcctattatggccccccgcccaccccccatgattgtgccaacagcctttgtgcctgctccacctgtggcacctgtcccagctccagccccaatgccccctgtgcatcccccacctcccatggaagatgagcccacctccaaaaaactgaagacagaggacagcctcatgccagaggaggagttcctgcgcagaaacaagggtccagtgtccatcaaagtccaggtgcccaacatgcaggataagacggaatggaaactgaatgggcaggtgctggtcttcaccctcccactcacggaccaggtctctgtcattaaggtgaagattcatgaagccacaggcatgcctgcagggaaacagaagctacagtatgagggtatcttcatcaaagattccaactcactggcttactacaacatggccaatggcgcagtcatccacctggccctcaaggagagaggcgggaggaagaagtagacaagaggaacctgctgtcaagtccctgccattttgcctctcctgtctcccaccccctgccccagacccaggagcccccctgaggctttgccttgcctgcatatttgtttcgctcttactcagtttgggaattcaaattgtcctgcagaggttcattcccctgaccctttccccacattggtaagagtagctgggttttctaagccactctctggaatctctttgtgttagggtctcgatttgaggacattcatttcttcagcagcccattagcaactgagagcccagggatgtcctacaggatagtttcatagtgacaggtggcacttggctaatagaatatggctgatattgtcattaatcattttgtaccttgacatgggttgtctaataaaactcggacccttcttgtgaaatcagttaaataagacttgtctcggtcacctgtgccctgtccagactcgaggcagtggtaacactgcacagtgctatgtggcttctctttgaggatttttgggttttgtaactaaattcttgctgccctcatactttttatgtattagaatcatattcgtattgcccttttaaaacattgggatcctccaaaggcctgccccatgtatttaacagtaatacaggaagcatggcaggcaccatgcaaaccaaggatggatggtgcagtccctgtgtcagtgggcggtggtttcctgctggcctggaatcactcatcacctgattgattggctctgtggtcctgggcaggtgcctcataggtgtgtggatatgatgacgtttctttaaaatgtatgtatttaacaaatacttaattgtattaaggtcatgtaccaaggatttgataaagtttaaataatttactctctatctacttttatccattttatccattttaactcatgtaatcctcatgtgagtattcctgtttaacacttgagtaaactgaggcacagagaacataagttgcatgccatagtcacacactgtgaaagtgaaaagagaatgtgtgcaaaacacgtcacagtcctggtttctgagtaaaggcaggctgttatctttagaatcaagctatcacagggagataggcaatgctgtgggtgttggaggaaggtgagagcctgttgctaacaatttcctggttttaaagctaaggctgattttattgggaagatctcacatgtgtgtggcccctgagagttcccagtgccttttatttgcagtccttccatttggacctcctagctgccccatcaggtcatctccagggctcagaggggtgagaccatttcccaaggtcacagaaccagctctctagtcaccaccctgcctctccctctcacccagagtcagtaccagttttatggctttattacaaactgctgggtccctcccattttcaacttgattgatgggatgtcatcccttatcctgtctgacatttgcctctggcctggttgctagaagtttgccccaggggcaagagttgaaatttggcttcctgaggtgggctttgtggtttgcgtccctaaagtgagcccactactggttgcttgtccatggccaacaccagaaatcccctgagcactacctgggtctcattccaagaaggaagagggtcaggagaccttggggagtctcatattccaagttcttctttctttctgggagcagtgggcagttcatggtgttagggcactcacccccacagactggcaaaccctgcaggacttccgtggctgaggctgtgaccggaggccaggaatgccgttgggtggattgtgagtgaatgggccctttgagctgccctctagagagcaaatccagaattgtagacattaaggaatttcactttcagttctacccactacttaagtacttgtcatgtactcttagaggaggccagtaatgatcagaaccattttactttaaaattaataatattgtattagagaatatattaaatggttatattgggttatgttaggatatatacttgaatggaaatacatgtactattagcaatcatatttcatttatccctgtaattagacaagaaagcataatatagctctactcatgggtacacataccagtgtataagatttttagaagtttactttttaaaaataaaagcaaaatgtaagatcttaaaaaaaaaga

SEQ ID NO: 459174 - DNA, 3686 bp, Homo sapiens
agtcgtaccttcgcggccgcaactcgctcggccgccgccatcttgcgagctcgtcgtactgaccgagcggggaggctgtcttgaggcggcaccgctcaccgacaccgaggcggactggcagccctgagcgtcgcagtcatgccggccggacccgtgcaggcggtgcccccgccgccgcccgtgcccacggagcccaaacagcccacagaagaagaagcatcttcaaaggaggattctgcaccttctaagccagttgtggggattatttaccctcctccagaggtcagaaatattgttgacaagactgccagctttgtggccagaaacgggcctgaatttgaagctaggatccgacagaacgagatcaacaaccccaagttcaactttctgaaccccaatgacccttaccatgcctactaccgccacaaggtcagcgagttcaaggaagggaaggctcaggagccgtccgccgccatccccaaggtcatgcagcagcagcagcagaccacccagcagcagctgccccagaaggtccaagcccaagtaatccaagagaccatcgtgcccaaagagcctcctcctgagtttgagttcattgctgatcctccctctatctcagccttcgacttggatgtggtgaagctgacggctcagtttgtggccaggaatgggcgccagtttctgacccagctgatgcagaaagagcagcgcaactaccagtttgactttctccgcccacagcacagcctcttcaactacttcacgaagctagtggaacagtacaccaagatcttgattccacccaaaggtttattttcaaagctcaagaaagaggctgaaaacccccgagaagttttggatcaggtgtgttaccgagtggaatgggccaaattccaggaacgtgagaggaagaaggaagaagaggagaaggagaaggagcgggtggcctatgctcagatcgactggcatgattttgtggtggtggaaacagtggacttccaacccaatgagcaagggaacttccctccccccaccacgccagaggagctgggggcccgaatcctcattcaggagcgctatgaaaagtttggggagagtgaggaagttgagatggaggtcgagtctgatgaggaggatgacaaacaggagaaggcggaggagcctccttcccagctggaccaggacacccaagtacaagatatggatgagggttcagatgatgaagaagaagggcagaaagtgcccccacccccagagacacccatgcctccacctctgcccccaactccagaccaagtcattgtccgcaaggattatgatcccaaagcctccaagcccttgcctccagcccctgctccagatgagtatcttgtgtcccccattactggggagaagatccccgccagcaaaatgcaggaacacatgcgcattggacttcttgaccctcgctggctggagcagcgggatcgctccatccgtgagaagcagagcgatgatgaggtgtacgcaccaggtctggatattgagagcagcttgaagcagttggctgagcggcgtactgacatcttcggtgtagaggaaacagccattggtaagaagatcggtgaggaggagatccagaagccagaggaaaaggtgacctgggatggccactcaggcagcatggcccggacccagcaggctgcccaggccaacatcaccctccaggagcagattgaggccattcacaaggccaaaggcctggtgccagaggatgacactaaagagaagattggccccagcaagcccaatgaaatccctcaacagccaccgccaccatcttcagccaccaacatccccagctcggctccacccatcacttcagtgccccgaccacccacaatgccacctccagttcgtactacagttgtctccgcagtacccgtcatgccccggcccccaatggcatctgtggtccggctgcccccaggctcagtgatcgcccccatgccgcccatcatccacgcgcccagaatcaacgtggtgcccatgcctccctcggcccctcctattatggccccccgcccaccccccatgattgtgccaacagcctttgtgcctgctccacctgtggcacctgtcccagctccagccccaatgccccctgtgcatcccccacctcccatggaagatgagcccacctccaaaaaactgaagacagaggacagcctcatgccagaggaggagttcctgcgcagaaacaagggtccagtgtccatcaaagtccaggtgcccaacatgcaggataagacggaatggaaactgaatgggcaggtgctggtcttcaccctcccactcacggaccaggtctctgtcattaaggtgaagattcatgaagccacaggcatgcctgcagggaaacagaagctacagtatgagggtatcttcatcaaagattccaactcactggcttactacaacatggccaatggcgcagtcatccacctggccctcaaggagagaggcgggaggaagaagtagacaagaggaacctgctgtcaagtccctgccattttgcctctcctgtctcccaccccctgccccagacccaggagcccccctgaggctttgccttgcctgcatatttgtttcgctcttactcagtttgggaattcaaattgtcctgcagaggttcattcccctgaccctttccccacattggtaagagtagctgggttttctaagccactctctggaatctctttgtgttagggtctcgatttgaggacattcatttcttcagcagcccattagcaactgagagcccagggatgtcctacaggatagtttcatagtgacaggtggcacttggctaatagaatatggctgatattgtcattaatcattttgtaccttgacatgggttgtctaataaaactcggacccttcttgtgaaatcagttaaataagacttgtctcggtcacctgtgccctgtccagactcgaggcagtggtaacactgcacagtgctatgtggcttctctttgaggatttttgggttttgtaactaaattcttgctgccctcatactttttatgtattagaatcatattcgtattgcccttttaaaacattgggatcctccaaaggcctgccccatgtatttaacagtaatacaggaagcatggcaggcaccatgcaaaccaaggatggatggtgcagtccctgtgtcagtgggcggtggtttcctgctggcctggaatcactcatcacctgattgattggctctgtggtcctgggcaggtgcctcataggtgtgtggatatgatgacgtttctttaaaatgtatgtatttaacaaatacttaattgtattaaggtcatgtaccaaggatttgataaagtttaaataatttactctctatctacttttatccattttatccattttaactcatgtaatcctcatgtgagtattcctgtttaacacttgagtaaactgaggcacagagaacaaaaaaaaaaaaaaaaaaaaaaaaaaaaaaaaaaaaaaaaaaaaaaaaaaaaaaaaaaaaaaaaaaaaaaaaaaaaaaaaaaaaaaaagggggggcggccgaaaatccccccggggggggaaaaaccaccctttttaaaagggccccaatagtgggggtagtattaataaaaaaggagcgggggcgcgtttaa

SEQ ID NO: 459175 - DNA, 2356 bp, Homo sapiens
  misc_feature (2263)..(2264): n is a, c, g, or t
  misc_feature (2294)..(2294): n is a, c, g, or t
  misc_feature (2299)..(2299): n is a, c, g, or t
  misc_feature (2332)..(2332): n is a, c, g, or t
agtcgtaccttcgcggccgcaactcgctcggccgccgccatcttgcgagctcgtcgtactgaccgagcggggaggctgtcttgaggcggcaccgctcaccgacaccgaggcggactggcagccctgagcgtcgcagtcatgccggccggacccgtgcaggcggtgcccccgccgccgcccgtgcccacggagcccaaacagcccacagaagaagaagcatcttcaaaggaggattctgcaccttctaagccagttgtggggattatttaccctcctccagaggtcagaaatattgttgacaagactgccagctttgtggccagaaacgggcctgaatttgaagctaggatccgacagaacgagatcaacaaccccaagttcaactttctgaaccccaatgacccttaccatgcctactaccgccacaaggtcagcgagttcaaggaagggaaggctcaggagccgtccgccgccatccccaaggtcatgcagcagcagcagcagaccacccagcagcagctgccccagaaggtccaagcccaagtaatccaagagaccatcgtgcccaaagagcctcctcctgagtttgagttcattgctgatcctccctctatctcagccttcgacttggatgtggtgaagctgacggctcagtttgtggccaggaatgggcgccagtttctgacccagctgatgcagaaagagcagcgcaactaccagtttgactttctccgcccacagcacagcctcttcaactacttcacgaagctagtggaacagtacaccaagatcttgattccacccaaaggtttattttcaaagctcaagaaagaggctgaaaacccccgagaagttttggatcaggtgtgttaccgagtggaatgggccaaattccaggaacgtgagaggaagaaggaagaagaggagaaggagaaggagcgggtggcctatgctcagatcgactggcatgattttgtggtggtggaaacagtggacttccaacccaatgagcaagggaacttccctccccccaccacgccagaggagctgggggcccgaatcctcattcaggagcgctatgaaaagtttggggagagtgaggaagttgagatggaggtcgagtctgatgaggaggatgacaaacaggagaaggcggaggagcctccttcccagctggaccaggacacccaagtacaagatatggatgagggttcagatgatgaagaagaagggcagaaagtgcccccacccccagagacacccatgcctccacctctgcccccaactccagaccaagtcattgtccgcaaggattatgatcccaaagcctccaagcccttgcctccagcccctgctccagatgagtatcttgtgtcccccattactggggagaagatccccgccagcaaaatgcaggaacacatgcgcattggacttcttgaccctcgctggctggagcagcgggatcgctccatccgtgagaagcagagcgatgatgaggtgtacgcaccaggtctggatattgagagcagcttgaagcagttggctgagcggcgtactgacatcttcggtgtagaggaaacagccattggtaagaagatcggtgaggaggagatccagaagccagaggaaaaggtgacctgggatggccactcaggcagcatggcccggacccagcaggctgcccaggccaacatcaccctccaggagcagattgaggccattcacaaggccaaaggcctggtgccagaggatgacactaaagagaagattggccccagcaagcccaatgaaatccctcaacagccaccgccaccatcttcagccaccaacatccccagctcggctccacccatcacttcagtgccccgaccacccacaatgccacctccagttcgtactacagttgtctccgcagtacccgtcatgccccggcccccaatggcatctgtggtccggctgcccccaggctcagtgatcgcccccatgccgcccatcatccacgcgcccagaatcaacgtggtgcccatgcctccctcggcccctcctattatggccccccgcccaccccccatgattgtgccaacagcctttgtgcctgctccacctgtggcacctgtcccagctccagccccaatgccccctgtgcatcccccacctcccatggaagatgagcccacctccaaaaaactgaagacagaggacagcctcatgccagaggaggagttcctgcgcagaaacaagggtccagtgtccatcaaanncctgggtgccctgagtggtggtaaagtggngcaancccttcacgctccttggccatgttctgaacggnagcttgcctttgccttaataaatg

SEQ ID NO: 459176 - DNA, 918 bp, Homo sapiens
agtcgtaccttcgcggccgcaactcgctcggccgccgccatcttgcgagctcgtcgtactgaccgagcggggaggctgtcttgaggcggcaccgctcaccgacaccgaggcggactggcagccctgagcgtcgcagtcatgccggccggacccgtgcaggcggtgcccccgccgccgcccgtgcccacggagcccaaacagcccacagaagaagaagcatcttcaaaggaggattctgcaccttctaagccagttgtggggattatttaccctcctccagaggtcagaaatattgttgacaagactgccagctttgtggccagaaacgggcctgaatttgaagctaggatccgacagaacgagatcaacaaccccaagttcaactttctgaaccccaatgacccttaccatgcctactaccgccacaaggtcagcgagttcaaggaagggaaggctcaggagccgtccgccgccatccccaaggtcatgcagcagcagcagcagaccacccagcagcagctgccccagaaggtccaagcccaagtaatccaagagaccatcgtgcccaaagagcctcctcctgagtttgagttcattgctgatcctccctctatctcagccttcgacttggatgtggtgaagctgacggctcagtttgtggccaggaatgggcgccagtttctgacccagctgatgcagaaagagcagcgcaactaccagtttgactttctccgcccacagcacagcctcttcaactacttcacgaagctagtggaacagtacaccaagatcttgattccacccaaaggtttattttcaaagctcaagaaagaggctgaaaacccccgagaagttttggatcagccgaaaaagtttttgggatcaaggtgtggtttaccccaattgggaattggggcc

SEQ ID NO: 459177 - DNA, 447 bp, Homo sapiens
agtcgtaccttcgcggccgcaactcgctcggccgccgccatcttgcgagctcgtcgtactgaccgagcggggaggctgtcttgaggcggcaccgctcaccgacaccgaggcggactggcagccctgagcgtcgcagtcatgccggccggacccgtgcaggcggtgcccccgccgccgcccgtgcccacggagcccaaacagcccacagaagaagaagcatcttcaaaggaggattctgcaccttctaagccagttgtggggattatttaccctcctccagaggtcagaaatattgttgacaagactgccagctttgtggccagaaacgggcctgaatttgaagctaggatccgacagaacgagatcaacaaccccaagttcaactttctgaaccccaatgacccttaccatgcctactacctgggttagtctacctgggggataatc

SEQ ID NO: 459178 - DNA, 1677 bp, Homo sapiens
atacaacaactcctacagctttggtttatgaaatcagctagtcaacattagtagaaggtagtataaccagatggctcttcagaatctcatatttatgcaaatacagaataaaaggagttaaagaggaaaaatattacacacgtaacctgaaagcacaactgaaaaatattaaactgttatgaaaatctaaaaacataattaactccctgcaattttcttctctgattgcagcttatttgtctggaaatgtgtacatacacctcactgagagatgctgagatgactacagaaattaactttgagaccagaattacagagaagaaaaaccaaaacccaaccctgcatggtcaagtggtgctaacccaagactgtaacagggagaaatgcccagaatcatcaaaatagtgaaagactgatctgttcaaaatatttgctatatgcactgggtataatccgtaatccatacactgccagataatgccatttcaaggaaggatcgaatacttgatggtaaaggccaagtccccctgtattgggaagtgtgtgatttcggcagacctgctgggaaaatttagggtagagcactctttacagaagaactcaaaaacccaatttggataattttcattatctttttagcaaaatggtttcttaatgtttatattttattttcaaggttcattgtttaatgaaatattttattcttgcatttccataaggaaagggaaagtcatgatcatcctaaaggatcacagtttttaaaaggcaaacattttccctaaggaaacagacacaagctttcctagagaatatgatgttttttaggcattaataaggtccttttttataaaggacacttttctcctagtagttttgaattcaggaacagatccaaagttagcagtatatggctgctacatttccattttcattttcgagccatcagtttatgttcagatgccatctctgtaatcgcacatttaaaacataactgtagcctcactaatggaaaagtagtatgatgaacaatcattcccaatggtgtacaatgtaagggttttagggagcaacagtatttaactggaagaaagaattgcatatttaatgtagtctaatatatacacatttgtttaacatgtaaacaaaagtgttaaattcacatatacaacattatacaatttaatcactcttggaataaaattttatagccttttttctattgggaaaatttgtttagatgtgtgccactccataggtttatttccaaaatgaatgagcccaactccatttgtaaaaacttgtcagttagaattcctttttttagtggattagggctgaattcttagatccttatttcttttcactttaaatgctgccaaagatcactactcatcattcaggaattcgctgtctagcctatctgtagtttcctgaagattgaaaattatgtagactgctatttaaaaatatatttttctaagtgtgaggtttaagatgctgtattgaccctatgagtttttaatgtgttaattatctttatagcataatagatcgctttaggttcctggaatcccatttggtctgacaggatatatgaagattcttaatacctattttctgtgtctaatacttggttaatactaaaaatagaaatgactaaattacatcacagaaagc

SEQ ID NO: 459179 - DNA, 1629 bp, Homo sapiens
atctcattcaggaatcagtcttgttacaggagatgactttggcatggttaagttatttgacttcccatgtccagaaaaatttgcaaaacacaaaaggttcttgggtcattcgccccatgtgacaaatattcgatttaccagtggtgatcgacatgttgttagtgctggaggtgatgactgcagcttatttgtctggaaatgtgtacatacacctcactgagagatgctgagatgactacagaaattaactttgagaccagaattacagagaagaaaaaccaaaacccaaccctgcatggtcaagtggtgctaacccaagactgtaacagggagaaatgcccagaatcatcaaaatagtgaaagactgatctgttcaaaatatttgctatatgcactgggtataatccgtaatccatacactgccagataatgccatttcaaggaaggatcgaatacttgatggtaaaggccaagtccccctgtattgggaagtgtgtgatttcggcagacctgctgggaaaatttagggtagagcactctttacagaagaactcaaaaacccaatttggataattttcattatctttttagcaaaatggtttcttaatgtttatattttattttcaaggttcattgtttaatgaaatattttattcttgcatttccataaggaaagggaaagtcatgatcatcctaaaggatcacagtttttaaaaggcaaacattttccctaaggaaacagacacaagctttcctagagaatatgatgttttttaggcattaataaggtccttttttataaaggacacttttctcctagtagttttgaattcaggaacagatccaaagttagcagtatatggctgctacatttccattttcattttcgagccatcagtttatgttcagatgccatctctgtaatcgcacatttaaaacataactgtagcctcactaatggaaaagtagtatgatgaacaatcattcccaatggtgtacaatgtaagggttttagggagcaacagtatttaactggaagaaagaattgcatatttaatgtagtctaatatatacacatttgtttaacatgtaaacaaaagtgttaaattcacatatacaacattatacaatttaatcactcttggaataaaattttatagccttttttctattgggaaaatttgtttagatgtgtgccactccataggtttatttccaaaatgaatgagcccaactccatttgtaaaaacttgtcagttagaattcctttttttagtggattagggctgaattcttagatccttatttcttttcactttaaatgctgccaaagatcactactcatcattcaggaattcgctgtctagcctatctgtagtttcctgaagattgaaaattatgtagactgctatttaaaaatatatttttctaagtgtgaggtttaagatgctgtattgaccctatgagtttttaatgtgttaattatctttatagcataatagatcgctttaggttcctggaatcccatttggtctgacaggatatatgaagattcttaatacctattttctgtgtctaatacttggttaatactaaaaatagaaatgactaaattacatcacagaaagc

SEQ ID NO: 459180 - DNA, 1422 bp, Homo sapiens
  misc_feature (1238)..(1238): n is a, c, g, or t
atacaacaactcctacagctttggtttatgaaatcagctagtcaacattagtagaaggtagtataaccagatggctcttcagaatctcatatttatgcaaatacagaataaaaggagttaaagaggaaaaatattacacacgtaacctgaaagcacaactgaaaaatattaaactgttatgaaaatctaaaaacataattaactccctgcaattttcttctctgattgcagcttatttgtctggaaatgtgtacatacacctcactgagagatgctgagatgactacagaaattaactttgagaccagaattacagagaagaaaaaccaaaacccaaccctgcatggtcaagtggtgctaacccaagactgtaacagggagaaatgcccagaatcatcaaaatagtgaaagactgatctgttcaaaatatttgctatatgcactgggtataatccgtaatccatacactgccagataatgccatttcaaggaaggatcgaatacttgatggtaaaggccaagtccccctgtattgggaagtgtgtgatttcggcagacctgctgggaaaatttagggtagagcactctttacagaagaactcaaaaacccaatttggataattttcattatctttttagcaaaatggtttcttaatgtttatattttattttcaaggttcattgtttaatgaaatattttattcttgcatttccataaggaaagggaaagtcatgatcatcctaaaggatcacagtttttaaaaggcaaacattttccctaaggaaacagacacaagctttcctagagaatatgatgttttttaggcattaataaggtccttttttataaaggacacttttctcctagtagttttgaattcaggaacagatccaaagttagcagtatatggctgctacatttccattttcattttcgagccatcagtttatgttcagatgccatctctgtaatcgcacatttaaaacataactgtagcctcactaatggaaaagtagtatgatgaacaatcattcccaatggtgtacaatgtaagggttttagggagcaacagtatttaactggaagaaagaattgcatatttaatgtagtctaatatatacacatttgtttaacatgtaaacaaaagtgttaaattcacatatacaacattatacaatttaatcactcttggaataaaattttatagcctttcccttgggaaaatgggcggaggttngccaccaaggtattcccagtagtgacccaccctggtgaaacgcgtctgagaacctttgagggtagcggactaaaccttatccctaaggggcgacacacacagaaacggtacccacagtccaagaatgtagcggaaaacaagggggggacaccagtgagtcgagaccggagggtatagcacacgt

SEQ ID NO: 459181 - DNA, 1121 bp, Homo sapiens
tacttgggttcatggtctctaatatttcaaacaggagctccctttagcgagtccttcttttcctgactgcagctcttttcattttgccatccttttccagctccatgatggttctgcaggtttctgcggccccccggacagtggctctgacggcgttactgatggtgctgctcacatctgtggtccagggcagggccactccagagaattaccttttccagggacggcaggaatgctacgcgtttaatgggacacagcgcttcctggagagatacatctacaaccgggaggagttcgtgcgcttcgacagcgacgtgggggagttccgggcggtgacggagctggggcggcctgatgaggagtactggaacagccagaaggacatcctggaggagaagcgggcagtgccggacaggatgtgcagacacaactacgagctgggcgggcccatgaccctgcagcgccgagtccagcctagggtgaatgtttccccctccaagaaggggcccttgcagcaccacaacctgcttgtctgccacgtgacggatttctacccaggcagcattcaagtccgatggttcctgaatggacaggaggaaacagctggggtcgtgtccaccaacctgatccgtaatggagactggaccttccagatcctggtgatgctggaaatgaccccccagcagggagatgtctacacctgccaagtggagcacaccagcctggatagtcctgtcaccgtggagtggaaggcacagtctgattctgcccggagtaagacattgacgggagctgggggcttcgtgctggggctcatcatctgtggagtgggcatcttcatgcacaggaggagcaagaaagttcaacgaggatctgcataaacagggttcctgagctcactgaaaagactattgtgccttaggaaaagcatttgctgtgtttcgttagcatctggctccaggacagaccttcaacttccaaattggatactgctgccaagaagttgctctgaagtcagtttctatcattctgctctttgattcaaagcactgtttctctcactgggcctccaaccatgttcccttcttcttagcaccacaaataatcaaaacccaacatga

SEQ ID NO: 459182 - DNA, 564 bp, Homo sapiens
cagttgatcaaatattctttgcccaaattacttttggttaaaatttctcctaaatgtgctacagagtgcaaactctgtctccctgccattccgctatatacttactaactattattttattcaagatcatgcatgctctacttgaaggtctatttctatcttttcaatgctacccttacccactagcctaatcacattattcctattttcaacatctaggaatcaattacatagtgaacatgcctaagaaataataatctgggcagatgcagtggctcaggcccgtaatcccagccctttgagaggccgagcgggtggatcacttgaggtcaggcgttggtcaagtgctcctagagaaccaggctgaccaacatggagaaaccttgtctctactaataatacaaaaattagccaggtgaagtggcaggcacctataatcccagctattcgggaggctgaggaaggagaattggttgaagcccggaggtggaggttgcagtgagccaatattgcgccactgcattccagacttggcaacagagtgacactccatctcaacaaaaa

SEQ ID NO: 459183 - DNA, 1065 bp, Homo sapiens
agaagggactgccttcccctcagtgctcgcccctccctagtgatcactcagtgcccctgagctcattcttttcagtaaattctctctctgcgtggtgagaaaacaggcctggagaggctctgcgacccgcttaggaccacagaactcgagaattaccttttccagggacggcaggaatgctacgcgtttaatgggacacagcgcttcctggagagatacatctacaaccgggaggagttcgtgcgcttcgacagcgacgtgggggagttccgggcggtgacggagctggggcggcctgatgaggagtactggaacagccagaaggacatcctggaggagaagcgggcagtgccggacaggatgtgcagacacaactacgagctgggcgggcccatgaccctgcagcgccgagtccagcctagggtgaatgtttccccctccaagaaggggcccttgcagcaccacaacctgcttgtctgccacgtgacggatttctacccaggcagcattcaagtccgatggttcctgaatggacaggaggaaacagctggggtcgtgtccaccaacctgatccgtaatggagactggaccttccagatcctggtgatgctggaaatgaccccccagcagggagatgtctacacctgccaagtggagcacaccagcctggatagtcctgtcaccgtggagtggaaggcacagtctgattctgcccggagtaagacattgacgggagctgggggcttcgtgctggggctcatcatctgtggagtgggcatcttcatgcacaggaggagcaagaaagttcaacgaggatctgcataaacagggttcctgagctcactgaaaagactattgtgccttaggaaaagcatttgctgtgtttcgttagcatctggctccaggacagaccttcaacttccaaattggatactgctgccaagaagttgctctgaagtcagtttctatcattctgctctttgattcaaagcactgtttctctcactgggcctccaaccatgttcccttcttcttagcaccacaaataatcaaaacccaacatga

SEQ ID NO: 459184 - DNA, 1202 bp, Homo sapiens
agaagggactgccttcccctcagtgctcgcccctccctagtgatcactcagtgcccctgagctcattcttttcagtaaattctctctctgcgtggtgagaaaacaggcctggagaggctctgcgacccgcttaggaccacagaactcggtactaggaaaactcctattttaaaatccagccctgggtgggaagatttgggaagaatcgttaatattgagagagagagggagaaagaggattagatgagagtggcgcctccgctcatgtccgccccctccccgcagagaattaccttttccagggacggcaggaatgctacgcgtttaatgggacacagcgcttcctggagagatacatctacaaccgggaggagttcgtgcgcttcgacagcgacgtgggggagttccgggcggtgacggagctggggcggcctgatgaggagtactggaacagccagaaggacatcctggaggagaagcgggcagtgccggacaggatgtgcagacacaactacgagctgggcgggcccatgaccctgcagcgccgagtccagcctagggtgaatgtttccccctccaagaaggggcccttgcagcaccacaacctgcttgtctgccacgtgacggatttctacccaggcagcattcaagtccgatggttcctgaatggacaggaggaaacagctggggtcgtgtccaccaacctgatccgtaatggagactggaccttccagatcctggtgatgctggaaatgaccccccagcagggagatgtctacacctgccaagtggagcacaccagcctggatagtcctgtcaccgtggagtggaaggcacagtctgattctgcccggagtaagacattgacgggagctgggggcttcgtgctggggctcatcatctgtggagtgggcatcttcatgcacaggaggagcaagaaagttcaacgaggatctgcataaacagggttcctgagctcactgaaaagactattgtgccttaggaaaagcatttgctgtgtttcgttagcatctggctccaggacagaccttcaacttccaaattggatactgctgccaagaagttgctctgaagtcagtttctatcattctgctctttgattcaaagcactgtttctctcactgggcctccaaccatgttcccttcttcttagcaccacaaataatcaaaacccaacatga

SEQ ID NO: 459185 - DNA, 968 bp, Homo sapiens
tacttgggttcatggtctctaatatttcaaacaggagctccctttagcgagtccttcttttcctgactgcagctcttttcattttgccatccttttccagctccatgatggttctgcaggtttctgcggccccccggacagtggctctgacggcgttactgatggtgctgctcacatctgtggtccagggcagggccactccagagaattaccttttccagggacggcaggaatgctacgcgtttaatgggacacagcgcttcctggagagacacaactacgagctgggcgggcccatgaccctgcagcgccgagtccagcctagggtgaatgtttccccctccaagaaggggcccttgcagcaccacaacctgcttgtctgccacgtgacggatttctacccaggcagcattcaagtccgatggttcctgaatggacaggaggaaacagctggggtcgtgtccaccaacctgatccgtaatggagactggaccttccagatcctggtgatgctggaaatgaccccccagcagggagatgtctacacctgccaagtggagcacaccagcctggatagtcctgtcaccgtggagtggaaggcacagtctgattctgcccggagtaagacattgacgggagctgggggcttcgtgctggggctcatcatctgtggagtgggcatcttcatgcacaggaggagcaagaaagttcaacgaggatctgcataaacagggttcctgagctcactgaaaagactattgtgccttaggaaaagcatttgctgtgtttcgttagcatctggctccaggacagaccttcaacttccaaattggatactgctgccaagaagttgctctgaagtcagtttctatcattctgctctttgattcaaagcactgtttctctcactgggcctccaaccatgttcccttcttcttagcaccacaaataatcaaaacccaacatga

SEQ ID NO: 459186 - DNA, 1072 bp, Homo sapiens
tacttgggttcatggtctctaatatttcaaacaggagctccctttagcgagtccttcttttcctgactgcagctcttttcattttgccatccttttccagctccatgatggttctgcaggtttctgcggccccccggacagtggctctgacggcgttactgatggtgctgctcacatctgtggtccagggcagggccactccagagaattaccttttccagggacggcaggaatgctacgcgtttaatgggacacagcgcttcctggagagatacatctacaaccgggaggagttcgtgcgcttcgacagcgacgtgggggagttccgggcggtgacggagctggggcggcctgatgaggagtactggaacagccagaaggacatcctggaggagaagcgggcagtgccggacaggatgtgcagacacaactacgagctgggcgggcccatgaccctgcagcgccgagtccagcctagggtgaatgtttccccctccaagaaggggcccttgcagcaccacaacctgcttgtctgccacgtgacggatttctacccaggcagcattcaagtccgatggttcctgaatggacaggaggaaacagctggggtcgtgtccaccaacctgatccgtaatggagactggaccttccagatcctggtgatgctggaaatgaccccccagcagggagatgtctacacctgccaagtggagcacaccagcctggatagtcctgtcaccgtggagtggaaggcacagtctgattctgcccggagtaagacattgacgggagctgggggcttcgtgctggggctcatcatctgtggagtgggcatcttcatgcacaggaggagcaagaaagttcaacgaggatctgcataaacagggttcctgagctcactgaaaagactattgtgccttaggaacttccaaattggatactgctgccaagaagttgctctgaagtcagtttctatcattctgctctttgattcaaagcactgtttctctcactgggcctccaaccatgttcccttcttcttagcaccacaaataatcaaaacccaacatga

SEQ ID NO: 459187 - DNA, 495 bp, Homo sapiens
ccacagtgtaagtggtagagcccacattccactaggctgggcacacattatggagctccataatgtgtgcccacctgccaagtggagcacaccagcctggatagtcctgtcaccgtggagtggaaggcacagtctgattctgcccggagtaagacattgacgggagctgggggcttcgtgctggggctcatcatctgtggagtgggcatcttcatgcacaggaggagcaagaaagttcaacgaggatctgcataaacagggttcctgagctcactgaaaagactattgtgccttaggaaaagcatttgctgtgtttcgttagcatctggctccaggacagaccttcaacttccaaattggatactgctgccaagaagttgctctgaagtcagtttctatcattctgctctttgattcaaagcactgtttctctcactgggcctccaaccatgttcccttcttcttagcaccacaaataatcaaaacccaacatga

SEQ ID NO: 459188 - DNA, 940 bp, Homo sapiens
tacttgggttcatggtctctaatatttcaaacaggagctccctttagcgagtccttcttttcctgactgcagctcttttcattttgccatccttttccagctccatgatggttctgcaggtttctgcggccccccggacagtggctctgacggcgttactgatggtgctgctcacatctgtggtccagggcagggccactccagagaattaccttttccagggacggcaggaatgctacgcgtttaatgggacacagcgcttcctggagagatacatctacaaccgggaggagttcgtgcgcttcgacagcgacgtgggggagttccgggcggtgacggagctggggcggcctgatgaggagtactggaacagccagaaggacatcctggaggagaagcgggcagtgccggacaggatgtgcagacacaactacgagctgggcgggcccatgaccctgcagcgccgagtccagcctagggtgaatgtttccccctccaagaaggggcccttgcagcaccacaacctgcttgtctgccacgtgacggatttctacccaggcagcattcaagtccgatggttcctgaatggacaggaggaaacagctggggtcgtgtccaccaacctgatccgtaatggagactggaccttccagatcctggtgatgctggaaatgaccccccagcagggagatgtctacacctgccaagtggagcacaccagcctggatagtcctgtcaccgtggagtggaaggcacagtctgattctgcccggagtaagacattgacgggagctgggggcttcgtgctggggctcatcatctgtggagtgggcatcttcatgcacaggaggagcaagaaagttcaacgaggatctgcataaacagggttcctgagcatgaagatgcccactccacagatgatgagcaaagaccccaaaag

SEQ ID NO: 459189 - DNA, 986 bp, Homo sapiens
  misc_feature (678)..(678): n is a, c, g, or t
  misc_feature (682)..(682): n is a, c, g, or t
  misc_feature (697)..(697): n is a, c, g, or t
  misc_feature (700)..(700): n is a, c, g, or t
  misc_feature (707)..(708): n is a, c, g, or t
  misc_feature (714)..(715): n is a, c, g, or t
  misc_feature (720)..(722): n is a, c, g, or t
  misc_feature (724)..(724): n is a, c, g, or t
  misc_feature (728)..(728): n is a, c, g, or t
  misc_feature (731)..(732): n is a, c, g, or t
tacttgggttcatggtctctaatatttcaaacaggagctccctttagcgagtccttcttttcctgactgcagctcttttcattttgccatccttttccagctccatgatggttctgcaggtttctgcggccccccggacagtggctctgacggcgttactgatggtgctgctcacatctgtggtccagggcagggccactccagagaattaccttttccagggacggcaggaatgctacgcgtttaatgggacacagcgcttcctggagagatacatctacaaccgggaggagttcgtgcgcttcgacagcgacgtgggggagttccgggcggtgacggagctggggcggcctgatgaggagtactggaacagccagaaggacatcctggaggagaagcgggcagtgccggacaggatgtgcagacacaactacgagctgggcgggcccatgaccctgcagcgccgagtccagcctagggtgaatgtttccccctccaagaaggggcccttgcagcaccacaacctgcttgtctgccacgtgacggatttctacccaggcagcattcaagtccgatggttcctgaatggacaggaggaaacagctggggtcgtgtccaccaacctgatccgtaatggagactggaccttccaggctggtgtgctccacttggcaggtntagncatctccctgtgggnggncatttcnngcacannaggannngnaagntcnngaggatctgcataaacagggttcctgagctcactgaaaagactattgtgccttaggaaaagcatttgctgtgtttcgttagcatctggctccaggacagaccttcaacttccaaattggatactgctgccaagaagttgctctgaagtcagtttctatcattctgctctttgattcaaagcactgtttctctcactgggcctccaaccatgttcccttcttcttagcaccacaaataatcaaaacccaacatga

SEQ ID NO: 459190 - DNA, 805 bp, Homo sapiens
tacttgggttcatggtctctaatatttcaaacaggagctccctttagcgagtccttcttttcctgactgcagctcttttcattttgccatccttttccagctccatgatggttctgcaggtttctgcggccccccggacagtggctctgacggcgttactgatggtgctgctcacatctgtggtccagggcagggccactccaggtaagagccgaactgccattcttggagggtctggctcagggaacaattcctaggggacgttatctttaagggatcaaattctgagacaggctgcgggggctcctgccctaaggcagtgtcctctcttcccagctagagaaagaggttcatcccctataggatagcttgctaccctactggcctattctctctccaaggacatgggtacagtaaacagagagaggtgcccagtggtcagtatgcttgtctttggggaaaatgggaccaagaggtcctggataaccttggacagacaaggtttgcagagagagaagttggcaagtgcaggctcctgggcgtgttcatgtctgcatccagcctggaggggactcaggcagagagccctaagctggagtgtccaggctctgaggatcactgaggattcagtgctcacgaagaatgcctcttattccccagggtggagcaggagcccacatcccttggacaattaaggagagaagggagggagggggataggttttagcccctgaaggcattctcattaaaggtacttctcccagcctccccagaacttggttagggtactagagtgggttgcgac

SEQ ID NO: 459191 - DNA, 535 bp, Homo sapiens
tacttgggttcatggtctctaatatttcaaacaggagctccctttagcgagtccttcttttcctgactgcagctcttttcattttgccatccttttccagctccatgatggttctgcaggtttctgcggccccccggacagtggctctgacggcgttactgatggtgctgctcacatctgtggtccagggcagggccactccagagaattaccctatggctaccagcgggggcctctccctccacccagacccactccccggccaccagttcccccatcgatgcccacttcgaggccctctccctcagtaaattcacattttccttcctcgtgttacattttcccaatatcttttctattccttggaccaatcagagatgctgtagctccttggggcaaaggtactaatccctggcagcagctgcactccattcccctttttaatgtaactttttccacaggaggtatttcttttttatgttggtcctgagtattttgcaaatgcacagagaaaataaaactaaactccttgttt

SEQ ID NO: 459192 - DNA, 1238 bp, Homo sapiens
tacttgggttcatggtctctaatatttcaaacaggagctccctttagcgagtccttcttttcctgactgcagctcttttcattttgccatccttttccagctccatgatggttctgcaggtttctgcggccccccggacagtggctctgacggcgttactgatggtgctgctcacatctgtggtccagggcagggccactccagagaattaccttttccagggacggcaggaatgctacgcgtttaatgggacacagcgcttcctggagagatacatctacaaccgggaggagttcgtgcgcttcgacagcgacgtgggggagttccgggcggtgacggagctggggcggcctgatgaggagtactggaacagccagaaggacatcctggaggagaagcgggcagtgccggacaggatgtgcagacacaactacgagctgggcgggcccatgaccctgcagcgccgagtccagcctagggtgaatgtttccccctccaagaaggggcccttgcagcaccacaacctgcttgtctgccacgtgacggatttctacccaggcagcattcaagtccgatggttcctgaatggacaggaggaaacagctggggtcgtgtccaccaacctgatccgtaatggagactggaccttccagatcctggtgatgctggaaatgaccccccagcagggagatgtctacacctgccaagtggagcacaccagcctggatagtcctgtcaccgtggagtggaaggcacagtctgattctgcccggagtaagacattgacgggagctgggggcttcgtgctggggctcatcatctgtggagtgggcatcttcatgcacaggaggagcaagaaagttcaacgaggatctgcataaacagggttcctgagctcactgaaaagactattgtgccttaggaaaagcatttgctgtgtttcgttagcatctggctccaggacagaccttcaacttccaaattggatactgctgccaagaagttgctctgaagtcagtttctatcattctgctctttgattcaaagcactgtttctctcactgggcctccaaccatgttcccttcttcttagcaccacaaataatcaaaacccaacatgactgtttgttttcctttaaaaatatgcaccaaatcatctctcatcacttttctctgagggttttagtagacagtaggagttaataaagaagttcattttggtttaaacataggaaaga

SEQ ID NO: 459193 - DNA, 1329 bp, Homo sapiens
tacttgggttcatggtctctaatatttcaaacaggagctccctttagcgagtccttcttttcctgactgcagctcttttcattttgccatccttttccagctccatgatggttctgcaggtttctgcggccccccggacagtggctctgacggcgttactgatggtgctgctcacatctgtggtccagggcagggccactccagagaattaccttttccagggacggcaggaatgctacgcgtttaatgggacacagcgcttcctggagagatacatctacaaccgggaggagttcgtgcgcttcgacagcgacgtgggggagttccgggcggtgacggagctggggcggcctgatgaggagtactggaacagccagaaggacatcctggaggagaagcgggcagtgccggacaggatgtgcagacacaactacgagctgggcgggcccatgaccctgcagcgccgagtccagcctagggtgaatgtttccccctccaagaaggggcccttgcagcaccacaacctgcttgtctgccacgtgacggatttctacccaggcagcattcaagtccgatggttcctgaatggacaggaggaaacagctggggtcgtgtccaccaacctgatccgtaatggagactggaccttccagatcctggtgatgctggaaatgaccccccagcagggagatgtctacacctgccaagtggagcacaccagcctggatagtcctgtcaccgtggagtggaaggcacagtctgattctgcccggagtaagacattgacgggagctgggggcttcgtgctggggctcatcatctgtggagtgggcatcttcatgcacaggaggagcaagaaagttcaacgaggatctgcataaacagggttcctgagctcactgaaaagactattgtgccttaggaaaagcatttgctgtgtttcgttagcatctggctccaggacagaccttcaacttccaaattggatactgctgccaagaagttgctctgaagtcagtttctatcattctgctctttgattcaaagcactgtttctctcactgggcctccaaccatgttcccttcttcttagcaccacaaataatcaaaacccaacatgaaaaaaaaaaaaaaagaagcaaacacacacaaaaaaaaaacccggagggacacaaatggcggggggggcaaaaaagacgggcaaaaaaggcggcaaatggggccaaacagtggttgtccgaccccagtttctgtgacacaggcggacgaatgagaggaccaccccataagaagagggcgcaaaattccaaaagcccgggtacccggtag

SEQ ID NO: 459194 - DNA, 1031 bp, Homo sapiens
tacttgggttcatggtctctaatatttcaaacaggagctccctttagcgagtccttcttttcctgactgcagctcttttcattttgccatccttttccagctccatgatggttctgcaggtttctgcggccccccggacagtggctctgacggcgttactgatggtgctgctcacatctgtggtccagggcagggccactccagagaattaccttttccagggacggcaggaatgctacgcgtttaatgggacacagcgcttcctggagagatacatctacaaccgggaggagttcgtgcgcttcgacagcgacgtgggggagttccgggcggtgacggagctggggcggcctgatgaggagtactggaacagccagaaggacatcctggaggagaagcgggcagtgccggacaggatgtgcagacacaactacgagctgggcgggcccatgaccctgcagcgccgaggcagcattcaagtccgatggttcctgaatggacaggaggaaacagctggggtcgtgtccaccaacctgatccgtaatggagactggaccttccagatcctggtgatgctggaaatgaccccccagcagggagatgtctacacctgccaagtggagcacaccagcctggatagtcctgtcaccgtggagtggaaggcacagtctgattctgcccggagtaagacattgacgggagctgggggcttcgtgctggggctcatcatctgtggagtgggcatcttcatgcacaggaggagcaagaaagttcaacgaggatctgcataaacagggttcctgagctcactgaaaagactattgtgccttaggaaaagcatttgctgtgtttcgttagcatctggctccaggacagaccttcaacttccaaattggatactgctgccaagaagttgctctgaagtcagtttctatcattctgctctttgattcaaagcactgtttctctcactgggcctccaaccatgttcccttcttcttagcaccacaaataatcaaaacccaacatga

SEQ ID NO: 459195 - DNA, 1417 bp, Homo sapiens
tacttgggttcatggtctctaatatttcaaacaggagctccctttagcgagtccttcttttcctgactgcagctcttttcattttgccatccttttccagctccatgatggttctgcaggtttctgcggccccccggacagtggctctgacggcgttactgatggtgctgctcacatctgtggtccagggcagggccactccagagaattaccttttccagggacggcaggaatgctacgcgtttaatgggacacagcgcttcctggagagatacatctacaaccgggaggagttcgtgcgcttcgacagcgacgtgggggagttccgggcggtgacggagctggggcggcctgatgaggagtactggaacagccagaaggacatcctggaggagaagcgggcagtgccggacaggatgtgcagacacaactacgagctgggcgggcccatgaccctgcagcgccgagtccagcctagggtgaatgtttccccctccaagaaggggcccttgcagcaccacaacctgcttgtctgccacgtgacggatttctacccaggcagcattcaagtccgatggttcctgaatggacaggaggaaacagctggggtcgtgtccaccaacctgatccgtaatggagactggaccttccagatcctggtgatgctggaaatgaccccccagcagggagatgtctacacctgccaagtggagcacaccagcctggatagtcctgtcaccgtggagtggaaggcacagtctgattctgcccggagtaagacattgacgggagctgggggcttcgtgctggggctcatcatctgtggagtgggcatcttcatgcacaggaggagcaagaaagttcaacgaggatctgcataaacaggtaatattcctgctttgatttccttgtggggtgggttgcaggaggatatgagtcctttctgtgcattgtaacactgaggctcctccaggaagggaatctcaggcatgaacccctctttcaatgtcagccttcaggcaagtggggaaagagcattgcttggctccattgctgaaggaagcagagatcaactctgttatttatcagcctgagacgcatcctctcaccataatttttctctcctggacttacaggaaggaggctggcaacctgggataacttgtcttttacccccacagggttcctgagctcactgaaaagactattgtgccttaggaaaagcatttgctgtgtttcgttagcatctggctccaggacagaccttcaacttccaaattggatactgctgccaagaagttgctctgaagtcagtttctatcattctgctctttgattcaaagcactgtttctctcactgggcctccaaccatgttcccttcttcttagcaccacaaataatcaaaacccaacatga

SEQ ID NO: 459196 - DNA, 408 bp, Homo sapiens
  misc_feature (100)..(100): n is a, c, g, or t
  misc_feature (104)..(104): n is a, c, g, or t
  misc_feature (119)..(119): n is a, c, g, or t
  misc_feature (122)..(122): n is a, c, g, or t
  misc_feature (129)..(130): n is a, c, g, or t
  misc_feature (136)..(137): n is a, c, g, or t
  misc_feature (142)..(144): n is a, c, g, or t
  misc_feature (146)..(146): n is a, c, g, or t
  misc_feature (150)..(150): n is a, c, g, or t
  misc_feature (153)..(154): n is a, c, g, or t
agctcggtaccccaatgtcttactccgggcagaatcagactgtgccttccactccacggtgacaggactatccaggctggtgtgctccacttggcaggtntagncatctccctgtgggnggncatttcnngcacannaggannngnaagntcnngaggatctgcataaacagggttcctgagctcactgaaaagactattgtgccttaggaaaagcatttgctgtgtttcgttagcatctggctccaggacagaccttcaacttccaaattggatactgctgccaagaagttgctctgaagtcagtttctatcattctgctctttgattcaaagcactgtttctctcactgggcctccaaccatgttcccttcttcttagcaccacaaataatcaaaacccaacatga

SEQ ID NO: 459197 - DNA, 929 bp, Homo sapiens
cgttggtcaagtgctcctagagaaccaggctgaccaacatggagaaaccttgtctctactaataatacaaaaattagccaggtgaagtggcaggcacctataatcccagctattcgggaggctgaggaaggagaattggttgaagcccggaggtggaggttgcagtgagccaatattgcgccactgcattccagacttggcaacagagtgacactccatctcaacaaaaagaaagaatgaaagaaagaaagagcgagattatgtctcaaaaaaaaggaaggaaggaaggaaggaaggaaggaaggaaggaaggaaggaaagaaggacaatctcaaattctatttcattatttttcttccacgctcctagtccagcctagggtgaatgtttccccctccaagaaggggcccttgcagcaccacaacctgcttgtctgccacgtgacggatttctacccaggcagcattcaagtccgatggttcctgaatggacaggaggaaacagctggggtcgtgtccaccaacctgatccgtaatggagactggaccttccagatcctggtgatgctggaaatgaccccccagcagggagatgtctacacctgccaagtggagcacaccagcctggatagtcctgtcaccgtggagtggagtgagtctctgatgaccctctagaccccacctctgaagagcaggggactctctggctctggggtccactcatcttatcttctgcatctataccctggggccatgtccaaaccccatctttcttctataccagctcctgagcatagtttgaagccagggaaatggagacttcctgaccttggcttaggggttcctgaagattcatagttctcccccttgtcagagaatctagggacactgactggtctcgaaaccctcacacttaggaactgacctcac

SEQ ID NO: 459198 - DNA, 2123 bp, Homo sapiens
gaattccgcgctttgcagagaaagcccccctggctcttctctctcaatccataatccagcgatgctgcagctgtaaaagcattaatagaaaatcaatccacaacctcgcggggcagcgatcgtcgagcgccgtttccaggctgccttccctggggtcgggagcggccccgctccccccgtggctggcgcgaaatgtggtgatccgtcccggggcggggatgacttcatgcagccggagctccgcggcgggagcggaggctgctgctggcaggtggggcgcgggccggcgcgagctgaccgagcactcggcgggcgcggcgggactgcggcccgtggcggcgtgcgcggggacctgcgctgactaggtccggggaagtttcctgactttctgagaagccctggtttccccaaagaagtgatttctgatagaaatctgaaggtcatctccaagaaaaaagagatctagtatagtcaatgaattaaagacaagaaggtttccaatcagtccctgctatgtggatatttggtagcaatgactgatgtggaaactacatatgcagattttattgcttcaggaagaacaggtagaagaaatgcaatacatgatatcctggtttcctctgcaagtggcaacagcaatgaattagccttgaaattagcaggtcttgatatcaacaagacagaaggtgaagaagatgcacaacgaagttctacagaacaaagtggggaagcccagggagaagcagcaaaatctgaaagctaacaccccactttgaccctcgaccacacctgaaaatgtctcaaatctccaggagtatctggaatgcatttgtttccatgagtgaaaagaggaaaaagaaaatggctgtgctgcattgcaggaacctgctcattatcatgttaaaaatgagggcagaggctgtggctgcaggcagacttttccctacctctgtcattagcaatggttgaaatcatgtggcttgtgtttgggcgtcatttttgtatggatcctttcacttgatcatatgacgaaatgcttatagagagtagctccgacctagatgatgattcttcctgtagcatctggcccctcacaatgtcagaggatttaattgtgtctaattgcgaagggttgattgaaccccagagtttaaatatctctggctcaagtgttcacccagtaaaagaaagatccagaaagcactgtttttagcattacgtatctgtgtgttactgctgtgttatttacactgttttgtattgtacaatatatatgctcagcactgcccccttctctgattgcttatgaaaaacaaaatgatgtacattactgtgaatttttataccactcatttttaaaagggctgtcttttcattttagttttccatactgtggtggtgtacacaggatagaacacccttttttaaaacacagtctttccccttgctcattgtatgttgatgagttgattaagtctaacagattcatcaagactccattgctttattatagagacatttgaaaatatccattaatgtgaatatcacctgaattcaatctgtcaaatttgttttattctcaagtggagaacttctcccacataatatatatatatatatatattttaatttatgagaattttggacaattggaaaggtagaaaagaaaagccaagatcatactaaggactggaaatattttgttctatggaatcaaatttctcacaatgctgtatgatactatttaaatttggaggacaacttatcttcactaagctgaatcaggtggagaaagtaatctccttgcaatcatgtggacaccaatcacaaaagtaaagccctggtgttgtgttttcatgtcttttttcagccctctcagatccaaatgttattatgcactttttaatgtttgtaaacttttactaataattagtgtgaattgcattctgatacaataatgattatcattagaagctaacaaaattctcattaatactgtgtttgatggcctctgctgtgttttaacatcgtgcttcttatatggaaagtttttgtgagctgtgtaatccctctggtcagtattatgaaatcatttgtcagtggtaataaataaggaaccagta

SEQ ID NO: 459199 - DNA, 272 bp, Homo sapiens
gcaggaactagttctctctctctctctcttctaagtgaaacctgtagtagcagtagtagtagggagaaaatgtgtagtcatcaagtgaaaataggaaaggatctatgatttatgatgtcttaatagaccctaaattgttctttaattacaagagtggcagtctctgaagtcatttgtgagcttgtatgacttttgtatttagcaatgttgcatgctcacataattgaaaattaaaagtaacacatttttctgaaatgtaaaaaaaagataaa

SEQ ID NO: 459200 - DNA, 4220 bp, Homo sapiens
gaattccgcgctttgcagagaaagcccccctggctcttctctctcaatccataatccagcgatgctgcagctgtaaaagcattaatagaaaatcaatccacaacctcgcggggcagcgatcgtcgagcgccgtttccaggctgccttccctggggtcgggagcggccccgctccccccgtggctggcgcgaaatgtggtgatccgtcccggggcggggatgacttcatgcagccggagctccgcggcgggagcggaggctgctgctggcaggtggggcgcgggccggcgcgagctgaccgagcactcggcgggcgcggcgggactgcggcccgtggcggcgtgcgcggggacctgcgctgactaggtccggggaagtttcctgactttctgagaagccctggtttccccaaagaagtgatttctgatagaaatctgaaggtcatctccaagaaaaaagagatctagtatagtcaatgaattaaagacaagaaggtttccaatcagtccctgctatgtggatatttggtagcaatgactgatgtggaaactacatatgcagattttattgcttcaggaagaacaggtagaagaaatgcaatacatgatatcctggtttcctctgcaagtggcaacagcaatgaattagccttgaaattagcaggtcttgatatcaacaagacagaaggtgaagaagatgcacaacgaagttctacagaacaaagtggggaagcccagggagaagcagcaaaatctgaaagctaacaccccactttgaccctcgaccacacctgaaaatgtctcaaatctccaggagtatctggaatgcatttgtttccatgagtgaaaagaggaaaaagaaaatggctgtgctgcattgcaggaacctgctcattatcatgttaaaaatgagggcagaggctgtggctgcaggcagacttttccctacctctgtcattagcaatggttgaaatcatgtggcttgtgtttgggcgtcatttttgtatggatcctttcacttgatcatatgacgaaatgcttatagagagtagctccgacctagatgatgattcttcctgtagcatctggcccctcacaatgtcagaggatttaattgtgtctaattgcgaagggttgattgaaccccagagtttaaatatctctggctcaagtgttcacccagtaaaagaaagatccagaaagcactgtttttagcattacgtatctgtgtgttactgctgtgttatttacactgttttgtattgtacaatatatatgctcagcactgcccccttctctgattgcttatgaaaaacaaaatgatgtacattactgtgaatttttataccactcatttttaaaagggctgtcttttcattttagttttccatactgtggtggtgtacacaggatagaacacccttttttaaaacacagtctttccccttgctcattgtatgttgatgagttgattaagtctaacagattcatcaagactccattgctttattatagagacatttgaaaatatccattaatgtgaatatcacctgaattcagtctgtttggtgtctgcacagactggaattcaatctgtcaaatttgttttattctcaagtggagaacttctcccacataatatatatatatatatatattttaatttatgagaattttggacaattggaaaggtagaaaagaaaagccaagatcatactaaggactggaaatattttgttctatggaatcaaatttctcacaatgctgtatgatactatttaaatttggaggacaacttatcttcactaagctgaatcaggtggagaaagtaatctccttgcaatcatgtggacaccaatcacaaaagtaaagccctggtgttgtgttttcatgtcttttttcagccctctcagatccaaatgttattatgcactttttaatgtttgtaaacttttactaataattagtgtgaattgcattctgatacaataatgattatcattagaagctaacaaaattctcattaatactgtgtttgatggcctctgctgtgttttaacatcgtgcttcttatatggaaagtttttgtgagctgtgtaatccctctggtcagtattatgaaatcatttgtcagtggtaataaataaggaaccagtaatatgccaatggttcatgaattactggacaaatagcagacaatgggagtccctttacaataacgagcccacttagctgtccttgagggcttagataccttgccacgtgaagtaggtagagcagcatttcaataggtaatttgtgtggttgtgccagaaactcagcccttctatgtaattacatacaggataaaaggtaagtctgctcacttctccttctacagggcatttcaactgactggaataagggcatggttgcatttagtactcaatcagatattactagaaaaaaaattaataatgtgagcctttccgagagcagaacgaggaaagattaaattttagaatgcttccttctgtctaatccatcaggggccaaaatgcccagtaaaattcaaacacatcacctattaatagacttacaagtgagaaaagaggttcctagggttattttaggcaatccctggtaaactgtttaaaccatcaaacccctacagtcagttttcagtatcctcatttaatattttaataggtttcttgtgaatttaaacttctcttctttcttaaggttgtgaaattccaaactgattttatgtgattttgaaaagtttagaaccagtgctgagtctatgtggagggtttatattcctatgtgatatactgttattaatgcatgtggtgccatgcttgtctttaaatatataaatagtgctaaattgcaaagtcatatggagctttggatttagtttgacttcttactactgctttgtctgctatattcaaacccaaaggcattcccaagctagggagataaaaattaattttctaaaatgtccacatcctatacatttgcttattcatggcatctttcaaattttattttagtttcctttatttgccaagaatacatatggatttgaatttttaaggagagaaggaaagggtaggaaaccagggccttgggtttagtaacaggcattggatgtctattaaccaactattcttacgctaatggctttgcagctcctattctcccatttgatcctcaaacaattctattagagtggtatttttatccaatttcacagattaaaatataagcactcaataaaatataacctttagaagcttaaaaagctagtaagtgatgaactgaggatttgaacccatgtttgtcaccaaggagctttccagggcacatgtcataaaattagagccaactgcagagctgtaagggaacttttagagatgaacttcttcagcctccatattttacagaaggaaactgaatcccagaaggagaaattgccgttctcaaggctccctggatgggtaataacacagatatgagtaggtcacataaagtatatcttttttaaaaaaaagaaattcaattatgtcttatttggggggtatatttcccagaagatatttttctggcatgtggtctgtaaacacagcatgattcatattttttatgtttcatgctactcatttgtttaattaccaacaaacatggggactttggctttttgacttatttgcaacaagcatgaaattgttaaatttaccttttatcaattgtaatcatcctatgccaacatattatcataaattcatagaaatatttttaaaaataaataacagacattgaaatccaattcttagataatactcccagaacagccaatggtaaatgccctatacttgagtcttacttagatgctgtggtaatgcaccattttagaagatgaatgatactgctatttctcttcagggaaacaataatggataaagaaatgtaactgccgggcagcaaagcttctaagtgaaacctgtagtagcagtagtagtagggagaaaatgtgtagtcatcaagtgaaaataggaaaggatctatgatttatgatgtcttaatagaccctaaattgttctttaattacaagagtggcagtctctgaagtcatttgtgagcttgtatgacttttgtatttagcaatgttgcatgctcacataattgaaaattaaaagtaacacatttttctgaaatgtaaaaaaaagataaa

SEQ ID NO: 459201 - DNA, 4009 bp, Homo sapiens
tcatcgctgttccagacagcgatgactcgagagcgggggggcggaggctgctgctggcaggtggggcgcgggccggcgcgagctgaccgagcactcggcgggcgcggcgggactgcggcccgtggcggcgtgcgcggggacctgcgctgactaggtccggggaagtttcctgactttctgagaagccctggtttccccaaagaagtgatttctgatagaaatctgaaggtcatctccaagaaaaaagagatctagtatagtcaatgaattaaagacaagaaggtttccaatcagtccctgctatgtggatatttggtagcaatgactgatgtggaaactacatatgcagattttattgcttcaggaagaacaggtagaagaaatgcaatacatgatatcctggtttcctctgcaagtggcaacagcaatgaattagccttgaaattagcaggtcttgatatcaacaagacagaaggtgaagaagatgcacaacgaagttctacagaacaaagtggggaagcccagggagaagcagcaaaatctgaaagctaacaccccactttgaccctcgaccacacctgaaaatgtctcaaatctccaggagtatctggaatgcatttgtttccatgagtgaaaagaggaaaaagaaaatggctgtgctgcattgcaggaacctgctcattatcatgttaaaaatgagggcagaggctgtggctgcaggcagacttttccctacctctgtcattagcaatggttgaaatcatgtggcttgtgtttgggcgtcatttttgtatggatcctttcacttgatcatatgacgaaatgcttatagagagtagctccgacctagatgatgattcttcctgtagcatctggcccctcacaatgtcagaggatttaattgtgtctaattgcgaagggttgattgaaccccagagtttaaatatctctggctcaagtgttcacccagtaaaagaaagatccagaaagcactgtttttagcattacgtatctgtgtgttactgctgtgttatttacactgttttgtattgtacaatatatatgctcagcactgcccccttctctgattgcttatgaaaaacaaaatgatgtacattactgtgaatttttataccactcatttttaaaagggctgtcttttcattttagttttccatactgtggtggtgtacacaggatagaacacccttttttaaaacacagtctttccccttgctcattgtatgttgatgagttgattaagtctaacagattcatcaagactccattgctttattatagagacatttgaaaatatccattaatgtgaatatcacctgaattcagtctgtttggtgtctgcacagactggaattcaatctgtcaaatttgttttattctcaagtggagaacttctcccacataatatatatatatatatatattttaatttatgagaattttggacaattggaaaggtagaaaagaaaagccaagatcatactaaggactggaaatattttgttctatggaatcaaatttctcacaatgctgtatgatactatttaaatttggaggacaacttatcttcactaagctgaatcaggtggagaaagtaatctccttgcaatcatgtggacaccaatcacaaaagtaaagccctggtgttgtgttttcatgtcttttttcagccctctcagatccaaatgttattatgcactttttaatgtttgtaaacttttactaataattagtgtgaattgcattctgatacaataatgattatcattagaagctaacaaaattctcattaatactgtgtttgatggcctctgctgtgttttaacatcgtgcttcttatatggaaagtttttgtgagctgtgtaatccctctggtcagtattatgaaatcatttgtcagtggtaataaataaggaaccagtaatatgccaatggttcatgaattactggacaaatagcagacaatgggagtccctttacaataacgagcccacttagctgtccttgagggcttagataccttgccacgtgaagtaggtagagcagcatttcaataggtaatttgtgtggttgtgccagaaactcagcccttctatgtaattacatacaggataaaaggtaagtctgctcacttctccttctacagggcatttcaactgactggaataagggcatggttgcatttagtactcaatcagatattactagaaaaaaaattaataatgtgagcctttccgagagcagaacgaggaaagattaaattttagaatgcttccttctgtctaatccatcaggggccaaaatgcccagtaaaattcaaacacatcacctattaatagacttacaagtgagaaaagaggttcctagggttattttaggcaatccctggtaaactgtttaaaccatcaaacccctacagtcagttttcagtatcctcatttaatattttaataggtttcttgtgaatttaaacttctcttctttcttaaggttgtgaaattccaaactgattttatgtgattttgaaaagtttagaaccagtgctgagtctatgtggagggtttatattcctatgtgatatactgttattaatgcatgtggtgccatgcttgtctttaaatatataaatagtgctaaattgcaaagtcatatggagctttggatttagtttgacttcttactactgctttgtctgctatattcaaacccaaaggcattcccaagctagggagataaaaattaattttctaaaatgtccacatcctatacatttgcttattcatggcatctttcaaattttattttagtttcctttatttgccaagaatacatatggatttgaatttttaaggagagaaggaaagggtaggaaaccagggccttgggtttagtaacaggcattggatgtctattaaccaactattcttacgctaatggctttgcagctcctattctcccatttgatcctcaaacaattctattagagtggtatttttatccaatttcacagattaaaatataagcactcaataaaatataacctttagaagcttaaaaagctagtaagtgatgaactgaggatttgaacccatgtttgtcaccaaggagctttccagggcacatgtcataaaattagagccaactgcagagctgtaagggaacttttagagatgaacttcttcagcctccatattttacagaaggaaactgaatcccagaaggagaaattgccgttctcaaggctccctggatgggtaataacacagatatgagtaggtcacataaagtatatcttttttaaaaaaaagaaattcaattatgtcttatttggggggtatatttcccagaagatatttttctggcatgtggtctgtaaacacagcatgattcatattttttatgtttcatgctactcatttgtttaattaccaacaaacatggggactttggctttttgacttatttgcaacaagcatgaaattgttaaatttaccttttatcaattgtaatcatcctatgccaacatattatcataaattcatagaaatatttttaaaaataaataacagacattgaaatccaattcttagataatactcccagaacagccaatggtaaatgccctatacttgagtcttacttagatgctgtggtaatgcaccattttagaagatgaatgatactgctatttctcttcagggaaacaataatggataaagaaatgtaactgccgggcagcaaagcttctaagtgaaacctgtagtagcagtagtagtagggagaaaatgtgtagtcatcaagtgaaaataggaaaggatctatgatttatgatgtcttaatagaccctaaattgttctttaattacaagagtggcagtctctgaagtcatttgtgagcttgtatgacttttgtatttagcaatgttgcatgctcacataattgaaaattaaaagtaacacatttttctgaaatgtaaaaaaaagataaa

SEQ ID NO: 459202 - DNA, 3880 bp, Homo sapiens
tcatcgctgttccagacagcgatgactcgagagcgggggggcggaggctgctgctggcaggtggggcgcgggccggcgcgagctgaccgagcactcggcgggcgcggcgggactgcggcccgtggcggcgtgcgcggggacctgcgctgactaggtccggggaagtccctgctatgtggatatttggtagcaatgactgatgtggaaactacatatgcagattttattgcttcaggaagaacaggtagaagaaatgcaatacatgatatcctggtttcctctgcaagtggcaacagcaatgaattagccttgaaattagcaggtcttgatatcaacaagacagaaggtgaagaagatgcacaacgaagttctacagaacaaagtggggaagcccagggagaagcagcaaaatctgaaagctaacaccccactttgaccctcgaccacacctgaaaatgtctcaaatctccaggagtatctggaatgcatttgtttccatgagtgaaaagaggaaaaagaaaatggctgtgctgcattgcaggaacctgctcattatcatgttaaaaatgagggcagaggctgtggctgcaggcagacttttccctacctctgtcattagcaatggttgaaatcatgtggcttgtgtttgggcgtcatttttgtatggatcctttcacttgatcatatgacgaaatgcttatagagagtagctccgacctagatgatgattcttcctgtagcatctggcccctcacaatgtcagaggatttaattgtgtctaattgcgaagggttgattgaaccccagagtttaaatatctctggctcaagtgttcacccagtaaaagaaagatccagaaagcactgtttttagcattacgtatctgtgtgttactgctgtgttatttacactgttttgtattgtacaatatatatgctcagcactgcccccttctctgattgcttatgaaaaacaaaatgatgtacattactgtgaatttttataccactcatttttaaaagggctgtcttttcattttagttttccatactgtggtggtgtacacaggatagaacacccttttttaaaacacagtctttccccttgctcattgtatgttgatgagttgattaagtctaacagattcatcaagactccattgctttattatagagacatttgaaaatatccattaatgtgaatatcacctgaattcagtctgtttggtgtctgcacagactggaattcaatctgtcaaatttgttttattctcaagtggagaacttctcccacataatatatatatatatatatattttaatttatgagaattttggacaattggaaaggtagaaaagaaaagccaagatcatactaaggactggaaatattttgttctatggaatcaaatttctcacaatgctgtatgatactatttaaatttggaggacaacttatcttcactaagctgaatcaggtggagaaagtaatctccttgcaatcatgtggacaccaatcacaaaagtaaagccctggtgttgtgttttcatgtcttttttcagccctctcagatccaaatgttattatgcactttttaatgtttgtaaacttttactaataattagtgtgaattgcattctgatacaataatgattatcattagaagctaacaaaattctcattaatactgtgtttgatggcctctgctgtgttttaacatcgtgcttcttatatggaaagtttttgtgagctgtgtaatccctctggtcagtattatgaaatcatttgtcagtggtaataaataaggaaccagtaatatgccaatggttcatgaattactggacaaatagcagacaatgggagtccctttacaataacgagcccacttagctgtccttgagggcttagataccttgccacgtgaagtaggtagagcagcatttcaataggtaatttgtgtggttgtgccagaaactcagcccttctatgtaattacatacaggataaaaggtaagtctgctcacttctccttctacagggcatttcaactgactggaataagggcatggttgcatttagtactcaatcagatattactagaaaaaaaattaataatgtgagcctttccgagagcagaacgaggaaagattaaattttagaatgcttccttctgtctaatccatcaggggccaaaatgcccagtaaaattcaaacacatcacctattaatagacttacaagtgagaaaagaggttcctagggttattttaggcaatccctggtaaactgtttaaaccatcaaacccctacagtcagttttcagtatcctcatttaatattttaataggtttcttgtgaatttaaacttctcttctttcttaaggttgtgaaattccaaactgattttatgtgattttgaaaagtttagaaccagtgctgagtctatgtggagggtttatattcctatgtgatatactgttattaatgcatgtggtgccatgcttgtctttaaatatataaatagtgctaaattgcaaagtcatatggagctttggatttagtttgacttcttactactgctttgtctgctatattcaaacccaaaggcattcccaagctagggagataaaaattaattttctaaaatgtccacatcctatacatttgcttattcatggcatctttcaaattttattttagtttcctttatttgccaagaatacatatggatttgaatttttaaggagagaaggaaagggtaggaaaccagggccttgggtttagtaacaggcattggatgtctattaaccaactattcttacgctaatggctttgcagctcctattctcccatttgatcctcaaacaattctattagagtggtatttttatccaatttcacagattaaaatataagcactcaataaaatataacctttagaagcttaaaaagctagtaagtgatgaactgaggatttgaacccatgtttgtcaccaaggagctttccagggcacatgtcataaaattagagccaactgcagagctgtaagggaacttttagagatgaacttcttcagcctccatattttacagaaggaaactgaatcccagaaggagaaattgccgttctcaaggctccctggatgggtaataacacagatatgagtaggtcacataaagtatatcttttttaaaaaaaagaaattcaattatgtcttatttggggggtatatttcccagaagatatttttctggcatgtggtctgtaaacacagcatgattcatattttttatgtttcatgctactcatttgtttaattaccaacaaacatggggactttggctttttgacttatttgcaacaagcatgaaattgttaaatttaccttttatcaattgtaatcatcctatgccaacatattatcataaattcatagaaatatttttaaaaataaataacagacattgaaatccaattcttagataatactcccagaacagccaatggtaaatgccctatacttgagtcttacttagatgctgtggtaatgcaccattttagaagatgaatgatactgctatttctcttcagggaaacaataatggataaagaaatgtaactgccgggcagcaaagcttctaagtgaaacctgtagtagcagtagtagtagggagaaaatgtgtagtcatcaagtgaaaataggaaaggatctatgatttatgatgtcttaatagaccctaaattgttctttaattacaagagtggcagtctctgaagtcatttgtgagcttgtatgacttttgtatttagcaatgttgcatgctcacataattgaaaattaaaagtaacacatttttctgaaatgtaaaaaaaagataaa

SEQ ID NO: 459203 - DNA, 3813 bp, Homo sapiens
  misc_feature (3734)..(3734): n is a, c, g, or t
  misc_feature (3736)..(3736): n is a, c, g, or t
  misc_feature (3740)..(3742): n is a, c, g, or t
  misc_feature (3747)..(3747): n is a, c, g, or t
gaattccgcgctttgcagagaaagcccccctggctcttctctctcaatccataatccagcgatgctgcagctgtaaaagcattaatagaaaatcaatccacaacctcgcggggcagcgatcgtcgagcgccgtttccaggctgccttccctggggtcgggagcggccccgctccccccgtggctggcgcgaaatgtggtgatccgtcccggggcggggatgacttcatgcagccggagctccgcggcgggagcggaggctgctgctggcaggtggggcgcgggccggcgcgagctgaccgagcactcggcgggcgcggcgggactgcggcccgtggcggcgtgcgcggggacctgcgctgactaggtccggggaagtttcctgactttctgagaagccctggtttccccaaagaagtgatttctgatagaaatctgaaggtcatctccaagaaaaaagagatctagtatagtcaatgaattaaagacaagaaggtttccaatcagtccctgctatgtggatatttggtagcaatgactgatgtggaaactacatatgcagattttattgcttcaggaagaacaggtagaagaaatgcaatacatgatatcctggtttcctctgcaagtggcaacagcaatgaattagccttgaaattagcaggtcttgatatcaacaagacagaaggtgaagaagatgcacaacgaagttctacagaacaaagtggggaagcccagggagaagcagcaaaatctgaaagctaacaccccactttgaccctcgaccacacctgaaaatgtctcaaatctccaggagtatctggaatgcatttgtttccatgagtgaaaagaggaaaaagaaaatggctgtgctgcattgcaggaacctgctcattatcatgttaaaaatgagggcagaggctgtggctgcaggcagacttttccctacctctgtcattagcaatggttgaaatcatgtggcttgtgtttgggcgtcatttttgtatggatcctttcacttgatcatatgacgaaatgcttatagagagtagctccgacctagatgatgattcttcctgtagcatctggcccctcacaatgtcagaggatttaattgtgtctaattgcgaagggttgattgaaccccagagtttaaatatctctggctcaagtgttcacccagtaaaagaaagatccagaaagcactgtttttagcattacgtatctgtgtgttactgctgtgttatttacactgttttgtattgtacaatatatatgctcagcactgcccccttctctgattgcttatgaaaaacaaaatgatgtacattactgtgaatttttataccactcatttttaaaagggctgtcttttcattttagttttccatactgtggtggtgtacacaggatagaacacccttttttaaaacacagtctttccccttgctcattgtatgttgatgagttgattaagtctaacagattcatcaagactccattgctttattatagagacatttgaaaatatccattaatgtgaatatcacctgaattcagtctgtttggtgtctgcacagactggaattcaatctgtcaaatttgttttattctcaagtggagaacttctcccacataatatatatatatatatatattttaatttatgagaattttggacaattggaaaggtagaaaagaaaagccaagatcatactaaggactggaaatattttgttctatggaatcaaatttctcacaatgctgtatgatactatttaaatttggaggacaacttatcttcactaagctgaatcaggtggagaaagtaatctccttgcaatcatgtggacaccaatcacaaaagtaaagccctggtgttgtgttttcatgtcttttttcagccctctcagatccaaatgttattatgcactttttaatgtttgtaaacttttactaataattagtgtgaattgcattctgatacaataatgattatcattagaagctaacaaaattctcattaatactgtgtttgatggcctctgctgtgttttaacatcgtgcttcttatatggaaagtttttgtgagctgtgtaatccctctggtcagtattatgaaatcatttgtcagtggtaataaataaggaaccagtaatatgccaatggttcatgaattactggacaaatagcagacaatgggagtccctttacaataacgagcccacttagctgtccttgagggcttagataccttgccacgtgaagtaggtagagcagcatttcaataggtaatttgtgtggttgtgccagaaactcagcccttctatgtaattacatacaggataaaaggtaagtctgctcacttctccttctacagggcatttcaactgactggaataagggcatggttgcatttagtactcaatcagatattactagaaaaaaaattaataatgtgagcctttccgagagcagaacgaggaaagattaaattttagaatgcttccttctgtctaatccatcaggggccaaaatgcccagtaaaattcaaacacatcacctattaatagacttacaagtgagaaaagaggttcctagggttattttaggcaatccctggtaaactgtttaaaccatcaaacccctacagtcagttttcagtatcctcatttaatattttaataggtttcttgtgaatttaaacttctcttctttcttaaggttgtgaaattccaaactgattttatgtgattttgaaaagtttagaaccagtgctgagtctatgtggagggtttatattcctatgtgatatactgttattaatgcatgtggtgccatgcttgtctttaaatatataaatagtgctaaattgcaaagtcatatggagctttggatttagtttgacttcttactactgctttgtctgctatattcaaacccaaaggcattcccaagctagggagataaaaattaattttctaaaatgtccacatcctatacatttgcttattcatggcatctttcaaattttattttagtttcctttatttgccaagaatacatatggatttgaatttttaaggagagaaggaaagggtaggaaaccagggccttgggtttagtaacaggcattggatgtctattaaccaactattcttacgctaatggctttgcagctcctattctcccatttgatcctcaaacaattctattagagtggtatttttatccaatttcacagattaaaatataagcactcaataaaatataacctttagaagcttaaaaagctagtaagtgatgaactgaggatttgaacccatgtttgtcaccaaggagctttccagggcacatgtcataaaattagagccaactgcagagctgtaagggaacttttagagatgaacttcttcagcctccatattttacagaaggaaactgaatcccagaaggagaaattgccgttctcaaggctccctggatgggtaataacacagatatgagtaggtcacataaagtatatcttttttaaaaaaaagaaattcaattatgtcttatttggggggtatatttcccagaagatatttttctggcatgtggtctgtaaacacagcatgattcatattttttatgtttcatgctactcatttgtttaattaccaacaaacatggggactttggctttttgacttattggacagctgaatggtattaccttttcatgtatatcttngntttnnnatctngaattttaatataggatggtgccttataattcaagacgggaggatggtaaaggggggaaaagaggt

SEQ ID NO: 459204 - DNA, 4223 bp, Homo sapiens
tcatcgctgttccagacagcgatgactcgagagcgggggggcggaggctgctgctggcaggtggggcgcgggccggcgcgagctgaccgagcactcggcgggcgcggcgggactgcggcccgtggcggcgtgcgcggggacctgcgctgactaggtccggggaaggtaattgtattagtctgttttcatgctgctgataaagatatacccgagtctgggaagaaaaagaggcttaattggacttacaattctacatggctggggaggcctcagaatcatggtgggaggcaaaaagcactcctttcatggcagcggcaagagacgatgaggaagaagcaaaagcggaaactcctgataaactcatcagatctcgtgagagtttcctgactttctgagaagccctggtttccccaaagaagtgatttctgatagaaatctgaaggtcatctccaagaaaaaagagatctagtatagtcaatgaattaaagacaagaaggtttccaatcagtccctgctatgtggatatttggtagcaatgactgatgtggaaactacatatgcagattttattgcttcaggaagaacaggtagaagaaatgcaatacatgatatcctggtttcctctgcaagtggcaacagcaatgaattagccttgaaattagcaggtcttgatatcaacaagacagaaggtgaagaagatgcacaacgaagttctacagaacaaagtggggaagcccagggagaagcagcaaaatctgaaagctaacaccccactttgaccctcgaccacacctgaaaatgtctcaaatctccaggagtatctggaatgcatttgtttccatgagtgaaaagaggaaaaagaaaatggctgtgctgcattgcaggaacctgctcattatcatgttaaaaatgagggcagaggctgtggctgcaggcagacttttccctacctctgtcattagcaatggttgaaatcatgtggcttgtgtttgggcgtcatttttgtatggatcctttcacttgatcatatgacgaaatgcttatagagagtagctccgacctagatgatgattcttcctgtagcatctggcccctcacaatgtcagaggatttaattgtgtctaattgcgaagggttgattgaaccccagagtttaaatatctctggctcaagtgttcacccagtaaaagaaagatccagaaagcactgtttttagcattacgtatctgtgtgttactgctgtgttatttacactgttttgtattgtacaatatatatgctcagcactgcccccttctctgattgcttatgaaaaacaaaatgatgtacattactgtgaatttttataccactcatttttaaaagggctgtcttttcattttagttttccatactgtggtggtgtacacaggatagaacacccttttttaaaacacagtctttccccttgctcattgtatgttgatgagttgattaagtctaacagattcatcaagactccattgctttattatagagacatttgaaaatatccattaatgtgaatatcacctgaattcagtctgtttggtgtctgcacagactggaattcaatctgtcaaatttgttttattctcaagtggagaacttctcccacataatatatatatatatatatattttaatttatgagaattttggacaattggaaaggtagaaaagaaaagccaagatcatactaaggactggaaatattttgttctatggaatcaaatttctcacaatgctgtatgatactatttaaatttggaggacaacttatcttcactaagctgaatcaggtggagaaagtaatctccttgcaatcatgtggacaccaatcacaaaagtaaagccctggtgttgtgttttcatgtcttttttcagccctctcagatccaaatgttattatgcactttttaatgtttgtaaacttttactaataattagtgtgaattgcattctgatacaataatgattatcattagaagctaacaaaattctcattaatactgtgtttgatggcctctgctgtgttttaacatcgtgcttcttatatggaaagtttttgtgagctgtgtaatccctctggtcagtattatgaaatcatttgtcagtggtaataaataaggaaccagtaatatgccaatggttcatgaattactggacaaatagcagacaatgggagtccctttacaataacgagcccacttagctgtccttgagggcttagataccttgccacgtgaagtaggtagagcagcatttcaataggtaatttgtgtggttgtgccagaaactcagcccttctatgtaattacatacaggataaaaggtaagtctgctcacttctccttctacagggcatttcaactgactggaataagggcatggttgcatttagtactcaatcagatattactagaaaaaaaattaataatgtgagcctttccgagagcagaacgaggaaagattaaattttagaatgcttccttctgtctaatccatcaggggccaaaatgcccagtaaaattcaaacacatcacctattaatagacttacaagtgagaaaagaggttcctagggttattttaggcaatccctggtaaactgtttaaaccatcaaacccctacagtcagttttcagtatcctcatttaatattttaataggtttcttgtgaatttaaacttctcttctttcttaaggttgtgaaattccaaactgattttatgtgattttgaaaagtttagaaccagtgctgagtctatgtggagggtttatattcctatgtgatatactgttattaatgcatgtggtgccatgcttgtctttaaatatataaatagtgctaaattgcaaagtcatatggagctttggatttagtttgacttcttactactgctttgtctgctatattcaaacccaaaggcattcccaagctagggagataaaaattaattttctaaaatgtccacatcctatacatttgcttattcatggcatctttcaaattttattttagtttcctttatttgccaagaatacatatggatttgaatttttaaggagagaaggaaagggtaggaaaccagggccttgggtttagtaacaggcattggatgtctattaaccaactattcttacgctaatggctttgcagctcctattctcccatttgatcctcaaacaattctattagagtggtatttttatccaatttcacagattaaaatataagcactcaataaaatataacctttagaagcttaaaaagctagtaagtgatgaactgaggatttgaacccatgtttgtcaccaaggagctttccagggcacatgtcataaaattagagccaactgcagagctgtaagggaacttttagagatgaacttcttcagcctccatattttacagaaggaaactgaatcccagaaggagaaattgccgttctcaaggctccctggatgggtaataacacagatatgagtaggtcacataaagtatatcttttttaaaaaaaagaaattcaattatgtcttatttggggggtatatttcccagaagatatttttctggcatgtggtctgtaaacacagcatgattcatattttttatgtttcatgctactcatttgtttaattaccaacaaacatggggactttggctttttgacttatttgcaacaagcatgaaattgttaaatttaccttttatcaattgtaatcatcctatgccaacatattatcataaattcatagaaatatttttaaaaataaataacagacattgaaatccaattcttagataatactcccagaacagccaatggtaaatgccctatacttgagtcttacttagatgctgtggtaatgcaccattttagaagatgaatgatactgctatttctcttcagggaaacaataatggataaagaaatgtaactgccgggcagcaaagcttctaagtgaaacctgtagtagcagtagtagtagggagaaaatgtgtagtcatcaagtgaaaataggaaaggatctatgatttatgatgtcttaatagaccctaaattgttctttaattacaagagtggcagtctctgaagtcatttgtgagcttgtatgacttttgtatttagcaatgttgcatgctcacataattgaaaattaaaagtaacacatttttctgaaatgtaaaaaaaagataaa

SEQ ID NO: 459205 - DNA, 4123 bp, Homo sapiens
tcatcgctgttccagacagcgatgactcgagagcgggggggcggaggctgctgctggcaggtggggcgcgggccggcgcgagctgaccgagcactcggcgggcgcggcgggactgcggcccgtggcggcgtgcgcggggacctgcgctgactaggtccggggaagattgggagtgtgcttttgaggaagaccacagagataaagggccattttgtcaagatgacttatcactgctgatgtcaaccttgatcacctggctgagatagtcgtcatcatcagtttcctgactttctgagaagccctggtttccccaaagaagtgatttctgatagaaatctgaaggtcatctccaagaaaaaagagatctagtatagtcaatgaattaaagacaagaaggtttccaatcagtccctgctatgtggatatttggtagcaatgactgatgtggaaactacatatgcagattttattgcttcaggaagaacaggtagaagaaatgcaatacatgatatcctggtttcctctgcaagtggcaacagcaatgaattagccttgaaattagcaggtcttgatatcaacaagacagaaggtgaagaagatgcacaacgaagttctacagaacaaagtggggaagcccagggagaagcagcaaaatctgaaagctaacaccccactttgaccctcgaccacacctgaaaatgtctcaaatctccaggagtatctggaatgcatttgtttccatgagtgaaaagaggaaaaagaaaatggctgtgctgcattgcaggaacctgctcattatcatgttaaaaatgagggcagaggctgtggctgcaggcagacttttccctacctctgtcattagcaatggttgaaatcatgtggcttgtgtttgggcgtcatttttgtatggatcctttcacttgatcatatgacgaaatgcttatagagagtagctccgacctagatgatgattcttcctgtagcatctggcccctcacaatgtcagaggatttaattgtgtctaattgcgaagggttgattgaaccccagagtttaaatatctctggctcaagtgttcacccagtaaaagaaagatccagaaagcactgtttttagcattacgtatctgtgtgttactgctgtgttatttacactgttttgtattgtacaatatatatgctcagcactgcccccttctctgattgcttatgaaaaacaaaatgatgtacattactgtgaatttttataccactcatttttaaaagggctgtcttttcattttagttttccatactgtggtggtgtacacaggatagaacacccttttttaaaacacagtctttccccttgctcattgtatgttgatgagttgattaagtctaacagattcatcaagactccattgctttattatagagacatttgaaaatatccattaatgtgaatatcacctgaattcagtctgtttggtgtctgcacagactggaattcaatctgtcaaatttgttttattctcaagtggagaacttctcccacataatatatatatatatatatattttaatttatgagaattttggacaattggaaaggtagaaaagaaaagccaagatcatactaaggactggaaatattttgttctatggaatcaaatttctcacaatgctgtatgatactatttaaatttggaggacaacttatcttcactaagctgaatcaggtggagaaagtaatctccttgcaatcatgtggacaccaatcacaaaagtaaagccctggtgttgtgttttcatgtcttttttcagccctctcagatccaaatgttattatgcactttttaatgtttgtaaacttttactaataattagtgtgaattgcattctgatacaataatgattatcattagaagctaacaaaattctcattaatactgtgtttgatggcctctgctgtgttttaacatcgtgcttcttatatggaaagtttttgtgagctgtgtaatccctctggtcagtattatgaaatcatttgtcagtggtaataaataaggaaccagtaatatgccaatggttcatgaattactggacaaatagcagacaatgggagtccctttacaataacgagcccacttagctgtccttgagggcttagataccttgccacgtgaagtaggtagagcagcatttcaataggtaatttgtgtggttgtgccagaaactcagcccttctatgtaattacatacaggataaaaggtaagtctgctcacttctccttctacagggcatttcaactgactggaataagggcatggttgcatttagtactcaatcagatattactagaaaaaaaattaataatgtgagcctttccgagagcagaacgaggaaagattaaattttagaatgcttccttctgtctaatccatcaggggccaaaatgcccagtaaaattcaaacacatcacctattaatagacttacaagtgagaaaagaggttcctagggttattttaggcaatccctggtaaactgtttaaaccatcaaacccctacagtcagttttcagtatcctcatttaatattttaataggtttcttgtgaatttaaacttctcttctttcttaaggttgtgaaattccaaactgattttatgtgattttgaaaagtttagaaccagtgctgagtctatgtggagggtttatattcctatgtgatatactgttattaatgcatgtggtgccatgcttgtctttaaatatataaatagtgctaaattgcaaagtcatatggagctttggatttagtttgacttcttactactgctttgtctgctatattcaaacccaaaggcattcccaagctagggagataaaaattaattttctaaaatgtccacatcctatacatttgcttattcatggcatctttcaaattttattttagtttcctttatttgccaagaatacatatggatttgaatttttaaggagagaaggaaagggtaggaaaccagggccttgggtttagtaacaggcattggatgtctattaaccaactattcttacgctaatggctttgcagctcctattctcccatttgatcctcaaacaattctattagagtggtatttttatccaatttcacagattaaaatataagcactcaataaaatataacctttagaagcttaaaaagctagtaagtgatgaactgaggatttgaacccatgtttgtcaccaaggagctttccagggcacatgtcataaaattagagccaactgcagagctgtaagggaacttttagagatgaacttcttcagcctccatattttacagaaggaaactgaatcccagaaggagaaattgccgttctcaaggctccctggatgggtaataacacagatatgagtaggtcacataaagtatatcttttttaaaaaaaagaaattcaattatgtcttatttggggggtatatttcccagaagatatttttctggcatgtggtctgtaaacacagcatgattcatattttttatgtttcatgctactcatttgtttaattaccaacaaacatggggactttggctttttgacttatttgcaacaagcatgaaattgttaaatttaccttttatcaattgtaatcatcctatgccaacatattatcataaattcatagaaatatttttaaaaataaataacagacattgaaatccaattcttagataatactcccagaacagccaatggtaaatgccctatacttgagtcttacttagatgctgtggtaatgcaccattttagaagatgaatgatactgctatttctcttcagggaaacaataatggataaagaaatgtaactgccgggcagcaaagcttctaagtgaaacctgtagtagcagtagtagtagggagaaaatgtgtagtcatcaagtgaaaataggaaaggatctatgatttatgatgtcttaatagaccctaaattgttctttaattacaagagtggcagtctctgaagtcatttgtgagcttgtatgacttttgtatttagcaatgttgcatgctcacataattgaaaattaaaagtaacacatttttctgaaatgtaaaaaaaagataaa

SEQ ID NO: 459206 - DNA, 3957 bp, Homo sapiens
tcatcgctgttccagacagcgatgactcgagagcgggggggcggaggctgctgctggcaggtggggcgcgggccggcgcgagctgaccgagcactcggcgggcgcggcgggactgcggcccgtggcggcgtgcgcggggacctgcgctgactaggtccggggaagtttcctgactttctgagaagccctggtttccccaaagaagtgatttctgatagaaatctgaaggtcatctccaagaatccctgctatgtggatatttggtagcaatgactgatgtggaaactacatatgcagattttattgcttcaggaagaacaggtagaagaaatgcaatacatgatatcctggtttcctctgcaagtggcaacagcaatgaattagccttgaaattagcaggtcttgatatcaacaagacagaaggtgaagaagatgcacaacgaagttctacagaacaaagtggggaagcccagggagaagcagcaaaatctgaaagctaacaccccactttgaccctcgaccacacctgaaaatgtctcaaatctccaggagtatctggaatgcatttgtttccatgagtgaaaagaggaaaaagaaaatggctgtgctgcattgcaggaacctgctcattatcatgttaaaaatgagggcagaggctgtggctgcaggcagacttttccctacctctgtcattagcaatggttgaaatcatgtggcttgtgtttgggcgtcatttttgtatggatcctttcacttgatcatatgacgaaatgcttatagagagtagctccgacctagatgatgattcttcctgtagcatctggcccctcacaatgtcagaggatttaattgtgtctaattgcgaagggttgattgaaccccagagtttaaatatctctggctcaagtgttcacccagtaaaagaaagatccagaaagcactgtttttagcattacgtatctgtgtgttactgctgtgttatttacactgttttgtattgtacaatatatatgctcagcactgcccccttctctgattgcttatgaaaaacaaaatgatgtacattactgtgaatttttataccactcatttttaaaagggctgtcttttcattttagttttccatactgtggtggtgtacacaggatagaacacccttttttaaaacacagtctttccccttgctcattgtatgttgatgagttgattaagtctaacagattcatcaagactccattgctttattatagagacatttgaaaatatccattaatgtgaatatcacctgaattcagtctgtttggtgtctgcacagactggaattcaatctgtcaaatttgttttattctcaagtggagaacttctcccacataatatatatatatatatatattttaatttatgagaattttggacaattggaaaggtagaaaagaaaagccaagatcatactaaggactggaaatattttgttctatggaatcaaatttctcacaatgctgtatgatactatttaaatttggaggacaacttatcttcactaagctgaatcaggtggagaaagtaatctccttgcaatcatgtggacaccaatcacaaaagtaaagccctggtgttgtgttttcatgtcttttttcagccctctcagatccaaatgttattatgcactttttaatgtttgtaaacttttactaataattagtgtgaattgcattctgatacaataatgattatcattagaagctaacaaaattctcattaatactgtgtttgatggcctctgctgtgttttaacatcgtgcttcttatatggaaagtttttgtgagctgtgtaatccctctggtcagtattatgaaatcatttgtcagtggtaataaataaggaaccagtaatatgccaatggttcatgaattactggacaaatagcagacaatgggagtccctttacaataacgagcccacttagctgtccttgagggcttagataccttgccacgtgaagtaggtagagcagcatttcaataggtaatttgtgtggttgtgccagaaactcagcccttctatgtaattacatacaggataaaaggtaagtctgctcacttctccttctacagggcatttcaactgactggaataagggcatggttgcatttagtactcaatcagatattactagaaaaaaaattaataatgtgagcctttccgagagcagaacgaggaaagattaaattttagaatgcttccttctgtctaatccatcaggggccaaaatgcccagtaaaattcaaacacatcacctattaatagacttacaagtgagaaaagaggttcctagggttattttaggcaatccctggtaaactgtttaaaccatcaaacccctacagtcagttttcagtatcctcatttaatattttaataggtttcttgtgaatttaaacttctcttctttcttaaggttgtgaaattccaaactgattttatgtgattttgaaaagtttagaaccagtgctgagtctatgtggagggtttatattcctatgtgatatactgttattaatgcatgtggtgccatgcttgtctttaaatatataaatagtgctaaattgcaaagtcatatggagctttggatttagtttgacttcttactactgctttgtctgctatattcaaacccaaaggcattcccaagctagggagataaaaattaattttctaaaatgtccacatcctatacatttgcttattcatggcatctttcaaattttattttagtttcctttatttgccaagaatacatatggatttgaatttttaaggagagaaggaaagggtaggaaaccagggccttgggtttagtaacaggcattggatgtctattaaccaactattcttacgctaatggctttgcagctcctattctcccatttgatcctcaaacaattctattagagtggtatttttatccaatttcacagattaaaatataagcactcaataaaatataacctttagaagcttaaaaagctagtaagtgatgaactgaggatttgaacccatgtttgtcaccaaggagctttccagggcacatgtcataaaattagagccaactgcagagctgtaagggaacttttagagatgaacttcttcagcctccatattttacagaaggaaactgaatcccagaaggagaaattgccgttctcaaggctccctggatgggtaataacacagatatgagtaggtcacataaagtatatcttttttaaaaaaaagaaattcaattatgtcttatttggggggtatatttcccagaagatatttttctggcatgtggtctgtaaacacagcatgattcatattttttatgtttcatgctactcatttgtttaattaccaacaaacatggggactttggctttttgacttatttgcaacaagcatgaaattgttaaatttaccttttatcaattgtaatcatcctatgccaacatattatcataaattcatagaaatatttttaaaaataaataacagacattgaaatccaattcttagataatactcccagaacagccaatggtaaatgccctatacttgagtcttacttagatgctgtggtaatgcaccattttagaagatgaatgatactgctatttctcttcagggaaacaataatggataaagaaatgtaactgccgggcagcaaagcttctaagtgaaacctgtagtagcagtagtagtagggagaaaatgtgtagtcatcaagtgaaaataggaaaggatctatgatttatgatgtcttaatagaccctaaattgttctttaattacaagagtggcagtctctgaagtcatttgtgagcttgtatgacttttgtatttagcaatgttgcatgctcacataattgaaaattaaaagtaacacatttttctgaaatgtaaaaaaaagataaa

SEQ ID NO: 459207 - DNA, 2155 bp, Homo sapiens
gaattccgcgctttgcagagaaagcccccctggctcttctctctcaatccataatccagcgatgctgcagctgtaaaagcattaatagaaaatcaatccacaacctcgcggggcagcgatcgtcgagcgccgtttccaggctgccttccctggggtcgggagcggccccgctccccccgtggctggcgcgaaatgtggtgatccgtcccggggcggggatgacttcatgcagccggagctccgcggcgggagcggaggctgctgctggcaggtggggcgcgggccggcgcgagctgaccgagcactcggcgggcgcggcgggactgcggcccgtggcggcgtgcgcggggacctgcgctgactaggtccggggaagtttcctgactttctgagaagccctggtttccccaaagaagtgatttctgatagaaatctgaaggtcatctccaagaaaaaagagatctagtatagtcaatgaattaaagacaagaaggtttccaatcagtccctgctatgtggatatttggtagcaatgactgatgtggaaactacatatgcagattttattgcttcaggaagaacaggtagaagaaatgcaatacatgatatcctggtttcctctgcaagtggcaacagcaatgaattagccttgaaattagcaggtcttgatatcaacaagacagaaggtgaagaagatgcacaacgaagttctacagaacaaagtggggaagcccagggagaagcagcaaaatctgaaagctaacaccccactttgaccctcgaccacacctgaaaatgtctcaaatctccaggagtatctggaatgcatttgtttccatgagtgaaaagaggaaaaagaaaatggctgtgctgcattgcaggaacctgctcattatcatgttaaaaatgagggcagaggctgtggctgcaggcagacttttccctacctctgtcattagcaatggttgaaatcatgtggcttgtgtttgggcgtcatttttgtatggatcctttcacttgatcatatgacgaaatgcttatagagagtagctccgacctagatgatgattcttcctgtagcatctggcccctcacaatgtcagaggatttaattgtgtctaattgcgaagggttgattgaaccccagagtttaaatatctctggctcaagtgttcacccagtaaaagaaagatccagaaagcactgtttttagcattacgtatctgtgtgttactgctgtgttatttacactgttttgtattgtacaatatatatgctcagcactgcccccttctctgattgcttatgaaaaacaaaatgatgtacattactgtgaatttttataccactcatttttaaaagggctgtcttttcattttagttttccatactgtggtggtgtacacaggatagaacacccttttttaaaacacagtctttccccttgctcattgtatgttgatgagttgattaagtctaacagattcatcaagactccattgctttattatagagacatttgaaaatatccattaatgtgaatatcacctgaattcagtctgtttggtgtctgcacagactggaattcaatctgtcaaatttgttttattctcaagtggagaacttctcccacataatatatatatatatatatattttaatttatgagaattttggacaattggaaaggtagaaaagaaaagccaagatcatactaaggactggaaatattttgttctatggaatcaaatttctcacaatgctgtatgatactatttaaatttggaggacaacttatcttcactaagctgaatcaggtggagaaagtaatctccttgcaatcatgtggacaccaatcacaaaagtaaagccctggtgttgtgttttcatgtcttttttcagccctctcagatccaaatgttattatgcactttttaatgtttgtaaacttttactaataattagtgtgaattgcattctgatacaataatgattatcattagaagctaacaaaattctcattaatactgtgtttgatggcctctgctgtgttttaacatcgtgcttcttatatggaaagtttttgtgagctgtgtaatccctctggtcagtattatgaaatcatttgtcagtggtaataaataaggaaccagta

SEQ ID NO: 459208 - DNA, 3092 bp, Homo sapiens
  misc_feature (65)..(65): n is a, c, g, or t
  misc_feature (67)..(67): n is a, c, g, or t
gagagagagagagagagagagagagagagagagagagagagagagagagagagagagagagagangnggaaagcactgtttttagcattacgtatctgtgtgttactgctgtgttatttacactgttttgtattgtacaatatatatgctcagcactgcccccttctctgattgcttatgaaaaacaaaatgatgtacattactgtgaatttttataccactcatttttaaaagggctgtcttttcattttagttttccatactgtggtggtgtacacaggatagaacacccttttttaaaacacagtctttccccttgctcattgtatgttgatgagttgattaagtctaacagattcatcaagactccattgctttattatagagacatttgaaaatatccattaatgtgaatatcacctgaattcagtctgtttggtgtctgcacagactggaattcaatctgtcaaatttgttttattctcaagtggagaacttctcccacataatatatatatatatatatattttaatttatgagaattttggacaattggaaaggtagaaaagaaaagccaagatcatactaaggactggaaatattttgttctatggaatcaaatttctcacaatgctgtatgatactatttaaatttggaggacaacttatcttcactaagctgaatcaggtggagaaagtaatctccttgcaatcatgtggacaccaatcacaaaagtaaagccctggtgttgtgttttcatgtcttttttcagccctctcagatccaaatgttattatgcactttttaatgtttgtaaacttttactaataattagtgtgaattgcattctgatacaataatgattatcattagaagctaacaaaattctcattaatactgtgtttgatggcctctgctgtgttttaacatcgtgcttcttatatggaaagtttttgtgagctgtgtaatccctctggtcagtattatgaaatcatttgtcagtggtaataaataaggaaccagtaatatgccaatggttcatgaattactggacaaatagcagacaatgggagtccctttacaataacgagcccacttagctgtccttgagggcttagataccttgccacgtgaagtaggtagagcagcatttcaataggtaatttgtgtggttgtgccagaaactcagcccttctatgtaattacatacaggataaaaggtaagtctgctcacttctccttctacagggcatttcaactgactggaataagggcatggttgcatttagtactcaatcagatattactagaaaaaaaattaataatgtgagcctttccgagagcagaacgaggaaagattaaattttagaatgcttccttctgtctaatccatcaggggccaaaatgcccagtaaaattcaaacacatcacctattaatagacttacaagtgagaaaagaggttcctagggttattttaggcaatccctggtaaactgtttaaaccatcaaacccctacagtcagttttcagtatcctcatttaatattttaataggtttcttgtgaatttaaacttctcttctttcttaaggttgtgaaattccaaactgattttatgtgattttgaaaagtttagaaccagtgctgagtctatgtggagggtttatattcctatgtgatatactgttattaatgcatgtggtgccatgcttgtctttaaatatataaatagtgctaaattgcaaagtcatatggagctttggatttagtttgacttcttactactgctttgtctgctatattcaaacccaaaggcattcccaagctagggagataaaaattaattttctaaaatgtccacatcctatacatttgcttattcatggcatctttcaaattttattttagtttcctttatttgccaagaatacatatggatttgaatttttaaggagagaaggaaagggtaggaaaccagggccttgggtttagtaacaggcattggatgtctattaaccaactattcttacgctaatggctttgcagctcctattctcccatttgatcctcaaacaattctattagagtggtatttttatccaatttcacagattaaaatataagcactcaataaaatataacctttagaagcttaaaaagctagtaagtgatgaactgaggatttgaacccatgtttgtcaccaaggagctttccagggcacatgtcataaaattagagccaactgcagagctgtaagggaacttttagagatgaacttcttcagcctccatattttacagaaggaaactgaatcccagaaggagaaattgccgttctcaaggctccctggatgggtaataacacagatatgagtaggtcacataaagtatatcttttttaaaaaaaagaaattcaattatgtcttatttggggggtatatttcccagaagatatttttctggcatgtggtctgtaaacacagcatgattcatattttttatgtttcatgctactcatttgtttaattaccaacaaacatggggactttggctttttgacttatttgcaacaagcatgaaattgttaaatttaccttttatcaattgtaatcatcctatgccaacatattatcataaattcatagaaatatttttaaaaataaataacagacattgaaatccaattcttagataatactcccagaacagccaatggtaaatgccctatacttgagtcttacttagatgctgtggtaatgcaccattttagaagatgaatgatactgctatttctcttcagggaaacaataatggataaagaaatgtaactgccgggcagcaaagcttctaagtgaaacctgtagtagcagtagtagtagggagaaaatgtgtagtcatcaagtgaaaataggaaaggatctatgatttatgatgtcttaatagaccctaaattgttctttaattacaagagtggcagtctctgaagtcatttgtgagcttgtatgacttttgtatttagcaatgttgcatgctcacataattgaaaattaaaagtaacacatttttctgaaatgtaaaaaaaagataaa

SEQ ID NO: 459209 - DNA, 4162 bp, Homo sapiens
gaattccgcgctttgcagagaaagcccccctggctcttctctctcaatccataatccagcgatgctgcagctgtaaaagcattaatagaaaatcaatccacaacctcgcggggcagcgatcgtcgagcgccgtttccaggctgccttccctggggtcgggagcggccccgctccccccgtggctggcgcgaaatgtggtgatccgtcccggggcggggatgacttcatgcagccggagctccgcggcgggagcggaggctgctgctggcaggtggggcgcgggccggcgcgagctgaccgagcactcggcgggcgcggcgggactgcggcccgtggcggcgtgcgcggggacctgcgctgactaggtccggggaagtttcctgactttctgagaagccctggtttccccaaagaagtgatttctgatagaaatctgaaggtcatctccaagaaaaaagagatctagtatagtcaatgaattaaagacaagaaggtttccaatcagtccctgctatgtggatatttggtagcaatgactgatgtggaaactacatatgcagattttattgcttcaggaagaacaggtagaagaaatgcaatacatgatatcctggtttcctctgcaagtggcaacagcaatgaattagccttgaaattagcaggtcttgatatcaacaagacagaaggtgaagaagatgcacaacgaagttctacagaacaaagtggggaagcccagggagaagcagcaaaatctgaaagctaacaccccactttgaccctcgaccacacctgaaaatgtctcaaatctccaggagtatctggaatgcatttgtttccatgagtgaaaagaggaaaaagaaaatggctgtgctgcattgcaggaacctgctcattatcatgttaaaaatgagggcagaggctgtggctgcaggcagacttttccctacctctgtcattagcaatggttgaaatcatgtggcttgtgtttgggcgtcatttttgtatggatcctttcacttgatcatatgacgaaatgcttatagagagtagctccgacctagatgatgattcttcctgtagcatctggcccctcacaatgtcagaggatttaattgtgtctaattgcgaagggttgattgaaccccagagtttaaatatctctggctcaagtgttcacccagtaaaagaaagatccagaaagcactgtttttagcattacgtatctgtgtgttactgctgtgttatttacactgttttgtattgtacaatatatatgctcagcactgcccccttctctgattgcttatgaaaaacaaaatgatgtacattactgtgaatttttataccactcatttttaaaagggctgtcttttcattttagttttccatactgtggtggtgtacacaggatagaacacccttttttaaaacacagtctttccccttgctcattgtatgttgatgagttgattaagtctaacagattcatcaagactccattgctttattatagagacatttgaaaatatccattaatgtgaatatcacctgaattcagtctgtttggtgtctgcacagactggaattcaatctgtcaaatttgttttattctcaagtggagaacttctcccacataatatatatatatatatatattttaatttatgagaattttggacaattggaaaggtagaaaagaaaagccaagatcatactaaggactggaaatattttgttctatggaatcaaatttctcacaatgctgtatgatactatttaaatttggaggacaacttatcttcactaagctgaatcaggtggagaaagtaatctccttgcaatcatgtggacaccaatcacaaaagtaaagccctggtgttgtgttttcatgtcttttttcagccctctcagatccaaatgttattatgcactttttaatgtttgtaaacttttactaataattagtgtgaattgcattctgatacaataatgattatcattagaagctaacaaaattctcattaatactgtgtttgatggcctctgctgtgttttaacatcgtgcttcttatatggaaagtttttgtgagctgtgtaatccctctggtcagtattatgaaatcatttgtcagtggtaataaataaggaaccagtaatatgccaatggttcatgaattactggacaaatagcagacaatgggagtccctttacaataacgagcccacttagctgtccttgagggcttagataccttgccacgtgaagtaggtagagcagcatttcaataggtaatttgtgtggttgtgccagaaactcagcccttctatgtaattacatacaggataaaaggtaagtctgctcacttctccttctacagggcatttcaactgactggaataagggcatggttgcatttagtactcaatcagatattactagaaaaaaaattaataatgtgagcctttccgagagcagaacgaggaaagattaaattttagaatgcttccttctgtctaatccatcaggggccaaaatgcccagtaaaattcaaacacatcacctattaatagacttacaagtgagaaaagaggttcctagggttattttaggcaatccctggtaaactgtttaaaccatcaaacccctacagtcagttttcagtatcctcatttaatattttaataggtttcttgtgaatttaaacttctcttctttcttaaggttgtgaaattccaaactgattttatgtgattttgaaaagtttagaaccagtgctgagtctatgtggagggtttatattcctatgtgatatactgttattaatgcatgtggtgccatgcttgtctttaaatatataaatagtgctaaattgcaaagtcatatggagctttggatttagtttgacttcttactactgctttgtctgctatattcaaacccaaaggcattcccaagctagggagataaaaattaattttctaaaatgtccacatcctatacatttgcttattcatggcatctttcaaattttattttagtttcctttatttgccaagaatacatatggatttgaatttttaaggagagaaggaaagggtaggaaaccagggccttgggtttagtaacaggcattggatgtctattaaccaactattcttacgctaatggctttgcagctcctattctcccatttgatcctcaaacaattctattagagtggtatttttatccaatttcacagattaaaatataagcactcaataaaatataacctttagaagcttaaaaagctagtaagtgatgaactgaggatttgaacccatgtttgtcaccaaggagctttccagggcacatgtcataaaattagagccaactgcagagctgtaagggaacttttagagatgaacttcttcagcctccatattttacagaaggaaactgaatcccagaaggagaaattgccgttctcaaggctccctggatgggtaataacacagatatgagtaggtcacataaagtatatatatttttctggcatgtggtctgtaaacacagcatgattcatattttttatgtttcatgctactcatttgtttaattaccaacaaacatggggactttggctttttgacttatttgcaacaagcatgaaattgttaaatttaccttttatcaattgtaatcatcctatgccaacatattatcataaattcatagaaatatttttaaaaataaataacagacattgaaatccaattcttagataatactcccagaacagccaatggtaaatgccctatacttgagtcttacttagatgctgtggtaatgcaccattttagaagatgaatgatactgctatttctcttcagggaaacaataatggataaagaaatgtaactgccgggcagcaaagcttctaagtgaaacctgtagtagcagtagtagtagggagaaaatgtgtagtcatcaagtgaaaataggaaaggatctatgatttatgatgtcttaatagaccctaaattgttctttaattacaagagtggcagtctctgaagtcatttgtgagcttgtatgacttttgtatttagcaatgttgcatgctcacataattgaaaattaaaagtaacacatttttctgaaatgtaaaaaaaagataaa

SEQ ID NO: 459210 - DNA, 3769 bp, Homo sapiens
caacttctagaatccatcgatgtggaacacttcagtttgtttaacgtaggagactccctgctatgtggatatttggtagcaatgactgatgtggaaactacatatgcagattttattgcttcaggaagaacaggtagaagaaatgcaatacatgatatcctggtttcctctgcaagtggcaacagcaatgaattagccttgaaattagcaggtcttgatatcaacaagacagaaggtgaagaagatgcacaacgaagttctacagaacaaagtggggaagcccagggagaagcagcaaaatctgaaagctaacaccccactttgaccctcgaccacacctgaaaatgtctcaaatctccaggagtatctggaatgcatttgtttccatgagtgaaaagaggaaaaagaaaatggctgtgctgcattgcaggaacctgctcattatcatgttaaaaatgagggcagaggctgtggctgcaggcagacttttccctacctctgtcattagcaatggttgaaatcatgtggcttgtgtttgggcgtcatttttgtatggatcctttcacttgatcatatgacgaaatgcttatagagagtagctccgacctagatgatgattcttcctgtagcatctggcccctcacaatgtcagaggatttaattgtgtctaattgcgaagggttgattgaaccccagagtttaaatatctctggctcaagtgttcacccagtaaaagaaagatccagaaagcactgtttttagcattacgtatctgtgtgttactgctgtgttatttacactgttttgtattgtacaatatatatgctcagcactgcccccttctctgattgcttatgaaaaacaaaatgatgtacattactgtgaatttttataccactcatttttaaaagggctgtcttttcattttagttttccatactgtggtggtgtacacaggatagaacacccttttttaaaacacagtctttccccttgctcattgtatgttgatgagttgattaagtctaacagattcatcaagactccattgctttattatagagacatttgaaaatatccattaatgtgaatatcacctgaattcagtctgtttggtgtctgcacagactggaattcaatctgtcaaatttgttttattctcaagtggagaacttctcccacataatatatatatatatatatattttaatttatgagaattttggacaattggaaaggtagaaaagaaaagccaagatcatactaaggactggaaatattttgttctatggaatcaaatttctcacaatgctgtatgatactatttaaatttggaggacaacttatcttcactaagctgaatcaggtggagaaagtaatctccttgcaatcatgtggacaccaatcacaaaagtaaagccctggtgttgtgttttcatgtcttttttcagccctctcagatccaaatgttattatgcactttttaatgtttgtaaacttttactaataattagtgtgaattgcattctgatacaataatgattatcattagaagctaacaaaattctcattaatactgtgtttgatggcctctgctgtgttttaacatcgtgcttcttatatggaaagtttttgtgagctgtgtaatccctctggtcagtattatgaaatcatttgtcagtggtaataaataaggaaccagtaatatgccaatggttcatgaattactggacaaatagcagacaatgggagtccctttacaataacgagcccacttagctgtccttgagggcttagataccttgccacgtgaagtaggtagagcagcatttcaataggtaatttgtgtggttgtgccagaaactcagcccttctatgtaattacatacaggataaaaggtaagtctgctcacttctccttctacagggcatttcaactgactggaataagggcatggttgcatttagtactcaatcagatattactagaaaaaaaattaataatgtgagcctttccgagagcagaacgaggaaagattaaattttagaatgcttccttctgtctaatccatcaggggccaaaatgcccagtaaaattcaaacacatcacctattaatagacttacaagtgagaaaagaggttcctagggttattttaggcaatccctggtaaactgtttaaaccatcaaacccctacagtcagttttcagtatcctcatttaatattttaataggtttcttgtgaatttaaacttctcttctttcttaaggttgtgaaattccaaactgattttatgtgattttgaaaagtttagaaccagtgctgagtctatgtggagggtttatattcctatgtgatatactgttattaatgcatgtggtgccatgcttgtctttaaatatataaatagtgctaaattgcaaagtcatatggagctttggatttagtttgacttcttactactgctttgtctgctatattcaaacccaaaggcattcccaagctagggagataaaaattaattttctaaaatgtccacatcctatacatttgcttattcatggcatctttcaaattttattttagtttcctttatttgccaagaatacatatggatttgaatttttaaggagagaaggaaagggtaggaaaccagggccttgggtttagtaacaggcattggatgtctattaaccaactattcttacgctaatggctttgcagctcctattctcccatttgatcctcaaacaattctattagagtggtatttttatccaatttcacagattaaaatataagcactcaataaaatataacctttagaagcttaaaaagctagtaagtgatgaactgaggatttgaacccatgtttgtcaccaaggagctttccagggcacatgtcataaaattagagccaactgcagagctgtaagggaacttttagagatgaacttcttcagcctccatattttacagaaggaaactgaatcccagaaggagaaattgccgttctcaaggctccctggatgggtaataacacagatatgagtaggtcacataaagtatatcttttttaaaaaaaagaaattcaattatgtcttatttggggggtatatttcccagaagatatttttctggcatgtggtctgtaaacacagcatgattcatattttttatgtttcatgctactcatttgtttaattaccaacaaacatggggactttggctttttgacttatttgcaacaagcatgaaattgttaaatttaccttttatcaattgtaatcatcctatgccaacatattatcataaattcatagaaatatttttaaaaataaataacagacattgaaatccaattcttagataatactcccagaacagccaatggtaaatgccctatacttgagtcttacttagatgctgtggtaatgcaccattttagaagatgaatgatactgctatttctcttcagggaaacaataatggataaagaaatgtaactgccgggcagcaaagcttctaagtgaaacctgtagtagcagtagtagtagggagaaaatgtgtagtcatcaagtgaaaataggaaaggatctatgatttatgatgtcttaatagaccctaaattgttctttaattacaagagtggcagtctctgaagtcatttgtgagcttgtatgacttttgtatttagcaatgttgcatgctcacataattgaaaattaaaagtaacacatttttctgaaatgtaaaaaaaagataaa

SEQ ID NO: 459211 - DNA, 1359 bp, Homo sapiens
gaattccgcgctttgcagagaaagcccccctggctcttctctctcaatccataatccagcgatgctgcagctgtaaaagcattaatagaaaatcaatccacaacctcgcggggcagcgatcgtcgagcgccgtttccaggctgccttccctggggtcgggagcggccccgctccccccgtggctggcgcgaaatgtggtgatccgtcccggggcggggatgacttcatgcagccggagctccgcggcgggagcggaggctgctgctggcaggtggggcgcgggccggcgcgagctgaccgagcactcggcgggcgcggcgggactgcggcccgtggcggcgtgcgcggggacctgcgctgactaggtccggggaagtttcctgactttctgagaagccctggtttccccaaagaagtgatttctgatagaaatctgaaggtcatctccaagaaaaaagagatctagtatagtcaatgaattaaagacaagaaggtttccaatcagtccctgctatgtggatatttggtagcaatgactgatgtggaaactacatatgcagattttattgcttcaggaagaacaggtagaagaaatgcaatacatgatatcctggtttcctctgcaagtggcaacagcaatgaattagccttgaaattagcaggtcttgatatcaacaagacagaaggtgaagaagatgcacaacgaagttctacagaacaaagtggggaagcccagggagaagcagcaaaatctgaaagctaacaccccactttgaccctcgaccacacctgaaaatgtctcaaatctccaggagtatctggaatgcatttgtttccatgagtgaaaagaggaaaaagaaaatggctgtgctgcattgcaggaacctgctcattatcatgttaaaaatgagggcagaggctgtggctgcaggcagacttttccctacctctgtcattagcaatggttgaaatcatgtggcttgtgtttgggcgtcatttttgtatggatcctttcacttgatcatatgacaccattttagaagatgaatgatactgctatttctcttcagggaaacaataatggataaagaaatgtaactgccgggcagcaaagcttctaagtgaaacctgtagtagcagtagtagtagggagaaaatgtgtagtcatcaagtgaaaataggaaaggatctatgatttatgatgtcttaatagaccctaaattgttctttaattacaagagtggcagtctctgaagtcatttgtgagcttgtatgacttttgtatttagcaatgttgcatgctcacataattgaaaattaaaagtaacacatttttctgaaatgtaaaaaaaagataaa

SEQ ID NO: 459212 - DNA, 2572 bp, Homo sapiens
ttcgcttgaacccgggaggcggagcttgcagtgagccgagatcgcgccatcacactccagctcaggcgacagagtgagactccgtctcaaagaaaaaaaacttgcagcctgatagttaagatacagcaaccccaaatccctatgctaaaaggtgagaatggcccagataaaggtcatgtctcctagctccctgctttttcatgccatcctccagaagggaagaaattaaataatccatcctcctactccaggcgactagaaggcaggctgcctcagggccacacactgggacttggactcaacctgatgggcttctgggcccagccccagacaaacccccggcaaacgtcccattccgaggaaagcatgagcagatggagtatggaagaaatgcccaagacggcaggcagcagctgtggcggccggcgggacgacaatccgaggagaggcctctgatgtcctgaggtctcagaggacgcctaaaggccttgaatgggacaagcttagcgggcgggcgcagaagagaataatactctggagacacttcccgagggctctggggccggagctgtgttcgctccggttcttggtgaagacagggttcgtgggaggcggcccaaggagggcgaacgcctaagactgcaaaggctcgggggagaacggctctcggagaacgggctggggaaggacgtggctctgaagacggacagccctgaggaaccgcggggcgcccagatggaactcgttagcgccccgagtgcagacaatcccggagggggaaaggcgagcagctggcagagagcccagtgccggccaaccgcgcgagcgcctcagaacggcccgcccaccctgatttctcattggcgcctcctacctcctcctcggattggctacctctaggtgaaatgagcggtggttgagccctacttccggtggtgctgtggtctgcccctggagaacccagaagaacacagctgtgcgcgcccacaggctctgggggcgggagaagataagtcgcaaggagggggcgggacctacacctcaggaaagccggagaattggggcacgaagcggggctttgatgacccgcaaagggcgaggcatgcaggaggtggaggaattaagtgaaacagggaaggttgttaaacagcaccgtgtgggcgaggccttaagggtcgtggtccttgtctgggcggggtctttgggcgtcgacgaggcctggttctgggtaggcggggctactacggggcggtgcctgctgtggaaatgcctgcccgcgcgcttctgcccaggcgcatggggcatcgtactctagcctccactcctgccctgtgggcctccatcccgtgccctcgctctgagctgcgcctggacctggttctgccttctggacaatctttccggtggagggagcaaagtcctgcacactggagtggtgtactagcggatcaagtatggacactgactcagactgaggagcagctccactgcactgtgtaccgaggagacaagagccaggctagcaggcccacaccagacgagctggaggccgtgcgcaagtacttccagctagatgttaccctggctcaactgtatcaccactggggttccgtggactcccacttccaagaggtggctcagaaattccaaggtgtgcgactgctgcgacaagaccccatcgaatgccttttctcttttatctgttcctccaacaacaacatcgcccgcatcactggcatggtggagcggctgtgccaggcttttggacctcggctcatccagcttgatgatgtcacctaccatggcttccccagcctgcaggccctggctgggccagaggtggaggctcatctcaggaagctgggcctgggctatcgtgcccgttacgtgagtgccagtgcccgagccatcctggaagaacagggcgggctagcctggctgcagcagctacgagagtcctcatatgaggaggcccacaaggccctctgcatcctgcctggagtgggcaccaaggtggctgactgcatctgcctgatggccctagacaagccccaggctgtgcccgtggatgtccatatgtggcacattgcccaacgtgactacagctggcaccctaccacgtcccaggcgaagggaccgagcccccagaccaacaaggaactgggaaactttttccggagcctgtggggaccttatgctggctgggcccaagcgcaggtgctgttcagtgccgacctgcgccaatcccgccatgctcaggagccaccagcaaagcgcagaaagggttccaaagggccggaaggctagatggggcaccctggacaaagaaattccccaagcaccttcccctccattccccacttctctctccccatccccacccagtctcatgttggggaggggcctccctgtgactacctcaaaggccaggcacccccaaatcaagcagtcagtttgcacaacaagatggggtgggggatattgagggagacagcgctaaggatggttttatcttccctttattacaagaaggaacaataaaatagaaacatttgtatggaaaaaaaaaaga

SEQ ID NO: 459213 - DNA, 3143 bp, Homo sapiens
ttcgcttgaacccgggaggcggagcttgcagtgagccgagatcgcgccatcacactccagctcaggcgacagagtgagactccgtctcaaagaaaaaaaacttgcagcctgatagttaagatacagcaaccccaaatccctatgctaaaaggtgagaatggcccagataaaggtcatgtctcctagctccctgctttttcatgccatcctccagaagggaagaaattaaataatccatcctcctactccaggcgactagaaggcaggctgcctcagggccacacactgggacttggactcaacctgatgggcttctgggcccagccccagacaaacccccggcaaacgtcccattccgaggaaagcatgagcagatggagtatggaagaaatgcccaagacggcaggcagcagctgtggcggccggcgggacgacaatccgaggagaggcctctgatgtcctgaggtctcagaggacgcctaaaggccttgaatgggacaagcttagcgggcgggcgcagaagagaataatactctggagacacttcccgagggctctggggccggagctgtgttcgctccggttcttggtgaagacagggttcgtgggaggcggcccaaggagggcgaacgcctaagactgcaaaggctcgggggagaacggctctcggagaacgggctggggaaggacgtggctctgaagacggacagccctgaggaaccgcggggcgcccagatggaactcgttagcgccccgagtgcagacaatcccggagggggaaaggcgagcagctggcagagagcccagtgccggccaaccgcgcgagcgcctcagaacggcccgcccaccctgatttctcattggcgcctcctacctcctcctcggattggctacctctaggtgaaatgagcggtggttgagccctacttccggtggtgctgtggtctgcccctggagaacccagaagaacacagctgtgcgcgcccacaggctctgggggcgggagaagataagtcgcaaggagggggcgggacctacacctcaggaaagccggagaattggggcacgaagcggggctttgatgacccgcaaagggcgaggcatgcaggaggtggaggaattaagtgaaacagggaaggttgttaaacagcaccgtgtgggcgaggccttaagggtcgtggtccttgtctgggcggggtctttgggcgtcgacgaggcctggttctgggtaggcggggctactacggggcggtgcctgctgtggaaatgcctgcccgcgcgcttctgcccaggcgcatggggcatcgtactctagcctccactcctgccctgtgggcctccatcccgtgccctcgctctgagctgcgcctggacctggttctgccttctggacaatctttccggtggagggagcaaagtcctgcacactggagtggtgtactagcggatcaagtatggacactgactcagactgaggagcagctccactgcactgtgtaccgaggagacaagagccaggctagcaggcccacaccagacgagctggaggccgtgcgcaagtacttccagctagatgttaccctggctcaactgtatcaccactggggttccgtggactcccacttccaagaggtggctcagaaattccaaggtgtgcgactgctgcgacaagaccccatcgaatgccttttctcttttatctgttcctccaacaacaacatcgcccgcatcactggcatggtggagcggctgtgccaggcttttggacctcggctcatccagcttgatgatgtcacctaccatggcttccccagcctgcaggccctggctgggccagaggtggaggctcatctcaggaagctgggcctgggctatcgtgcccgttacgtgagtgccagtgcccgagccatcctggaagaacagggcgggctagcctggctgcagcagctacgagagtcctcatatgaggaggcccacaaggccctctgcatcctgcctggagtgggcaccaaggtggctgactgcatctgcctgatggccctagacaagccccaggctgtgcccgtggatgtccatatgtggcacattgcccaacgtgactacagctggcaccctaccacgtcccaggcgaagggaccgagcccccagaccaacaaggaactgggaaactttttccggagcctgtggggaccttatgctggctgggcccaagcgggcctccttggcaatgcatttgatggccaccagcttctgcgtcctcttatcttctgccaggatcacctccgagaaggcccccctatcgggagaggggattcacaaggtgaagaactggaaccccagcttccctccagcctctcctccattccctatgggttctgtgaccactgctggaccaaggacgtggatgaccctcccctagtcactcatccatcccctggctccagagatggtcacatgacccaggcctggccagtcaaagtagtctctcccctggccacagtaattggtcatgtgatgcaagccagcttactagcactttgagaatgagtctcctgttgagctggtaggatgtaagcctggagctaatggcgatcatctttgccaccacctggggagagcctgcttgggaatgaaattaacacaaaggaagtccaacctgagaaatggccaaatatatttcctgataacattatgtggccctctggatccagccatgcctgaggtctacccctgggcttttggattatgtgtacagttggttcatccctttttctgctaattcgagtcatggctaatttaacaccctttagaaccttaaagaaccatcagcatcacccgggaacttttttagaaatgcaaaatctctactgctttggatcctgggtcaaaaaaaagaaaaaaaaaagaaatgcaaaactttaggccctgccccagatttactaaatcaatctgcagtttaacaaaatcctcaggtgatttgtatgctcattgaactttaagaagcagtgttttagaacaggttcttaaaaaggaacaaataaactcatttaactaaagttaactgattaaagaggatttgctagggtattctttccacatctgtttgctttctctgggagaataagaagtcataagtcaaagaa

SEQ ID NO: 459214 - DNA, 3160 bp, Homo sapiens
ttcgcttgaacccgggaggcggagcttgcagtgagccgagatcgcgccatcacactccagctcaggcgacagagtgagactccgtctcaaagaaaaaaaacttgcagcctgatagttaagatacagcaaccccaaatccctatgctaaaaggtgagaatggcccagataaaggtcatgtctcctagctccctgctttttcatgccatcctccagaagggaagaaattaaataatccatcctcctactccaggcgactagaaggcaggctgcctcagggccacacactgggacttggactcaacctgatgggcttctgggcccagccccagacaaacccccggcaaacgtcccattccgaggaaagcatgagcagatggagtatggaagaaatgcccaagacggcaggcagcagctgtggcggccggcgggacgacaatccgaggagaggcctctgatgtcctgaggtctcagaggacgcctaaaggccttgaatgggacaagcttagcgggcgggcgcagaagagaataatactctggagacacttcccgagggctctggggccggagctgtgttcgctccggttcttggtgaagacagggttcgtgggaggcggcccaaggagggcgaacgcctaagactgcaaaggctcgggggagaacggctctcggagaacgggctggggaaggacgtggctctgaagacggacagccctgaggaaccgcggggcgcccagatggaactcgttagcgccccgagtgcagacaatcccggagggggaaaggcgagcagctggcagagagcccagtgccggccaaccgcgcgagcgcctcagaacggcccgcccaccctgatttctcattggcgcctcctacctcctcctcggattggctacctctaggtgaaatgagcggtggttgagccctacttccggtggtgctgtggtctgcccctggagaacccagaagaacacagctgtgcgcgcccacaggctctgggggcgggagaagataagtcgcaaggagggggcgggacctacacctcaggaaagccggagaattggggcacgaagcggggctttgatgacccgcaaagggcgaggcatgcaggaggtggaggaattaagtgaaacagggaaggttgttaaacagcaccgtgtgggcgaggccttaagggtcgtggtccttgtctgggcggggtctttgggcgtcgacgaggcctggttctgggtaggcggggctactacggggcggtgcctgctgtggaaatgcctgcccgcgcgcttctgcccaggcgcatggggcatcgtactctagcctccactcctgccctgtgggcctccatcccgtgccctcgctctgagctgcgcctggacctggttctgccttctggacaatctttccggtggagggagcaaagtcctgcacactggagtggtgtactagcggatcaagtatggacactgactcagactgaggagcagctccactgcactgtgtaccgaggagacaagagccaggctagcaggcccacaccagacgagctggaggccgtgcgcaagtacttccagctagatgttaccctggctcaactgtatcaccactggggttccgtggactcccacttccaagaggtggctcagaaattccaaggtgtgcgactgctgcgacaagaccccatcgaatgccttttctcttttatctgttcctccaacaacaacatcgcccgcatcactggcatggtggagcggctgtgccaggcttttggacctcggctcatccagcttgatgatgtcacctaccatggcttccccagcctgcaggccctggctgggccagaggtggaggctcatctcaggaagctgggcctgggctatcgtgcccgttacgtgagtgccagtgcccgagccatcctggaagaacagggcgggctagcctggctgcagcagctacgagagtcctcatatgaggaggcccacaaggccctctgcatcctgcctggagtgggcaccaaggtggctgactgcatctgcctgatggccctagacaagccccaggctgtgcccgtggatgtccatatgtggcacattgcccaacgtgactacagctggcaccctaccacgtcccaggcgaagggaccgagcccccagaccaacaaggaactgggaaactttttccggagcctgtggggaccttatgctggctgggcccaagcgctctgtcaggtcatcaccacttttatgacctttctcggaccccataggctggatcagatgcctcctgaagaattacagacttcttcctctagacttggagggcctccttggcaatgcatttgatggccaccagcttctgcgtcctcttatcttctgccaggatcacctccgagaaggcccccctatcgggagaggggattcacaaggtgaagaactggaaccccagcttccctccagcctctcctccattccctatgggttctgtgaccactgctggaccaaggacgtggatgaccctcccctagtcactcatccatcccctggctccagagatggtcacatgacccaggcctggccagtcaaagtagtctctcccctggccacagtaattggtcatgtgatgcaagccagcttactagcactttgagaatgagtctcctgttgagctggtaggatgtaagcctggagctaatggcgatcatctttgccaccacctggggagagcctgcttgggaatgaaattaacacaaaggaagtccaacctgagaaatggccaaatatatttcctgataacattatgtggccctctggatccagccatgcctgaggtctacccctgggcttttggattatgtgtacagttggttcatccctttttctgctaattcgagtcatggctaatttaacaccctttagaaccttaaagaaccatcagcatcacccgggaacttttttagaaatgcaaaatctctactgctttggatcctgggtcaaaaaaaagaaaaaaaaaagaaatgcaaaactttaggccctgccccagatttactaaatcaatctgcagtttaacaaaatcctcaggtgatttgtatgctcattgaactttaagaagcagtgttttagaacaggttcttaaaaaggaacaaataaactcatttaactaaagtta

SEQ ID NO: 459215 - DNA, 2859 bp, Homo sapiens
ttcgcttgaacccgggaggcggagcttgcagtgagccgagatcgcgccatcacactccagctcaggcgacagagtgagactccgtctcaaagaaaaaaaacttgcagcctgatagttaagatacagcaaccccaaatccctatgctaaaaggtgagaatggcccagataaaggtcatgtctcctagctccctgctttttcatgccatcctccagaagggaagaaattaaataatccatcctcctactccaggcgactagaaggcaggctgcctcagggccacacactgggacttggactcaacctgatgggcttctgggcccagccccagacaaacccccggcaaacgtcccattccgaggaaagcatgagcagatggagtatggaagaaatgcccaagacggcaggcagcagctgtggcggccggcgggacgacaatccgaggagaggcctctgatgtcctgaggtctcagaggacgcctaaaggccttgaatgggacaagcttagcgggcgggcgcagaagagaataatactctggagacacttcccgagggctctggggccggagctgtgttcgctccggttcttggtgaagacagggttcgtgggaggcggcccaaggagggcgaacgcctaagactgcaaaggctcgggggagaacggctctcggagaacgggctggggaaggacgtggctctgaagacggacagccctgaggaaccgcggggcgcccagatggaactcgttagcgccccgagtgcagacaatcccggagggggaaaggcgagcagctggcagagagcccagtgccggccaaccgcgcgagcgcctcagaacggcccgcccaccctgatttctcattggcgcctcctacctcctcctcggattggctacctctaggtgaaatgagcggtggttgagccctacttccggtggtgctgtggtctgcccctggagaacccagaagaacacagctgtgcgcgcccacaggctctgggggcgggagaagataagtcgcaaggagggggcgggacctacacctcaggaaagccggagaattggggcacgaagcggggctttgatgacccgcaaagggcgaggcatgcaggaggtggaggaattaagtgaaacagggaaggttgttaaacagcaccgtgtgggcgaggccttaagggtcgtggtccttgtctgggcggggtctttgggcgtcgacgaggcctggttctgggtaggcggggctactacggggcggtgcctgctgtggaaatgcctgcccgcgcgcttctgcccaggcgcatggggcatcgtactctagcctccactcctgccctgtgggcctccatcccgtgccctcgctctgagctgcgcctggacctggttctgccttctggacaatctttccggtggagggagcaaagtcctgcacactggagtggtgtactagcggatcaagtatggacactgactcagactgaggagcagctccactgcactgtgtaccgaggagacaagagccaggctagcaggcccacaccagacgagctggaggccgtgcgcaagtacttccagctagatgttaccctggctcaactgtatcaccactggggttccgtggactcccacttccaagaggtggctcagaaattccaaggtgtgcgactgctgcgacaagaccccatcgaatgccttttctcttttatctgttcctccaacaacaacatcgcccgcatcactggcatggtggagcggctgtgccaggcttttggacctcggctcatccagcttgatgatgtcacctaccatggcttccccagcctgcaggccctggctgggccagaggtggaggctcatctcaggaagctgggcctgggctatcgtgcccgttacgtgagtgccagtgcccgagccatcctggaagaacagggcgggctagcctggctgcagcagctacgagagtcctcatatgaggaggcccacaaggccctctgcatcctgcctggagtgggcaccaagggcctccttggcaatgcatttgatggccaccagcttctgcgtcctcttatcttctgccaggatcacctccgagaaggcccccctatcgggagaggggattcacaaggtgaagaactggaaccccagcttccctccagcctctcctccattccctatgggttctgtgaccactgctggaccaaggacgtggatgaccctcccctagtcactcatccatcccctggctccagagatggtcacatgacccaggcctggccagtcaaagtagtctctcccctggccacagtaattggtcatgtgatgcaagccagcttactagcactttgagaatgagtctcctgttgagctggtaggatgtaagcctggagctaatggcgatcatctttgccaccacctggggagagcctgcttgggaatgaaattaacacaaaggaagtccaacctgagaaatggccaaatatatttcctgataacattatgtggccctctggatccagccatgcctgaggtctacccctgggcttttggattatgtgtacagttggttcatccctttttctgctaattcgagtcatggctaatttaacaccctttagaaccttaaagaaccatcagcatcacccgggaacttttttagaaatgcaaaatctctactgctttggatcctgggtcaaaaaaaagaaaaaaaaaagaaatgcaaaactttaggccctgccccagatttactaaatcaatctgcagtttaacaaaatcctcaggtgatttgtatgctcattgaactttaagaagcagtgttttagaacaggttcttaaaaaggaacaaataaactcatttaactaaagtta

SEQ ID NO: 459216 - DNA, 2677 bp, Homo sapiens
ttcgcttgaacccgggaggcggagcttgcagtgagccgagatcgcgccatcacactccagctcaggcgacagagtgagactccgtctcaaagaaaaaaaacttgcagcctgatagttaagatacagcaaccccaaatccctatgctaaaaggtgagaatggcccagataaaggtcatgtctcctagctccctgctttttcatgccatcctccagaagggaagaaattaaataatccatcctcctactccaggcgactagaaggcaggctgcctcagggccacacactgggacttggactcaacctgatgggcttctgggcccagccccagacaaacccccggcaaacgtcccattccgaggaaagcatgagcagatggagtatggaagaaatgcccaagacggcaggcagcagctgtggcggccggcgggacgacaatccgaggagaggcctctgatgtcctgaggtctcagaggacgcctaaaggccttgaatgggacaagcttagcgggcgggcgcagaagagaataatactctggagacacttcccgagggctctggggccggagctgtgttcgctccggttcttggtgaagacagggttcgtgggaggcggcccaaggagggcgaacgcctaagactgcaaaggctcgggggagaacggctctcggagaacgggctggggaaggacgtggctctgaagacggacagccctgaggaaccgcggggcgcccagatggaactcgttagcgccccgagtgcagacaatcccggagggggaaaggcgagcagctggcagagagcccagtgccggccaaccgcgcgagcgcctcagaacggcccgcccaccctgatttctcattggcgcctcctacctcctcctcggattggctacctctaggtgaaatgagcggtggttgagccctacttccggtggtgctgtggtctgcccctggagaacccagaagaacacagctgtgcgcgcccacaggctctgggggcgggagaagataagtcgcaaggagggggcgggacctacacctcaggaaagccggagaattggggcacgaagcggggctttgatgacccgcaaagggcgaggcatgcaggaggtggaggaattaagtgaaacagggaaggttgttaaacagcaccgtgtgggcgaggccttaagggtcgtggtccttgtctgggcggggtctttgggcgtcgacgaggcctggttctgggtaggcggggctactacggggcggtgcctgctgtggaaatgcctgcccgcgcgcttctgcccaggcgcatggggcatcgtactctagcctccactcctgccctgtgggcctccatcccgtgccctcgctctgagctgcgcctggacctggttctgccttctggacaatctttccggtggagggagcaaagtcctgcacactggagtggtgtactagcggatcaagtatggacactgactcagactgaggagcagctccactgcactgtgtaccgaggagacaagagccaggctagcaggcccacaccagacgagctggaggccgtgcgcaagtacttccagctagatgttaccctggctcaactgtatcaccactggggttccgtggactcccacttccaagaggtggctcagaaattccaaggtgtgcgactgctgcgacaagaccccatcgaatgccttttctcttttatctgttcctccaacaacaacatcgcccgcatcactggcatggtggagcggctgtgccaggcttttggacctcggctcatccagcttgatgatgtcacctaccatggcttccccagcctgcaggccctggctgggcctccttggcaatgcatttgatggccaccagcttctgcgtcctcttatcttctgccaggatcacctccgagaaggcccccctatcgggagaggggattcacaaggtgaagaactggaaccccagcttccctccagcctctcctccattccctatgggttctgtgaccactgctggaccaaggacgtggatgaccctcccctagtcactcatccatcccctggctccagagatggtcacatgacccaggcctggccagtcaaagtagtctctcccctggccacagtaattggtcatgtgatgcaagccagcttactagcactttgagaatgagtctcctgttgagctggtaggatgtaagcctggagctaatggcgatcatctttgccaccacctggggagagcctgcttgggaatgaaattaacacaaaggaagtccaacctgagaaatggccaaatatatttcctgataacattatgtggccctctggatccagccatgcctgaggtctacccctgggcttttggattatgtgtacagttggttcatccctttttctgctaattcgagtcatggctaatttaacaccctttagaaccttaaagaaccatcagcatcacccgggaacttttttagaaatgcaaaatctctactgctttggatcctgggtcaaaaaaaagaaaaaaaaaagaaatgcaaaactttaggccctgccccagatttactaaatcaatctgcagtttaacaaaatcctcaggtgatttgtatgctcattgaactttaagaagcagtgttttagaacaggttcttaaaaaggaacaaataaactcatttaactaaagtta

SEQ ID NO: 459217 - DNA, 2421 bp, Homo sapiens
ttcgcttgaacccgggaggcggagcttgcagtgagccgagatcgcgccatcacactccagctcaggcgacagagtgagactccgtctcaaagaaaaaaaacttgcagcctgatagttaagatacagcaaccccaaatccctatgctaaaaggtgagaatggcccagataaaggtcatgtctcctagctccctgctttttcatgccatcctccagaagggaagaaattaaataatccatcctcctactccaggcgactagaaggcaggctgcctcagggccacacactgggacttggactcaacctgatgggcttctgggcccagccccagacaaacccccggcaaacgtcccattccgaggaaagcatgagcagatggagtatggaagaaatgcccaagacggcaggcagcagctgtggcggccggcgggacgacaatccgaggagaggcctctgatgtcctgaggtctcagaggacgcctaaaggccttgaatgggacaagcttagcgggcgggcgcagaagagaataatactctggagacacttcccgagggctctggggccggagctgtgttcgctccggttcttggtgaagacagggttcgtgggaggcggcccaaggagggcgaacgcctaagactgcaaaggctcgggggagaacggctctcggagaacgggctggggaaggacgtggctctgaagacggacagccctgaggaaccgcggggcgcccagatggaactcgttagcgccccgagtgcagacaatcccggagggggaaaggcgagcagctggcagagagcccagtgccggccaaccgcgcgagcgcctcagaacggcccgcccaccctgatttctcattggcgcctcctacctcctcctcggattggctacctctaggtgaaatgagcggtggttgagccctacttccggtggtgctgtggtctgcccctggagaacccagaagaacacagctgtgcgcgcccacaggctctgggggcgggagaagataagtcgcaaggagggggcgggacctacacctcaggaaagccggagaattggggcacgaagcggggctttgatgacccgcaaagggcgaggcatgcaggaggtggaggaattaagtgaaacagggaaggttgttaaacagcaccgtgtgggcgaggccttaagggtcgtggtccttgtctgggcggggtctttgggcgtcgacgaggcctggttctgggtaggcggggctactacggggcggtgcctgctgtggaaatgcctgcccgcgcgcttctgcccaggcgcatggggcatcgtactctagcctccactcctgccctgtgggcctccatcccgtgccctcgctctgagctgcgcctggacctggttctgccttctggacaatctttccggtggagggagcaaagtcctgcacactggagtggtgtactagcggatcaagtatggacactgactcagactgaggagcagctccactgcactgtgtaccgaggagacaagagccaggctagcaggcccacaccagacgagctggaggccgtgcgcaagtacttccagctagatgttaccctggctcaactgtatcaccactggggttccgtggactcccacttccaagaggtggctcagaaattccaaggtgtgcgactgctgcgacaagaccccatcgaatgccttttctcttttatctgttcctccaacaacaacatcgcccgcatcactggcatggtggagcggctgtgccaggcttttggacctcggctcatccagcttgatgatgtcacctaccatggcttccccagcctgcaggccctggctgggccagaggtggaggctcatctcaggaagctgggcctgggctatcgtgcccgttacgtgagtgccagtgcccgagccatcctggaagaacagggcgggctagcctggctgcagcagctacgagagtcctcatatgaggaggcccacaaggccctctgcatcctgcctggagtgggcaccaaggaaactttttccggagcctgtggggaccttatgctggctgggcccaagcgcaggtgctgttcagtgccgacctgcgccaatcccgccatgctcaggagccaccagcaaagcgcagaaagggttccaaagggccggaaggctagatggggcaccctggacaaagaaattccccaagcaccttcccctccattccccacttctctctccccatccccacccagtctcatgttggggaggggcctccctgtgactacctcaaaggccaggcacccccaaatcaagcagtcagtttgcacaacaagatggggtgggggatattgagggagacagcgctaaggatggttttatcttccctttattacaagaaggaacaataaaatagaaacatttgtatggaaaaaaaaaaga

SEQ ID NO: 459218 - DNA, 2128 bp, Homo sapiens
ttcgcttgaacccgggaggcggagcttgcagtgagccgagatcgcgccatcacactccagctcaggcgacagagtgagactccgtctcaaagaaaaaaaacttgcagcctgatagttaagatacagcaaccccaaatccctatgctaaaaggtgagaatggcccagataaaggtcatgtctcctagctccctgctttttcatgccatcctccagaagggaagaaattaaataatccatcctcctactccaggcgactagaaggcaggctgcctcagggccacacactgggacttggactcaacctgatgggcttctgggcccagccccagacaaacccccggcaaacgtcccattccgaggaaagcatgagcagatggagtatggaagaaatgcccaagacggcaggcagcagctgtggcggccggcgggacgacaatccgaggagaggcctctgatgtcctgaggtctcagaggacgcctaaaggccttgaatgggacaagcttagcgggcgggcgcagaagagaataatactctggagacacttcccgagggctctggggccggagctgtgttcgctccggttcttggtgaagacagggttcgtgggaggcggcccaaggagggcgaacgcctaagactgcaaaggctcgggggagaacggctctcggagaacgggctggggaaggacgtggctctgaagacggacagccctgaggaaccgcggggcgcccagatggaactcgttagcgccccgagtgcagacaatcccggagggggaaaggcgagcagctggcagagagcccagtgccggccaaccgcgcgagcgcctcagaacggcccgcccaccctgatttctcattggcgcctcctacctcctcctcggattggctacctctaggtgaaatgagcggtggttgagccctacttccggtggtgctgtggtctgcccctggagaacccagaagaacacagctgtgcgcgcccacaggctctgggggcgggagaagataagtcgcaaggagggggcgggacctacacctcaggaaagccggagaattggggcacgaagcggggctttgatgacccgcaaagggcgaggcatgcaggaggtggaggaattaagtgaaacagggaaggttgttaaacagcaccgtgtgggcgaggccttaagggtcgtggtccttgtctgggcggggtctttgggcgtcgacgaggcctggttctgggtaggcggggctactacggggcggtgcctgctgtggaaatgcctgcccgcgcgcttctgcccaggcgcatggggcatcgtactctagcctccactcctgccctgtgggcctccatcccgtgccctcgctctgagctgcgcctggacctggttctgccttctggacaatctttccggtggagggagcaaagtcctgcacactggagtggtgtactagcggatcaagtatggacactgactcagactgaggagcagctccactgcactgtgtaccgaggagacaagagccaggctagcaggcccacaccagacgagctggaggccgtgcgcaagtacttccagctagatgttaccctggctcaactgtatcaccactggggttccgtggactcccacttccaagaggtggctcagaaattccaaggtgtgcgactgctgcgacaagaccccatcgaatgccttttctcttttatctgttcctccaacaacaacatcgcccgcatcactggcatggtggagcggctgtgccaggcttttggacctcggctcatccagcttgatgatgtcacctaccatggcttccccagcctgcaggccctggctgggccagaggtggaggctcatctcaggaagctgggcctgggctatcgtgcccgttacgtgagtgccagtgcccgagccatcctggaagaacagggcgggctagcctggctgcagcagctacgagagtcctcatatgaggaggcccacaaggccctctgcatcctgcctggagtgggcaccaaggcatgactgatgctgccatgatggccactagacatagcctcacggctgtgcccgtgatgtcatatgtgacatttacctacgtgctcctgcgtgctataaataatcctggagtcag

SEQ ID NO: 459219 - DNA, 2390 bp, Homo sapiens
ttcgcttgaacccgggaggcggagcttgcagtgagccgagatcgcgccatcacactccagctcaggcgacagagtgagactccgtctcaaagaaaaaaaacttgcagcctgatagttaagatacagcaaccccaaatccctatgctaaaaggtgagaatggcccagataaaggtcatgtctcctagctccctgctttttcatgccatcctccagaagggaagaaattaaataatccatcctcctactccaggcgactagaaggcaggctgcctcagggccacacactgggacttggactcaacctgatgggcttctgggcccagccccagacaaacccccggcaaacgtcccattccgaggaaagcatgagcagatggagtatggaagaaatgcccaagacggcaggcagcagctgtggcggccggcgggacgacaatccgaggagaggcctctgatgtcctgaggtctcagaggacgcctaaaggccttgaatgggacaagcttagcgggcgggcgcagaagagaataatactctggagacacttcccgagggctctggggccggagctgtgttcgctccggttcttggtgaagacagggttcgtgggaggcggcccaaggagggcgaacgcctaagactgcaaaggctcgggggagaacggctctcggagaacgggctggggaaggacgtggctctgaagacggacagccctgaggaaccgcggggcgcccagatggaactcgttagcgccccgagtgcagacaatcccggagggggaaaggcgagcagctggcagagagcccagtgccggccaaccgcgcgagcgcctcagaacggcccgcccaccctgatttctcattggcgcctcctacctcctcctcggattggctacctctaggtgaaatgagcggtggttgagccctacttccggtggtgctgtggtctgcccctggagaacccagaagaacacagctgtgcgcgcccacaggctctgggggcgggagaagataagtcgcaaggagggggcgggacctacacctcaggaaagccggagaattggggcacgaagcggggctttgatgacccgcaaagggcgaggcatgcaggaggtggaggaattaagtgaaacagggaaggttgttaaacagcaccgtgtgggcgaggccttaagggtcgtggtccttgtctgggcggggtctttgggcgtcgacgaggcctggttctgggtaggcggggctactacggggcggtgcctgctgtggaaatgcctgcccgcgcgcttctgcccaggcgcatggggcatcgtactctagcctccactcctgccctgtgggcctccatcccgtgccctcgctctgagctgcgcctggacctggttctgccttctggacaatctttccggtggagggagcaaagtcctgcacactggagtggtgtactagcggatcaagtatggacactgactcagactgaggagcagctccactgcactgtgtaccgaggagacaagagccaggctagcaggcccacaccagacgagctggaggccgtgcgcaagtacttccagctagatgttaccctggctcaactgtatcaccactggggttccgtggactcccacttccaagaggtggctcagaaattccaaggtgtgcgactgctgcgacaagaccccatcgaatgccttttctcttttatctgttcctccaacaacaacatcgcccgcatcactggcatggtggagcggctgtgccaggcttttggacctcggctcatccagcttgatgatgtcacctaccatggcttccccagcctgcaggccctggctggtggctgactgcatctgcctgatggccctagacaagccccaggctgtgcccgtggatgtccatatgtggcacattgcccaacgtgactacagctggcaccctaccacgtcccaggcgaagggaccgagcccccagaccaacaaggaactgggaaactttttccggagcctgtggggaccttatgctggctgggcccaagcgcaggtgctgttcagtgccgacctgcgccaatcccgccatgctcaggagccaccagcaaagcgcagaaagggttccaaagggccggaaggctagatggggcaccctggacaaagaaattccccaagcaccttcccctccattccccacttctctctccccatccccacccagtctcatgttggggaggggcctccctgtgactacctcaaaggccaggcacccccaaatcaagcagtcagtttgcacaacaagatggggtgggggatattgagggagacagcgctaaggatggttttatcttccctttattacaagaaggaacaataaaatagaaacatttgtatggaaaaaaaaaaga

SEQ ID NO: 459220 - DNA, 3440 bp, Homo sapiens
ttcgcttgaacccgggaggcggagcttgcagtgagccgagatcgcgccatcacactccagctcaggcgacagagtgagactccgtctcaaagaaaaaaaacttgcagcctgatagttaagatacagcaaccccaaatccctatgctaaaaggtgagaatggcccagataaaggtcatgtctcctagctccctgctttttcatgccatcctccagaagggaagaaattaaataatccatcctcctactccaggcgactagaaggcaggctgcctcagggccacacactgggacttggactcaacctgatgggcttctgggcccagccccagacaaacccccggcaaacgtcccattccgaggaaagcatgagcagatggagtatggaagaaatgcccaagacggcaggcagcagctgtggcggccggcgggacgacaatccgaggagaggcctctgatgtcctgaggtctcagaggacgcctaaaggccttgaatgggacaagcttagcgggcgggcgcagaagagaataatactctggagacacttcccgagggctctggggccggagctgtgttcgctccggttcttggtgaagacagggttcgtgggaggcggcccaaggagggcgaacgcctaagactgcaaaggctcgggggagaacggctctcggagaacgggctggggaaggacgtggctctgaagacggacagccctgaggaaccgcggggcgcccagatggaactcgttagcgccccgagtgcagacaatcccggagggggaaaggcgagcagctggcagagagcccagtgccggccaaccgcgcgagcgcctcagaacggcccgcccaccctgatttctcattggcgcctcctacctcctcctcggattggctacctctaggtgaaatgagcggtggttgagccctacttccggtggtgctgtggtctgcccctggagaacccagaagaacacagctgtgcgcgcccacaggctctgggggcgggagaagataagtcgcaaggagggggcgggacctacacctcaggaaagccggagaattggggcacgaagcggggctttgatgacccgcaaagggcgaggcatgcaggaggtggaggaattaagtgaaacagggaaggttgttaaacagcaccgtgtgggcgaggccttaagggtcgtggtccttgtctgggcggggtctttgggcgtcgacgaggcctggttctgggtaggcggggctactacggggcggtgcctgctgtggaaatgcctgcccgcgcgcttctgcccaggcgcatggggcatcgtactctagcctccactcctgccctgtgggcctccatcccgtgccctcgctctgagctgcgcctggacctggttctgccttctggacaatctttccgggtctcgctctgttgcccaggtaggaatgcagagaggcccattccagcctcgaccccccgggcgcagcctcccgagtagctgggactacaggtgtgcgccatgcccggttaaatttttgtattttttgtagaggtgaggtttcgccatgttgctcagactggaagatagcactgttacttgtattagtttcgtacatggagctattgtaggataggagggaccccaaagggtgcaagaaaggaaattgagtgccagggttgtcatgtgccttgggctcaggtggagggagcaaagtcctgcacactggagtggtgtactagcggatcaagtatggacactgactcagactgaggagcagctccactgcactgtgtaccgaggagacaagagccaggctagcaggcccacaccagacgagctggaggccgtgcgcaagtacttccagctagatgttaccctggctcaactgtatcaccactggggttccgtggactcccacttccaagaggtggctcagaaattccaaggtgtgcgactgctgcgacaagaccccatcgaatgccttttctcttttatctgttcctccaacaacaacatcgcccgcatcactggcatggtggagcggctgtgccaggcttttggacctcggctcatccagcttgatgatgtcacctaccatggcttccccagcctgcaggccctggctgggccagaggtggaggctcatctcaggaagctgggcctgggctatcgtgcccgttacgtgagtgccagtgcccgagccatcctggaagaacagggcgggctagcctggctgcagcagctacgagagtcctcatatgaggaggcccacaaggccctctgcatcctgcctggagtgggcaccaaggtggctgactgcatctgcctgatggccctagacaagccccaggctgtgcccgtggatgtccatatgtggcacattgcccaacgtgactacagctggcaccctaccacgtcccaggcgaagggaccgagcccccagaccaacaaggaactgggaaactttttccggagcctgtggggaccttatgctggctgggcccaagcgctctgtcaggtcatcaccacttttatgacctttctcggaccccataggctggatcagatgcctcctgaagaattacagacttcttcctctagacttggagggcctccttggcaatgcatttgatggccaccagcttctgcgtcctcttatcttctgccaggatcacctccgagaaggcccccctatcgggagaggggattcacaaggtgaagaactggaaccccagcttccctccagcctctcctccattccctatgggttctgtgaccactgctggaccaaggacgtggatgaccctcccctagtcactcatccatcccctggctccagagatggtcacatgacccaggcctggccagtcaaagtagtctctcccctggccacagtaattggtcatgtgatgcaagccagcttactagcactttgagaatgagtctcctgttgagctggtaggatgtaagcctggagctaatggcgatcatctttgccaccacctggggagagcctgcttgggaatgaaattaacacaaaggaagtccaacctgagaaatggccaaatatatttcctgataacattatgtggccctctggatccagccatgcctgaggtctacccctgggcttttggattatgtgtacagttggttcatccctttttctgctaattcgagtcatggctaatttaacaccctttagaaccttaaagaaccatcagcatcacccgggaacttttttagaaatgcaaaatctctactgctttggatcctgggtcaaaaaaaagaaaaaaaaaagaaatgcaaaactttaggccctgccccagatttactaaatcaatctgcagtttaacaaaatcctcaggtgatttgtatgctcattgaactttaagaagcagtgttttagaacaggttcttaaaaaggaacaaataaactcatttaactaaagtta

SEQ ID NO: 459221 - DNA, 2477 bp, Homo sapiens
ttcgcttgaacccgggaggcggagcttgcagtgagccgagatcgcgccatcacactccagctcaggcgacagagtgagactccgtctcaaagaaaaaaaacttgcagcctgatagttaagatacagcaaccccaaatccctatgctaaaaggtgagaatggcccagataaaggtcatgtctcctagctccctgctttttcatgccatcctccagaagggaagaaattaaataatccatcctcctactccaggcgactagaaggcaggctgcctcagggccacacactgggacttggactcaacctgatgggcttctgggcccagccccagacaaacccccggcaaacgtcccattccgaggaaagcatgagcagatggagtatggaagaaatgcccaagacggcaggcagcagctgtggcggccggcgggacgacaatccgaggagaggcctctgatgtcctgaggtctcagaggacgcctaaaggccttgaatgggacaagcttagcgggcgggcgcagaagagaataatactctggagacacttcccgagggctctggggccggagctgtgttcgctccggttcttggtgaagacagggttcgtgggaggcggcccaaggagggcgaacgcctaagactgcaaaggctcgggggagaacggctctcggagaacgggctggggaaggacgtggctctgaagacggacagccctgaggaaccgcggggcgcccagatggaactcgttagcgccccgagtgcagacaatcccggagggggaaaggcgagcagctggcagagagcccagtgccggccaaccgcgcgagcgcctcagaacggcccgcccaccctgatttctcattggcgcctcctacctcctcctcggattggctacctctaggtgaaatgagcggtggttgagccctacttccggtggtgctgtggtctgcccctggagaacccagaagaacacagctgtgcgcgcccacaggctctgggggcgggagaagataagtcgcaaggagggggcgggacctacacctcaggaaagccggagaattggggcacgaagcggggctttgatgacccgcaaagggcgaggcatgcaggaggtggaggaattaagtgaaacagggaaggttgttaaacagcaccgtgtgggcgaggccttaagggtcgtggtccttgtctgggcggggtctttgggcgtcgacgaggcctggttctgggtaggcggggctactacggggcggtgcctgctgtggaaatgcctgcccgcgcgcttctgcccaggcgcatggggcatcgtactctagcctccactcctgccctgtgggcctccatcccgtgccctcgctctgagctgcgcctggacctggttctgccttctggacaatctttccggtggagggagcaaagtcctgcacactggagtggtgtactagcggatcaagtatggacactgactcagactgaggagcagctccactgcactgtgtaccgaggagacaagagccaggctagcaggcccacaccagacgagctggaggccgtgcgcaagtacttccagctagatgttaccctggctcaactgtatcaccactggggttccgtggactcccacttccaagaggtggctcagaaattccaaggtgtgcgactgctgcgacaagaccccatcgaatgccttttctcttttatctgttcctccaacaacaacatcgcccgcatcactggcatggtggagcggctgtgccaggcttttggacctcggctcatccagcttgatgatgtcacctaccatggcttccccagcctgcaggccctggctggaaactttttccggagcctgtggggaccttatgctggctgggcccaagcggtgagtgtacctaggtgtcctccctaggtttcctctcctccagcccagacccagtggactcttccaccaccgccccaggtggccctaaaggactctccagccacccctgtcccaaccccagtggattctcattgccttcggccctgttccccaaggactcttccacctcccaacactgtcactagtctcaccagccctgaccccagtgtaccctcctccccacacagactccaccctccaggtgctgttcagtgccgacctgcgccaatcccgccatgctcaggagccaccagcaaagcgcagaaagggttccaaagggccggaaggctagatggggcaccctggacaaagaaattccccaagcaccttcccctccattccccacttctctctccccatccccacccagtctcatgttggggaggggcctccctgtgactacctcaaaggccaggcacccccaaatcaagcagtcagtttgcacaacaagatggggtgggggatattgagggagacagcgctaaggatggttttatcttccctttattacaagaaggaacaataaaatagaaacatttgtatggaaaaaaaaaaga

SEQ ID NO: 459222 - DNA, 2239 bp, Homo sapiens
ttcgcttgaacccgggaggcggagcttgcagtgagccgagatcgcgccatcacactccagctcaggcgacagagtgagactccgtctcaaagaaaaaaaacttgcagcctgatagttaagatacagcaaccccaaatccctatgctaaaaggtgagaatggcccagataaaggtcatgtctcctagctccctgctttttcatgccatcctccagaagggaagaaattaaataatccatcctcctactccaggcgactagaaggcaggctgcctcagggccacacactgggacttggactcaacctgatgggcttctgggcccagccccagacaaacccccggcaaacgtcccattccgaggaaagcatgagcagatggagtatggaagaaatgcccaagacggcaggcagcagctgtggcggccggcgggacgacaatccgaggagaggcctctgatgtcctgaggtctcagaggacgcctaaaggccttgaatgggacaagcttagcgggcgggcgcagaagagaataatactctggagacacttcccgagggctctggggccggagctgtgttcgctccggttcttggtgaagacagggttcgtgggaggcggcccaaggagggcgaacgcctaagactgcaaaggctcgggggagaacggctctcggagaacgggctggggaaggacgtggctctgaagacggacagccctgaggaaccgcggggcgcccagatggaactcgttagcgccccgagtgcagacaatcccggagggggaaaggcgagcagctggcagagagcccagtgccggccaaccgcgcgagcgcctcagaacggcccgcccaccctgatttctcattggcgcctcctacctcctcctcggattggctacctctaggtgaaatgagcggtggttgagccctacttccggtggtgctgtggtctgcccctggagaacccagaagaacacagctgtgcgcgcccacaggctctgggggcgggagaagataagtcgcaaggagggggcgggacctacacctcaggaaagccggagaattggggcacgaagcggggctttgatgacccgcaaagggcgaggcatgcaggaggtggaggaattaagtgaaacagggaaggttgttaaacagcaccgtgtgggcgaggccttaagggtcgtggtccttgtctgggcggggtctttgggcgtcgacgaggcctggttctgggtaggcggggctactacggggcggtgcctgctgtggaaatgcctgcccgcgcgcttctgcccaggcgcatggggcatcgtactctagcctccactcctgccctgtgggcctccatcccgtgccctcgctctgagctgcgcctggacctggttctgccttctggacaatctttccggtggagggagcaaagtcctgcacactggagtggtgtactagcggatcaagtatggacactgactcagactgaggagcagctccactgcactgtgtaccgaggagacaagagccaggctagcaggcccacaccagacgagctggaggccgtgcgcaagtacttccagctagatgttaccctggctcaactgtatcaccactggggttccgtggactcccacttccaagaggtggctcagaaattccaaggtgtgcgactgctgcgacaagaccccatcgaatgccttttctcttttatctgttcctccaacaacaacatcgcccgcatcactggcatggtggagcggctgtgccaggcttttggacctcggctcatccagcttgatgatgtcacctaccatggcttccccagcctgcaggccctggctggaaactttttccggagcctgtggggaccttatgctggctgggcccaagcgcaggtgctgttcagtgccgacctgcgccaatcccgccatgctcaggagccaccagcaaagcgcagaaagggttccaaagggccggaaggctagatggggcaccctggacaaagaaattccccaagcaccttcccctccattccccacttctctctccccatccccacccagtctcatgttggggaggggcctccctgtgactacctcaaaggccaggcacccccaaatcaagcagtcagtttgcacaacaagatggggtgggggatattgagggagacagcgctaaggatggttttatcttccctttattacaagaaggaacaataaaatagaaacatttgtatggaaaaaaaaaaga

SEQ ID NO: 459223 - DNA, 2810 bp, Homo sapiens
ttcgcttgaacccgggaggcggagcttgcagtgagccgagatcgcgccatcacactccagctcaggcgacagagtgagactccgtctcaaagaaaaaaaacttgcagcctgatagttaagatacagcaaccccaaatccctatgctaaaaggtgagaatggcccagataaaggtcatgtctcctagctccctgctttttcatgccatcctccagaagggaagaaattaaataatccatcctcctactccaggcgactagaaggcaggctgcctcagggccacacactgggacttggactcaacctgatgggcttctgggcccagccccagacaaacccccggcaaacgtcccattccgaggaaagcatgagcagatggagtatggaagaaatgcccaagacggcaggcagcagctgtggcggccggcgggacgacaatccgaggagaggcctctgatgtcctgaggtctcagaggacgcctaaaggccttgaatgggacaagcttagcgggcgggcgcagaagagaataatactctggagacacttcccgagggctctggggccggagctgtgttcgctccggttcttggtgaagacagggttcgtgggaggcggcccaaggagggcgaacgcctaagactgcaaaggctcgggggagaacggctctcggagaacgggctggggaaggacgtggctctgaagacggacagccctgaggaaccgcggggcgcccagatggaactcgttagcgccccgagtgcagacaatcccggagggggaaaggcgagcagctggcagagagcccagtgccggccaaccgcgcgagcgcctcagaacggcccgcccaccctgatttctcattggcgcctcctacctcctcctcggattggctacctctaggtgaaatgagcggtggttgagccctacttccggtggtgctgtggtctgcccctggagaacccagaagaacacagctgtgcgcgcccacaggctctgggggcgggagaagataagtcgcaaggagggggcgggacctacacctcaggaaagccggagaattggggcacgaagcggggctttgatgacccgcaaagggcgaggcatgcaggaggtggaggaattaagtgaaacagggaaggttgttaaacagcaccgtgtgggcgaggccttaagggtcgtggtccttgtctgggcggggtctttgggcgtcgacgaggcctggttctgggtaggcggggctactacggggcggtgcctgctgtggaaatgcctgcccgcgcgcttctgcccaggcgcatggggcatcgtactctagcctccactcctgccctgtgggcctccatcccgtgccctcgctctgagctgcgcctggacctggttctgccttctggacaatctttccggtggagggagcaaagtcctgcacactggagtggtgtactagcggatcaagtatggacactgactcagactgaggagcagctccactgcactgtgtaccgaggagacaagagccaggctagcaggcccacaccagacgagctggaggccgtgcgcaagtacttccagctagatgttaccctggctcaactgtatcaccactggggttccgtggactcccacttccaagaggtggctcagaaattccaaggtgtgcgactgctgcgacaagaccccatcgaatgccttttctcttttatctgttcctccaacaacaacatcgcccgcatcactggcatggtggagcggctgtgccaggcttttggacctcggctcatccagcttgatgatgtcacctaccatggcttccccagcctgcaggccctggctgggccagaggtggaggctcatctcaggaagctgggcctgggctatcgtgcccgttacgtgagtgccagtgcccgagccatcctggaagaacagggcgggctagcctggctgcagcagctacgagagtcctcatatgaggaggcccacaaggccctctgcatcctgcctggagtgggcaccaaggtggctgactgcatctgcctgatggccctagacaagccccaggctgtgcccgtggatgtccatatgtggcacattgcccaacgtgactacagctggcaccctaccacgtcccaggcgaagggaccgagcccccagaccaacaaggaactgggaaactttttccggagcctgtggggaccttatgctggctgggcccaagcggtgagtgtacctaggtgtcctccctaggtttcctctcctccagcccagacccagtggactcttccaccaccgccccaggtggccctaaaggactctccagccacccctgtcccaaccccagtggattctcattgccttcggccctgttccccaaggactcttccacctcccaacactgtcactagtctcaccagccctgaccccagtgtaccctcctccccacacagactccaccctccaggtgctgttcagtgccgacctgcgccaatcccgccatgctcaggagccaccagcaaagcgcagaaagggttccaaagggccggaaggctagatggggcaccctggacaaagaaattccccaagcaccttcccctccattccccacttctctctccccatccccacccagtctcatgttggggaggggcctccctgtgactacctcaaaggccaggcacccccaaatcaagcagtcagtttgcacaacaagatggggtgggggatattgagggagacagcgctaaggatggttttatcttccctttattacaagaaggaacaataaaatagaaacatttgtatggaaaaaaaaaaga

SEQ ID NO: 459224 - DNA, 3113 bp, Homo sapiens
ttcgcttgaacccgggaggcggagcttgcagtgagccgagatcgcgccatcacactccagctcaggcgacagagtgagactccgtctcaaagaaaaaaaacttgcagcctgatagttaagatacagcaaccccaaatccctatgctaaaaggtgagaatggcccagataaaggtcatgtctcctagctccctgctttttcatgccatcctccagaagggaagaaattaaataatccatcctcctactccaggcgactagaaggcaggctgcctcagggccacacactgggacttggactcaacctgatgggcttctgggcccagccccagacaaacccccggcaaacgtcccattccgaggaaagcatgagcagatggagtatggaagaaatgcccaagacggcaggcagcagctgtggcggccggcgggacgacaatccgaggagaggcctctgatgtcctgaggtctcagaggacgcctaaaggccttgaatgggacaagcttagcgggcgggcgcagaagagaataatactctggagacacttcccgagggctctggggccggagctgtgttcgctccggttcttggtgaagacagggttcgtgggaggcggcccaaggagggcgaacgcctaagactgcaaaggctcgggggagaacggctctcggagaacgggctggggaaggacgtggctctgaagacggacagccctgaggaaccgcggggcgcccagatggaactcgttagcgccccgagtgcagacaatcccggagggggaaaggcgagcagctggcagagagcccagtgccggccaaccgcgcgagcgcctcagaacggcccgcccaccctgatttctcattggcgcctcctacctcctcctcggattggctacctctaggtgaaatgagcggtggttgagccctacttccggtggtgctgtggtctgcccctggagaacccagaagaacacagctgtgcgcgcccacaggctctgggggcgggagaagataagtcgcaaggagggggcgggacctacacctcaggaaagccggagaattggggcacgaagcggggctttgatgacccgcaaagggcgaggcatgcaggaggtggaggaattaagtgaaacagggaaggttgttaaacagcaccgtgtgggcgaggccttaagggtcgtggtccttgtctgggcggggtctttgggcgtcgacgaggcctggttctgggtaggcggggctactacggggcggtgcctgctgtggaaatgcctgcccgcgcgcttctgcccaggcgcatggggcatcgtactctagcctccactcctgccctgtgggcctccatcccgtgccctcgctctgagctgcgcctggacctggttctgccttctggacaatctttccggtggagggagcaaagtcctgcacactggagtggtgtactagcggatcaagtatggacactgactcagactgaggagcagctccactgcactgtgtaccgaggagacaagagccaggctagcaggcccacaccagacgagctggaggccgtgcgcaagtacttccagctagatgttaccctggctcaactgtatcaccactggggttccgtggactcccacttccaagaggtggctcagaaattccaaggtgtgcgactgctgcgacaagaccccatcgaatgccttttctcttttatctgttcctccaacaacaacatcgcccgcatcactggcatggtggagcggctgtgccaggcttttggacctcggctcatccagcttgatgatgtcacctaccatggcttccccagcctgcaggccctggctgggccagaggtggaggctcatctcaggaagctgggcctgggctatcgtgcccgttacgtgagtgccagtgcccgagccatcctggaagaacagggcgggctagcctggctgcagcagctacgagagtcctcatatgaggaggcccacaaggccctctgcatcctgcctggagtgggcaccaaggtggctgactgcatctgcctgatggccctagacaagccccaggctgtgcccgtggatgtccatatgtggcacattgcccaacgtgactacagctggcaccctaccacgtcccaggcgaagggaccgagcccccagaccaacaaggaactgggaaactttttccggagcctgtggggaccttatgctggctgggcccaagcggctggatcagatgcctcctgaagaattacagacttcttcctctagacttggagggcctccttggcaatgcatttgatggccaccagcttctgcgtcctcttatcttctgccaggatcacctccgagaaggcccccctatcgggagaggggattcacaaggtgaagaactggaaccccagcttccctccagcctctcctccattccctatgggttctgtgaccactgctggaccaaggacgtggatgaccctcccctagtcactcatccatcccctggctccagagatggtcacatgacccaggcctggccagtcaaagtagtctctcccctggccacagtaattggtcatgtgatgcaagccagcttactagcactttgagaatgagtctcctgttgagctggtaggatgtaagcctggagctaatggcgatcatctttgccaccacctggggagagcctgcttgggaatgaaattaacacaaaggaagtccaacctgagaaatggccaaatatatttcctgataacattatgtggccctctggatccagccatgcctgaggtctacccctgggcttttggattatgtgtacagttggttcatccctttttctgctaattcgagtcatggctaatttaacaccctttagaaccttaaagaaccatcagcatcacccgggaacttttttagaaatgcaaaatctctactgctttggatcctgggtcaaaaaaaagaaaaaaaaaagaaatgcaaaactttaggccctgccccagatttactaaatcaatctgcagtttaacaaaatcctcaggtgatttgtatgctcattgaactttaagaagcagtgttttagaacaggttcttaaaaaggaacaaataaactcatttaactaaagtta

SEQ ID NO: 459225 - DNA, 2865 bp, Homo sapiens
ttcgcttgaacccgggaggcggagcttgcagtgagccgagatcgcgccatcacactccagctcaggcgacagagtgagactccgtctcaaagaaaaaaaacttgcagcctgatagttaagatacagcaaccccaaatccctatgctaaaaggtgagaatggcccagataaaggtcatgtctcctagctccctgctttttcatgccatcctccagaagggaagaaattaaataatccatcctcctactccaggcgactagaaggcaggctgcctcagggccacacactgggacttggactcaacctgatgggcttctgggcccagccccagacaaacccccggcaaacgtcccattccgaggaaagcatgagcagatggagtatggaagaaatgcccaagacggcaggcagcagctgtggcggccggcgggacgacaatccgaggagaggcctctgatgtcctgaggtctcagaggacgcctaaaggccttgaatgggacaagcttagcgggcgggcgcagaagagaataatactctggagacacttcccgagggctctggggccggagctgtgttcgctccggttcttggtgaagacagggttcgtgggaggcggcccaaggagggcgaacgcctaagactgcaaaggctcgggggagaacggctctcggagaacgggctggggaaggacgtggctctgaagacggacagccctgaggaaccgcggggcgcccagatggaactcgttagcgccccgagtgcagacaatcccggagggggaaaggcgagcagctggcagagagcccagtgccggccaaccgcgcgagcgcctcagaacggcccgcccaccctgatttctcattggcgcctcctacctcctcctcggattggctacctctaggtgaaatgagcggtggttgagccctacttccggtggtgctgtggtctgcccctggagaacccagaagaacacagctgtgcgcgcccacaggctctgggggcgggagaagataagtcgcaaggagggggcgggacctacacctcaggaaagccggagaattggggcacgaagcggggctttgatgacccgcaaagggcgaggcatgcaggaggtggaggaattaagtgaaacagggaaggttgttaaacagcaccgtgtgggcgaggccttaagggtcgtggtccttgtctgggcggggtctttgggcgtcgacgaggcctggttctgggtaggcggggctactacggggcggtgcctgctgtggaaatgcctgcccgcgcgcttctgcccaggcgcatggggcatcgtactctagcctccactcctgccctgtgggcctccatcccgtgccctcgctctgagctgcgcctggacctggttctgccttctggacaatctttccggtggagggagcaaagtcctgcacactggagtggtgtactagcggatcaagtatggacactgactcagactgaggagcagctccactgcactgtgtaccgaggagacaagagccaggctagcaggcccacaccagacgagctggaggccgtgcgcaagtacttccagctagatgttaccctggctcaactgtatcaccactggggttccgtggactcccacttccaagaggtggctcagaaattccaaggtgtgcgactgctgcgacaagaccccatcgaatgccttttctcttttatctgttcctccaacaacaacatcgcccgcatcactggcatggtggagcggctgtgccaggcttttggacctcggctcatccagcttgatgatgtcacctaccatggcttccccagcctgcaggccctggctgggccagaggtggaggctcatctcaggaagctgggcctgggctatcgtgcccgttacgtgagtgccagtgcccgagccatcctggaagaacagggcgggctagcctggctgcagcagctacgagagtcctcatatgaggaggcccacaaggccctctgcatcctgcctggagtgggcaccaaggtggctgactgcatctgcctgatggccctagacaagccccaggctgtgcccgtggatgtccatatgtggcacattgcccaacgtgactacagctggcaccctaccacgtcccaggcgaagggaccgagcccccagaccaacaaggaactgggaaactttttccggagcctgtggggaccttatgctggctgggcccaagcgggcctccttggcaatgcatttgatggccaccagcttctgcgtcctcttatcttctgccaggatcacctccgagaaggccccctggccacagtaattggtcatgtgatgcaagccagcttactagcactttgagaatgagtctcctgttgagctggtaggatgtaagcctggagctaatggcgatcatctttgccaccacctggggagagcctgcttgggaatgaaattaacacaaaggaagtccaacctgagaaatggccaaatatatttcctgataacattatgtggccctctggatccagccatgcctgaggtctacccctgggcttttggattatgtgtacagttggttcatccctttttctgctaattcgagtcatggctaatttaacaccctttagaaccttaaagaaccatcagcatcacccgggaacttttttagaaatgcaaaatctctactgctttggatcctgggtcaaaaaaaagaaaaaaaaaagaaatgcaaaactttaggccctgccccagatttactaaatcaatctgcagtttaacaaaatcctcaggtgatttgtatgctcattgaactttaagaagcagtgttttagaacaggttcttaaaaaggaacaaataaactcatttaactaaagtta

SEQ ID NO: 459226 - DNA, 2555 bp, Homo sapiens
ttcgcttgaacccgggaggcggagcttgcagtgagccgagatcgcgccatcacactccagctcaggcgacagagtgagactccgtctcaaagaaaaaaaacttgcagcctgatagttaagatacagcaaccccaaatccctatgctaaaaggtgagaatggcccagataaaggtcatgtctcctagctccctgctttttcatgccatcctccagaagggaagaaattaaataatccatcctcctactccaggcgactagaaggcaggctgcctcagggccacacactgggacttggactcaacctgatgggcttctgggcccagccccagacaaacccccggcaaacgtcccattccgaggaaagcatgagcagatggagtatggaagaaatgcccaagacggcaggcagcagctgtggcggccggcgggacgacaatccgaggagaggcctctgatgtcctgaggtctcagaggacgcctaaaggccttgaatgggacaagcttagcgggcgggcgcagaagagaataatactctggagacacttcccgagggctctggggccggagctgtgttcgctccggttcttggtgaagacagggttcgtgggaggcggcccaaggagggcgaacgcctaagactgcaaaggctcgggggagaacggctctcggagaacgggctggggaaggacgtggctctgaagacggacagccctgaggaaccgcggggcgcccagatggaactcgttagcgccccgagtgcagacaatcccggagggggaaaggcgagcagctggcagagagcccagtgccggccaaccgcgcgagcgcctcagaacggcccgcccaccctgatttctcattggcgcctcctacctcctcctcggattggctacctctaggtgaaatgagcggtggttgagccctacttccggtggtgctgtggtctgcccctggagaacccagaagaacacagctgtgcgcgcccacaggctctgggggcgggagaagataagtcgcaaggagggggcgggacctacacctcaggaaagccggagaattggggcacgaagcggggctttgatgacccgcaaagggcgaggcatgcaggaggtggaggaattaagtgaaacagggaaggttgttaaacagcaccgtgtgggcgaggccttaagggtcgtggtccttgtctgggcggggtctttgggcgtcgacgaggcctggttctgggtaggcggggctactacggggcggtgcctgctgtggaaatgcctgcccgcgcgcttctgcccaggcgcatggggcatcgtactctagcctccactcctgccctgtgggcctccatcccgtgccctcgctctgagctgcgcctggacctggttctgccttctggacaatctttccggtggagggagcaaagtcctgcacactggagtggtgtactagcggatcaagtatggacactgactcagactgaggagcagctccactgcactgtgtaccgaggagacaagagccaggctagcaggcccacaccagacgagctggaggccgtgcgcaagtacttccagctagatgttaccctggctcaactgtatcaccactggggttccgtggactcccacttccaagaggtggctcagaaattccaaggtgtgcgactgctgcgacaagaccccatcgaatgccttttctcttttatctgttcctccaacaacaacatcgcccgcatcactggcatggtggagcggctgtgccaggcttttggacctcggctcatccagcttgatgatgtcacctaccatggcttccccagcctgcaggccctggctgggccagaggtggaggctcatctcaggaagctgggcctgggctatcgtgcccgttacgtgagtgccagtgcccgagccatcctggaagaacagggcgggctagcctggctgcagcagctacgagagtcctcatatgaggaggcccacaaggccctctgcatcctgcctggagtgggcaccaaggtggctgactgcatctgcctgatggccctagacaagccccaggctgtgcccgtggatgtccatatgtggcacattgcccaacgtgactacagctggcaccctaccacgtcccaggcgaagggaccgagcccccagaccaacaaggaactgggaaactttttccggagcctgtggggaccttatgctggctgggcccaagcggtgagtgtacctaggtgtcctccctaggtttcctctcctccagcccagacccagtggactcttccaccaccgccccaggtggccctaaaggactctccagccacccctgtcccaaccccagtggattctcattgccttcggccctgttccccaaggactcttccacctcccaacactgtcactagtctcaccagccctgactcagccttggccttggcattgcccctggtcctgccatatttctggccctgtccctaccctagccttggccctgacccttaccttgctctggccctgcccttgccctaatgcagcccctggccctgtcatgacccttccga

SEQ ID NO: 459227 - DNA, 2878 bp, Homo sapiens
ttcgcttgaacccgggaggcggagcttgcagtgagccgagatcgcgccatcacactccagctcaggcgacagagtgagactccgtctcaaagaaaaaaaacttgcagcctgatagttaagatacagcaaccccaaatccctatgctaaaaggtgagaatggcccagataaaggtcatgtctcctagctccctgctttttcatgccatcctccagaagggaagaaattaaataatccatcctcctactccaggcgactagaaggcaggctgcctcagggccacacactgggacttggactcaacctgatgggcttctgggcccagccccagacaaacccccggcaaacgtcccattccgaggaaagcatgagcagatggagtatggaagaaatgcccaagacggcaggcagcagctgtggcggccggcgggacgacaatccgaggagaggcctctgatgtcctgaggtctcagaggacgcctaaaggccttgaatgggacaagcttagcgggcgggcgcagaagagaataatactctggagacacttcccgagggctctggggccggagctgtgttcgctccggttcttggtgaagacagggttcgtgggaggcggcccaaggagggcgaacgcctaagactgcaaaggctcgggggagaacggctctcggagaacgggctggggaaggacgtggctctgaagacggacagccctgaggaaccgcggggcgcccagatggaactcgttagcgccccgagtgcagacaatcccggagggggaaaggcgagcagctggcagagagcccagtgccggccaaccgcgcgagcgcctcagaacggcccgcccaccctgatttctcattggcgcctcctacctcctcctcggattggctacctctaggtgaaatgagcggtggttgagccctacttccggtggtgctgtggtctgcccctggagaacccagaagaacacagctgtgcgcgcccacaggctctgggggcgggagaagataagtcgcaaggagggggcgggacctacacctcaggaaagccggagaattggggcacgaagcggggctttgatgacccgcaaagggcgaggcatgcaggaggtggaggaattaagtgaaacagggaaggttgttaaacagcaccgtgtgggcgaggccttaagggtcgtggtccttgtctgggcggggtctttgggcgtcgacgaggcctggttctgggtaggcggggctactacggggcggtgcctgctgtggaaatgcctgcccgcgcgcttctgcccaggcgcatggggcatcgtactctagcctccactcctgccctgtgggcctccatcccgtgccctcgctctgagctgcgcctggacctggttctgccttctggacaatctttccggtggagggagcaaagtcctgcacactggagtggtgtactagcggatcaagtatggacactgactcagactgaggagcagctccactgcactgtgtaccgaggagacaagagccaggctagcaggcccacaccagacgagctggaggccgtgcgcaagtacttccagctagatgttaccctggctcaactgtatcaccactggggttccgtggactcccacttccaagaggtggctcagaaattccaaggtgtgcgactgctgcgacaagaccccatcgaatgccttttctcttttatctgttcctccaacaacaacatcgcccgcatcactggcatggtggagcggctgtgccaggcttttggacctcggctcatccagcttgatgatgtcacctaccatggcttccccagcctgcaggccctggctggtggctgactgcatctgcctgatggccctagacaagccccaggctgtgcccgtggatgtccatatgtggcacattgcccaacgtgactacagctggcaccctaccacgtcccaggcgaagggaccgagcccccagaccaacaaggaactgggaaactttttccggagcctgtggggaccttatgctggctgggcccaagcgggcctccttggcaatgcatttgatggccaccagcttctgcgtcctcttatcttctgccaggatcacctccgagaaggcccccctatcgggagaggggattcacaaggtgaagaactggaaccccagcttccctccagcctctcctccattccctatgggttctgtgaccactgctggaccaaggacgtggatgaccctcccctagtcactcatccatcccctggctccagagatggtcacatgacccaggcctggccagtcaaagtagtctctcccctggccacagtaattggtcatgtgatgcaagccagcttactagcactttgagaatgagtctcctgttgagctggtaggatgtaagcctggagctaatggcgatcatctttgccaccacctggggagagcctgcttgggaatgaaattaacacaaaggaagtccaacctgagaaatggccaaatatatttcctgataacattatgtggccctctggatccagccatgcctgaggtctacccctgggcttttggattatgtgtacagttggttcatccctttttctgctaattcgagtcatggctaatttaacaccctttagaaccttaaagaaccatcagcatcacccgggaacttttttagaaatgcaaaatctctactgctttggatcctgggtcaaaaaaaagaaaaaaaaaagaaatgcaaaactttaggccctgccccagatttactaaatcaatctgcagtttaacaaaatcctcaggtgatttgtatgctcattgaactttaagaagcagtgttttagaacaggttcttaaaaaggaacaaataaactcatttaactaaagtta

SEQ ID NO: 459228 - DNA, 3681 bp, Homo sapiens
ttcgcttgaacccgggaggcggagcttgcagtgagccgagatcgcgccatcacactccagctcaggcgacagagtgagactccgtctcaaagaaaaaaaacttgcagcctgatagttaagatacagcaaccccaaatccctatgctaaaaggtgagaatggcccagataaaggtcatgtctcctagctccctgctttttcatgccatcctccagaagggaagaaattaaataatccatcctcctactccaggcgactagaaggcaggctgcctcagggccacacactgggacttggactcaacctgatgggcttctgggcccagccccagacaaacccccggcaaacgtcccattccgaggaaagcatgagcagatggagtatggaagaaatgcccaagacggcaggcagcagctgtggcggccggcgggacgacaatccgaggagaggcctctgatgtcctgaggtctcagaggacgcctaaaggccttgaatgggacaagcttagcgggcgggcgcagaagagaataatactctggagacacttcccgagggctctggggccggagctgtgttcgctccggttcttggtgaagacagggttcgtgggaggcggcccaaggagggcgaacgcctaagactgcaaaggctcgggggagaacggctctcggagaacgggctggggaaggacgtggctctgaagacggacagccctgaggaaccgcggggcgcccagatggaactcgttagcgccccgagtgcagacaatcccggagggggaaaggcgagcagctggcagagagcccagtgccggccaaccgcgcgagcgcctcagaacggcccgcccaccctgatttctcattggcgcctcctacctcctcctcggattggctacctctaggtgaaatgagcggtggttgagccctacttccggtggtgctgtggtctgcccctggagaacccagaagaacacagctgtgcgcgcccacaggctctgggggcgggagaagataagtcgcaaggagggggcgggacctacacctcaggaaagccggagaattggggcacgaagcggggctttgatgacccgcaaagggcgaggcatgcaggaggtggaggaattaagtgaaacagggaaggttgttaaacagcaccgtgtgggcgaggccttaagggtcgtggtccttgtctgggcggggtctttgggcgtcgacgaggcctggttctgggtaggcggggctactacggggcggtgcctgctgtggaaatgcctgcccgcgcgcttctgcccaggcgcatggggcatcgtactctagcctccactcctgccctgtgggcctccatcccgtgccctcgctctgagctgcgcctggacctggttctgccttctggacaatctttccggtgagtgactgagcctgagaagcctgtcccctcggactggctcctgccgcctcaacactgcctggcatggggtacaaaggaatttgggggatgatggaagaaacccggggtacaaaagaggaaacaagcacgggtagccaacctgttacctttaatatgtctgtacagtgataattgtaaggatccagcggtataaccgatgcagaagataatagcacttgtttttctttttttgagacagggtctcgctctgttgcccaggtaggaatgcagagaggcccattccagcctcgaccccccgggcgcagcctcccgagtagctgggactacaggtgtgcgccatgcccggttaaatttttgtattttttgtagaggtgaggtttcgccatgttgctcagactggaagatagcactgttacttgtattagtttcgtacatggagctattgtaggataggagggaccccaaagggtgcaagaaaggaaattgagtgccagggttgtcatgtgccttgggctcaggtggagggagcaaagtcctgcacactggagtggtgtactagcggatcaagtatggacactgactcagactgaggagcagctccactgcactgtgtaccgaggagacaagagccaggctagcaggcccacaccagacgagctggaggccgtgcgcaagtacttccagctagatgttaccctggctcaactgtatcaccactggggttccgtggactcccacttccaagaggtggctcagaaattccaaggtgtgcgactgctgcgacaagaccccatcgaatgccttttctcttttatctgttcctccaacaacaacatcgcccgcatcactggcatggtggagcggctgtgccaggcttttggacctcggctcatccagcttgatgatgtcacctaccatggcttccccagcctgcaggccctggctgggccagaggtggaggctcatctcaggaagctgggcctgggctatcgtgcccgttacgtgagtgccagtgcccgagccatcctggaagaacagggcgggctagcctggctgcagcagctacgagagtcctcatatgaggaggcccacaaggccctctgcatcctgcctggagtgggcaccaaggtggctgactgcatctgcctgatggccctagacaagccccaggctgtgcccgtggatgtccatatgtggcacattgcccaacgtgactacagctggcaccctaccacgtcccaggcgaagggaccgagcccccagaccaacaaggaactgggaaactttttccggagcctgtggggaccttatgctggctgggcccaagcgctctgtcaggtcatcaccacttttatgacctttctcggaccccataggctggatcagatgcctcctgaagaattacagacttcttcctctagacttggagggcctccttggcaatgcatttgatggccaccagcttctgcgtcctcttatcttctgccaggatcacctccgagaaggcccccctatcgggagaggggattcacaaggtgaagaactggaaccccagcttccctccagcctctcctccattccctatgggttctgtgaccactgctggaccaaggacgtggatgaccctcccctagtcactcatccatcccctggctccagagatggtcacatgacccaggcctggccagtcaaagtagtctctcccctggccacagtaattggtcatgtgatgcaagccagcttactagcactttgagaatgagtctcctgttgagctggtaggatgtaagcctggagctaatggcgatcatctttgccaccacctggggagagcctgcttgggaatgaaattaacacaaaggaagtccaacctgagaaatggccaaatatatttcctgataacattatgtggccctctggatccagccatgcctgaggtctacccctgggcttttggattatgtgtacagttggttcatccctttttctgctaattcgagtcatggctaatttaacaccctttagaaccttaaagaaccatcagcatcacccgggaacttttttagaaatgcaaaatctctactgctttggatcctgggtcaaaaaaaagaaaaaaaaaagaaatgcaaaactttaggccctgccccagatttactaaatcaatctgcagtttaacaaaatcctcaggtgatttgtatgctcattgaactttaagaagcagtgttttagaacaggttcttaaaaaggaacaaataaactcatttaactaaagtta

SEQ ID NO: 459229 - DNA, 2628 bp, Homo sapiens
ttcgcttgaacccgggaggcggagcttgcagtgagccgagatcgcgccatcacactccagctcaggcgacagagtgagactccgtctcaaagaaaaaaaacttgcagcctgatagttaagatacagcaaccccaaatccctatgctaaaaggtgagaatggcccagataaaggtcatgtctcctagctccctgctttttcatgccatcctccagaagggaagaaattaaataatccatcctcctactccaggcgactagaaggcaggctgcctcagggccacacactgggacttggactcaacctgatgggcttctgggcccagccccagacaaacccccggcaaacgtcccattccgaggaaagcatgagcagatggagtatggaagaaatgcccaagacggcaggcagcagctgtggcggccggcgggacgacaatccgaggagaggcctctgatgtcctgaggtctcagaggacgcctaaaggccttgaatgggacaagcttagcgggcgggcgcagaagagaataatactctggagacacttcccgagggctctggggccggagctgtgttcgctccggttcttggtgaagacagggttcgtgggaggcggcccaaggagggcgaacgcctaagactgcaaaggctcgggggagaacggctctcggagaacgggctggggaaggacgtggctctgaagacggacagccctgaggaaccgcggggcgcccagatggaactcgttagcgccccgagtgcagacaatcccggagggggaaaggcgagcagctggcagagagcccagtgccggccaaccgcgcgagcgcctcagaacggcccgcccaccctgatttctcattggcgcctcctacctcctcctcggattggctacctctaggtgaaatgagcggtggttgagccctacttccggtggtgctgtggtctgcccctggagaacccagaagaacacagctgtgcgcgcccacaggctctgggggcgggagaagataagtcgcaaggagggggcgggacctacacctcaggaaagccggagaattggggcacgaagcggggctttgatgacccgcaaagggcgaggcatgcaggaggtggaggaattaagtgaaacagggaaggttgttaaacagcaccgtgtgggcgaggccttaagggtcgtggtccttgtctgggcggggtctttgggcgtcgacgaggcctggttctgggtaggcggggctactacggggcggtgcctgctgtggaaatgcctgcccgcgcgcttctgcccaggcgcatggggcatcgtactctagcctccactcctgccctgtgggcctccatcccgtgccctcgctctgagctgcgcctggacctggttctgccttctggacaatctttccggtggagggagcaaagtcctgcacactggagtggtgtactagcggatcaagtatggacactgactcagactgaggagcagctccactgcactgtgtaccgaggagacaagagccaggctagcaggcccacaccagacgagctggaggccgtgcgcaagtacttccagctagatgttaccctggctcaactgtatcaccactggggttccgtggactcccacttccaagaggtggctcagaaattccaaggtgtgcgactgctgcgacaagaccccatcgaatgccttttctcttttatctgttcctccaacaacaacatcgcccgcatcactggcatggtggagcggctgtgccaggcttttggacctcggctcatccagcttgatgatgtcacctaccatggcttccccagcctgcaggccctggctggtggctgactgcatctgcctgatggccctagacaagccccaggctgtgcccgtggatgtccatatgtggcacattgcccaacgtgactacagctggcaccctaccacgtcccaggcgaagggaccgagcccccagaccaacaaggaactgggaaactttttccggagcctgtggggaccttatgctggctgggcccaagcggtgagtgtacctaggtgtcctccctaggtttcctctcctccagcccagacccagtggactcttccaccaccgccccaggtggccctaaaggactctccagccacccctgtcccaaccccagtggattctcattgccttcggccctgttccccaaggactcttccacctcccaacactgtcactagtctcaccagccctgaccccagtgtaccctcctccccacacagactccaccctccaggtgctgttcagtgccgacctgcgccaatcccgccatgctcaggagccaccagcaaagcgcagaaagggttccaaagggccggaaggctagatggggcaccctggacaaagaaattccccaagcaccttcccctccattccccacttctctctccccatccccacccagtctcatgttggggaggggcctccctgtgactacctcaaaggccaggcacccccaaatcaagcagtcagtttgcacaacaagatggggtgggggatattgagggagacagcgctaaggatggttttatcttccctttattacaagaaggaacaataaaatagaaacatttgtatggaaaaaaaaaaga

SEQ ID NO: 459230 - DNA, 2461 bp, Homo sapiens
ttcgcttgaacccgggaggcggagcttgcagtgagccgagatcgcgccatcacactccagctcaggcgacagagtgagactccgtctcaaagaaaaaaaacttgcagcctgatagttaagatacagcaaccccaaatccctatgctaaaaggtgagaatggcccagataaaggtcatgtctcctagctccctgctttttcatgccatcctccagaagggaagaaattaaataatccatcctcctactccaggcgactagaaggcaggctgcctcagggccacacactgggacttggactcaacctgatgggcttctgggcccagccccagacaaacccccggcaaacgtcccattccgaggaaagcatgagcagatggagtatggaagaaatgcccaagacggcaggcagcagctgtggcggccggcgggacgacaatccgaggagaggcctctgatgtcctgaggtctcagaggacgcctaaaggccttgaatgggacaagcttagcgggcgggcgcagaagagaataatactctggagacacttcccgagggctctggggccggagctgtgttcgctccggttcttggtgaagacagggttcgtgggaggcggcccaaggagggcgaacgcctaagactgcaaaggctcgggggagaacggctctcggagaacgggctggggaaggacgtggctctgaagacggacagccctgaggaaccgcggggcgcccagatggaactcgttagcgccccgagtgcagacaatcccggagggggaaaggcgagcagctggcagagagcccagtgccggccaaccgcgcgagcgcctcagaacggcccgcccaccctgatttctcattggcgcctcctacctcctcctcggattggctacctctaggtgaaatgagcggtggttgagccctacttccggtggtgctgtggtctgcccctggagaacccagaagaacacagctgtgcgcgcccacaggctctgggggcgggagaagataagtcgcaaggagggggcgggacctacacctcaggaaagccggagaattggggcacgaagcggggctttgatgacccgcaaagggcgaggcatgcaggaggtggaggaattaagtgaaacagggaaggttgttaaacagcaccgtgtgggcgaggccttaagggtcgtggtccttgtctgggcggggtctttgggcgtcgacgaggcctggttctgggtaggcggggctactacggggcggtgcctgctgtggaaatgcctgcccgcgcgcttctgcccaggcgcatggggcatcgtactctagcctccactcctgccctgtgggcctccatcccgtgccctcgctctgagctgcgcctggacctggttctgccttctggacaatctttccggtggagggagcaaagtcctgcacactggagtggtgtactagcggatcaagtatggacactgactcagactgaggagcagctccactgcactgtgtaccgaggagacaagagccaggctagcaggcccacaccagacgagctggaggccgtgcgcaagtacttccagctagatgttaccctggctcaactgtatcaccactggggttccgtggactcccacttccaagaggtggctcagaaattccaaggtgtgcgactgctgcgacaagaccccatcgaatgccttttctcttttatctgttcctccaacaacaacatcgcccgcatcactggcatggtggagcggctgtgccaggcttttggacctcggctcatccagcttgatgatgtcacctaccatggcttccccagcctgcaggccctggctggtgttccggtgccagcagaaggcctgcttacgtcggcatctgcattccagagccccctaaggtctaggcagcctgaggctgacaggagataaatttttaagaaatcagataagtgaagtgaaagagagagatcaaagtgttgtggcagcacaaaggagagactgactaactttctgctggggaatctgaaagagtgctttggtggaggtaacatgagatcagggccttgaagggtgagtcaagtctgtcaaggagacaagagggagagaagagcttgccagaggcccagagaccagcgaggaggctgtggtgtcctggaatgagggcgagatacttggtgggactggtcaacacggcaatgaagagggatatggccgaggaaaatggagaggggcactggagctgtgccagcaaggactgggatgcgtggacttgatcctgtagataacgggaggaagaaaggcctggatgcagcgccatgtcatgagcacatctgatcatgacagctcacctatgggaggattctccctcaacatttttctgtattttctaaattttctttaatggagcatgttttatttattttcatcattaaaacatagttttatatcttcttttttttttgagaca

SEQ ID NO: 459231 - DNA, 2205 bp, Homo sapiens
accgcacacgtggcgggggtgggagggtgtgagactggcctccacaccacgaaagatccatcccggaagtgcttactcgtcgtctccatgcgccggttcctgggcgtcttagagccaaggcgcgaggctcggagtgagaggtagagctggaggggaccctaagcgccctccgcccgggacgtgagccgctgcgcccaccgggctagacccggcgccatcatgctgcttctgccaagcgccgcggacggccggggcaccgccatcacccacgctctgacctctgcctctacactctgtcaagttgaacctgtgggaagatggtttgaagcttttgttaagaggagaaacagaaatgcttctgcctcttttcaggaactggaggataagaaagagttatccgaggaatcagaagatgaagaattgcagttggaagagtttcccatgctgaaaacacttgatcccaaagactggaagaaccaagatcattatgcagttcttggacttggccatgtgagatacaaggctacacagagacagatcaaagcagctcataaagcaatggttttaaaacatcacccagacaaacggaaagcagctggtgaaccaataaaagaaggagataatgactacttcacttgcataactaaagcttatgaaatgttatctgatccagtgaaaagacgagcatttaacagtgtagatcctacttttgataactcagttccttctaaaagtgaagcaaaggataatttcttcgaagtgtttaccccagtgtttgaaaggaattccagatggtcaaataaaaaaaatgttcctaaacttggtgatatgaattcatcatttgaagatgtagatatattttattctttctggtataattttgattcttggagagaattttcttatttagatgaagaagaaaaagaaaaagcagaatgtcgtgatgagaggagatggattgaaaagcagaacagagcaacaagagcacaaagaaaaaaagaagaaatgaacagaataagaacattagttgacaatgcatacagctgtgatccaaggataaaaaagttcaaggaagaagaaaaagccaagaaagaagcagaaaagaaagcaaaagcagaagctaaacggaaggagcaagaagctaaagaaaaacaaagacaagctgaattagaagctgctcggttagctaaggagaaagaagaggaggaagtcagacagcaagcattgctggcaaagaaggaaaaagatatccagaaaaaagccattaagaaggaaaggcaaaaacttcgaaactcatgcaagatagaagaaataaatgagcaaatcagaaaagagaaagaggaagctgaggctcgtatgcgacaagcatctaagaacacagagaaatcaactggtggaggtggaaatggaagtaaaaattggtcagaagatgatctacaattactaattaaagctgtgaatctgttccctgctggaacaaattcaagatgggaagttattgctaattacatgaacatacattcttcctctggagtcaaaagaactgccaaagatgttattggcaaagcaaagagtctccaaaaacttgaccctcatcaaaaagatgacataaataaaaaggcatttgataagttcaaaaaagaacatggagtggtacctcaagcagacaacgcaacgccttcagaacgatttgaaggtccatatacagacttcaccccttggacaacagaagaacagaagcttttggaacaagctttgaaaacatacccagtaaatacacctgaaagatgggaaaaaatagcagaagcggtgcctggcaggacaaagaaggactgcatgaaacgatacaaggaacttgtcgagatggtaaaagcaaagaaagctgctcaagaacaagtgctgaatgcaagtagagccaagaaatgacaatctttgttgtgtgtgcatttttataataaaactgaaaatactgtaaacattttcattcttaaaattatactcatggtaataatttgaaagtatgctgcttccaacataatttctcagagaacaaagactgaccattaatacaaaacaaccttcagaggggtagtctttttatcctttgaaagtatgatacagtatttaattcaaatttccaaatgtatatacatgttcatttttatttttctctagctctgttttataaatacatgtgttcaaaca

SEQ ID NO: 459232 - DNA, 977 bp, Homo sapiens
cttcagtgtaaaacaagaatgatttccagggtttctatccagcaaaagtttaactgtgaggaagctcttttacctattctgtaaggaagtagatttatcagaactcttaatgaattgtggttgtgtttttgagtccaagagtccaacagtactataaatttaaatatggctttttaccagtctggtgagtgtattacattgatttttaagagataaacagtacaaggtagatctttactattgtgttttaaaagcctttgagattttattttctgggatgtgagctatctgaaattttttctcttattaacactcagagggctatatgtatctctcatctctacaagtttattttcaaaatgacacatcccagattgaaatgggcacttagcgaatacttgtggaccacaagacttgtctgagaacatgttcaaagacagttttcaaataaaaatttttcttaatcaggtccatatacagacttcaccccttggacaacagaagaacagaagcttttggaacaagctttgaaaacatacccagtaaatacacctgaaagatgggaaaaaatagcagaagcggtgcctggcaggacaaagaaggactgcatgaaacgatacaaggaacttgtcgagatggtaaaagcaaagaaagctgctcaagaacaagtgctgaatgcaagtagagccaagaaatgacaatctttgttgtgtgtgcatttttataataaaactgaaaatactgtaaacattttcattcttaaaattatactcatggtaataatttgaaagtatgctgcttccaacataatttctcagagaacaaagactgaccattaatacaaaacaaccttcagaggggtagtctttttatcctttgaaagtatgatacagtatttaattcaaatttccaaatgtatatacatgttcatttttatttttctctagctctgttttataaatacatgtgttcaaaca

SEQ ID NO: 459233 - DNA, 911 bp, Homo sapiens
accgcacacgtggcgggggtgggagggtgtgagactggcctccacaccacgaaagatccatcccggaagtgcttactcgtcgtctccatgcgccggttcctgggcgtcttagagccaaggcgcgaggctcggagtgagaggtagagctggaggggaccctaagcgccctccgcccgggacgtgagccgctgcgcccaccgggctagacccggcgccatcatgctgcttctgccaagcgccgcggacggccggggcaccgccatcacccacgctctgacctctgcctctacactctgtcaagttgaacctgtgggaagatggtttgaagcttttgttaagaggagaaacagaaatgcttctgcctcttttcaggaactggaggataagaaagagttatccgaggaatcagaagatgaagaattgcagttggaagagtttcccatgctgaaaacacttgatcccaaagactggaagaaccaagatcattatgcagttcttggacttggccatgtgagatacaaggctacacagagacagatcaaagcagctcgtaagtacttagttattttgaaataatcaaatatcttgtataggaacaggctggctatgctttttaaaagatatacagtatcatagtctgcagccataactacatttaacagcatgtgttatattgtcataacaagcaaaaaaccacggtctcccctgccttcagaatcagaagaaagcaatccattttacatatagactttcccattagggataagaaattaggatgggtgtgtgtgtgtggatacaaaatactcctccaatggcaagcttttaaaaaataatacttcacctctctttagaagtatagcagctgcacttagtggatactgcctttttattgtttttctcatgccgatttt

SEQ ID NO: 459234 - DNA, 598 bp, Homo sapiens
ctcaaccttacctgaccatagaccctggtttatacagaacctcttactggactcctgatgaaatgtcactttgggaaatgcttattaaggtaccagaacacaagggatggaatatattggcttcatttcaaatttgactcccttttgtgttttttttccagaaccaagatcattatgcagttcttggacttggccatgtgagatacaaggctacacagagacagatcaaagcagctcgtaagtacttagttattttgaaataatcaaatatcttgtataggaacaggctggctatgctttttaaaagatatacagtatcatagtctgcagccataactacatttaacagcatgtgttatattgtcataacaagcaaaaaaccacggtctcccctgccttcagaatcagaagaaagcaatccattttacatatagactttcccattagggataagaaattaggatgggtgtgtgtgtgtggatacaaaatactcctccaatggcaagcttttaaaaaataatacttcacctctctttagaagtatagcagctgcacttagtggatactgcctttttattgtttttctcatgccgatttt

SEQ ID NO: 459235 - DNA, 719 bp, Homo sapiens
cttcagtgtaaaacaagaatgatttccagggtttctatccagcaaaagtttaactgtgaggaagctcttttacctattctgtaaggaagtagatttatcagaactcttaatgaattgtggttgtgtttttgagtccaagagtccaacagtactataaatttaaatatggctttttaccagtctggtgagtgtattacattgatttttaagagataaacagtacaaggtagatctttactattgtgttttaaaagcctttgagattttattttctgggatgtgagctatctgaaattttttctcttattaacactcagagggctatatgtatctctcatctctacaagtttattttcaaaatgacacatcccagattgaaatgggcacttagcgaatacttgtggaccacaagacttgtctgagaacatgttcaaagacagttttcaaataaaaatttttcttaatcaggtccatatacagacttcaccccttggacaacagaagaacagaagcttttggaacaagctttgaaaacatacccagtaaatacacctgaaagatgggaaaaaatagcagaagcggtgcctggcaggacaaagaaggactgcatgaaacgatacaaggttgcagacttaagcgtttatagattgttgtattttaaattgtagcttgggtgatatagctcatattttatgtctattaagtggttaataatatag

SEQ ID NO: 459236 - DNA, 2133 bp, Homo sapiens
accgcacacgtggcgggggtgggagggtgtgagactggcctccacaccacgaaagatccatcccggaagtgcttactcgtcgtctccatgcgccggttcctgggcgtcttagagccaaggcgcgaggctcggagtgagaggtagagctggaggggaccctaagcgccctccgcccgggacgtgagccgctgcgcccaccgggctagacccggcgccatcatgctgcttctgccaagcgccgcggacggccggggcaccgccatcacccacgctctgacctctgcctctacactctgtcaagttgaacctgtgggaagatggtttgaagcttttgttaagaggagaaacagaaatgcttctgcctcttttcaggaactggaggataagaaagagttatccgaggaatcagaagatgaagaattgcagttggaagagtttcccatgctgaaaacacttgatcccaaagactggaagaaccaagatcattatgcagttcttggacttggccatgtgagatacaaggctacacagagacagatcaaagcagctcataaagcaatggttttaaaacatcacccagacaaacggaaagcagctggtgaaccaataaaagaaggagataatgactacttcacttgcataactaaagcttatgaaatgttatctgatccagtgaaaagacgagcatttaacagtgtagatcctacttttgataactcagttccttctaaaagtgaagcaaaggataatttcttcgaagtgtttaccccagtgtttgaaaggaattccagatggtcaaataaaaaaaatgttcctaaacttggtgatatgaattcatcatttgaagatgtagatatattttattctttctggtataattttgattcttggagagaattttcttatttagatgaagaagaaaaagaaaaagcagaatgtcgtgatgagaggagatggattgaaaagcagaacagagcaacaagagcacaaagaaaaaaagaagaaatgaacagaataagaacattagttgacaatgcatacagctgtgatccaaggataaaaaagttcaaggaagaagaaaaagccaagaaagaagcagaaaagaaagcaaaagcagaagctaaacggaaggagcaagaagctaaagaaaaacaaagacaagctgaattagaagctgctcggttagctaaggagaaagaagaggaggaagtcagacagcaagcattgctggcaaagaaggaaaaagatatccagaaaaaagccattaagaaggaaaggcaaaaacttcgaaactcatgcaagacctggaatcatttttctgataatgaggcagagcgggttaaaatgatggaagaagtggaaaaactttgtgatcggcttgaactggcaagcttacagtgcttgaatgaaacactcacatcatgcacaaaagaagtaggaaaggctgctttggaaaaacagatagaagaaataaatgagcaaatcagaaaagagaaagaggaagctgaggctcgtatgcgacaagcatctaagaacacagagaaatcaactggtggaggtggaaatggaagtaaaaattggtcagaagatgatctacaattactaattaaagctgtgaatctgttccctgctggaacaaattcaagatgggaagttattgctaattacatgaacatacattcttcctctggagtcaaaagaactgccaaagatgttattggcaaagcaaagagtctccaaaaacttgaccctcatcaaaaagatgacataaataaaaaggcatttgataagttcaaaaaagaacatggagtggtacctcaagcagacaacgcaacgccttcagaacgatttgaaggtccatatacagacttcaccccttggacaacagaagaacagaagcttttggaacaagctttgaaaacatacccagtaaatacacctgaaagatgggaaaaaatagcagaagcggtgcctggcaggacaaagaaggactgcatgaaacgatacaaggaacttgtcgagatggtaaaagcaaagaaagctgctcaagaacaagtgctgaatgcaagtagagccaagaaatgacaatctttgttgtgtgtgcatttttataataaaactgaaaatactgta

SEQ ID NO: 459237 - DNA, 2364 bp, Homo sapiens
accgcacacgtggcgggggtgggagggtgtgagactggcctccacaccacgaaagatccatcccggaagtgcttactcgtcgtctccatgcgccggttcctgggcgtcttagagccaaggcgcgaggctcggagtgagaggtagagctggaggggaccctaagcgccctccgcccgggacgtgagccgctgcgcccaccgggctagacccggcgccatcatgctgcttctgccaagcgccgcggacggccggggcaccgccatcacccacgctctgacctctgcctctacactctgtcaagttgaacctgtgggaagatggtttgaagcttttgttaagaggagaaacagaaatgcttctgcctcttttcaggaactggaggataagaaagagttatccgaggaatcagaagatgaagaattgcagttggaagagtttcccatgctgaaaacacttgatcccaaagactggaagaaccaagatcattatgcagttcttggacttggccatgtgagatacaaggctacacagagacagatcaaagcagctcataaagcaatggttttaaaacatcacccagacaaacggaaagcagctggtgaaccaataaaagaaggagataatgactacttcacttgcataactaaagcttatgaaatgttatctgatccagtgaaaagacgagcatttaacagtgtagatcctacttttgataactcagttccttctaaaagtgaagcaaaggataatttcttcgaagtgtttaccccagtgtttgaaaggaattccagatggtcaaataaaaaaaatgttcctaaacttggtgatatgaattcatcatttgaagatgtagatatattttattctttctggtataattttgattcttggagagaattttcttatttagatgaagaagaaaaagaaaaagcagaatgtcgtgatgagaggagatggattgaaaagcagaacagagcaacaagagcacaaagaaaaaaagaagaaatgaacagaataagaacattagttgacaatgcatacagctgtgatccaaggataaaaaagttcaaggaagaagaaaaagccaagaaagaagcagaaaagaaagcaaaagcagaagctaaacggaaggagcaagaagctaaagaaaaacaaagacaagctgaattagaagctgctcggttagctaaggagaaagaagaggaggaagtcagacagcaagcattgctggcaaagaaggaaaaagatatccagaaaaaagccattaagaaggaaaggcaaaaacttcgaaactcatgcaagacctggaatcatttttctgataatgaggcagagcgggttaaaatgatggaagaagtggaaaaactttgtgatcggcttgaactggcaagcttacagtgcttgaatgaaacactcacatcatgcacaaaagaagtaggaaaggctgctttggaaaaacagatagaagaaataaatgagcaaatcagaaaagagaaagaggaagctgaggctcgtatgcgacaagcatctaagaacacagagaaatcaactggtggaggtggaaatggaagtaaaaattggtcagaagatgatctacaattactaattaaagctgtgaatctgttccctgctggaacaaattcaagatgggaagttattgctaattacatgaacatacattcttcctctggagtcaaaagaactgccaaagatgttattggcaaagcaaagagtctccaaaaacttgaccctcatcaaaaagatgacataaataaaaaggcatttgataagttcaaaaaagaacatggagtggtacctcaagcagacaacgcaacgccttcagaacgatttgaaggtccatatacagacttcaccccttggacaacagaagaacagaagcttttggaacaagctttgaaaacatacccagtaaatacacctgaaagatgggaaaaaatagcagaagcggtgcctggcaggacaaagaaggactgcatgaaacgatacaaggaacttgtcgagatggtaaaagcaaagaaagctgctcaagaacaagtgctgaatgcaagtagagccaagaaatgacaatctttgttgtgtgtgcatttttataataaaactgaaaatactgtaaacattttcattcttaaaattatactcatggtaataatttgaaagtatgctgcttccaacataatttctcagagaacaaagactgaccattaatacaaaacaaccttcagaggggtagtctttttatcctttgaaagtatgatacagtatttaattcaaatttccaaatgtatatacatgttcatttttatttttctctagctctgttttataaatacatgtgttcaaaca

SEQ ID NO: 459238 - DNA, 2180 bp, Homo sapiens
accgcacacgtggcgggggtgggagggtgtgagactggcctccacaccacgaaagatccatcccggaagtgcttactcgtcgtctccatgcgccggttcctgggcgtcttagagccaaggcgcgaggctcggagtgagaggtagagctggaggggaccctaagcgccctccgcccgggacgtgagccgctgcgcccaccgggctagacccggcgccatcatgctgcttctgccaagcgccgcggacggccggggcaccgccatcacccacgctctgacctctgcctctacactctgtcaagttgaacctgtgggaagatggtttgaagcttttgttaagaggagaaacagaaatgcttctgcctcttttcaggaactggaggataagaaagagttatccgaggaatcagaagatgaagaattgcagttggaagagtttcccatgctgaaaacacttgatcccaaagactggaagaaccaagatcattatgcagttcttggacttggccatgtgagatacaaggctacacagagacagatcaaagcagctcataaagcaatggttttaaaacatcacccagacaaacggaaagcagctggtgaaccaataaaagaaggagataatgactacttcacttgcataactaaaggatccccaggtgattcttatcagaagctcatcctacagttaattcatcttatgaaatgttatctgatccagtgaaaagacgagcatttaacagtgtagatcctacttttgataactcagttccttctaaaagtgaagcaaaggataatttcttcgaagtgtttaccccagtgtttgaaaggaattccagatggtcaaataaaaaaaatgttcctaaacttggtgatatgaattcatcatttgaagatgtagatatattttattctttctggtataattttgattcttggagagaattttcttatttagatgaagaagaaaaagaaaaagcagaatgtcgtgatgagaggagatggattgaaaagcagaacagagcaacaagagcacaaagaaaaaaagaagaaatgaacagaataagaacattagttgacaatgcatacagctgtgatccaaggataaaaaagttcaaggaagaagaaaaagccaagaaagaagcagaaaagaaagcaaaagcagaagctaaacggaaggagcaagaagctaaagaaaaacaaagacaagctgaattagaagctgctcggttagctaaggagaaagaagaggaggaagtcagacagcaagcattgctggcaaagaaggaaaaagatatccagaaaaaagccattaagaaggaaaggcaaaaacttcgaaactcatgcaagacctggaatcatttttctgataatgaggcagagcgggttaaaatgatggaagaagtggaaaaactttgtgatcggcttgaactggcaagcttacagtgcttgaatgaaacactcacatcatgcacaaaagaagtaggaaaggctgctttggaaaaacagatagaagaaataaatgagcaaatcagaaaagagaaagaggaagctgaggctcgtatgcgacaagcatctaagaacacagagaaatcaactggtggaggtggaaatggaagtaaaaattggtcagaagatgatctacaattactaattaaagctgtgaatctgttccctgctggaacaaattcaagatgggaagttattgctaattacatgaacatacattcttcctctggagtcaaaagaactgccaaagatgttattggcaaagcaaagagtctccaaaaacttgaccctcatcaaaaagatgacataaataaaaaggcatttgataagttcaaaaaagaacatggagtggtacctcaagcagacaacgcaacgccttcagaacgatttgaaggtccatatacagacttcaccccttggacaacagaagaacagaagcttttggaacaagctttgaaaacatacccagtaaatacacctgaaagatgggaaaaaatagcagaagcggtgcctggcaggacaaagaaggactgcatgaaacgatacaaggaacttgtcgagatggtaaaagcaaagaaagctgctcaagaacaagtgctgaatgcaagtagagccaagaaatgacaatctttgttgtgtgtgcatttttataataaaactgaaaatactgta

SEQ ID NO: 459239 - DNA, 2552 bp, Homo sapiens
accgcacacgtggcgggggtgggagggtgtgagactggcctccacaccacgaaagatccatcccggaagtgcttactcgtcgtctccatgcgccggttcctgggcgtcttagagccaaggcgcgaggctcggagtgagaggtagagctggaggggaccctaagcgccctccgcccgggacgtgagccgctgcgcccaccgggctagacccggcgccatcatgctgcttctgccaagcgccgcggacggccggggcaccgccatcacccacgctctgacctctgcctctacactctgtcaagttgaacctgtgggaagatggtttgaagcttttgttaagaggagaaacagaaatgcttctgcctcttttcaggaactggaggataagaaagagttatccgaggaatcagaagatgaagaattgcagttggaagagtttcccatgctgaaaacacttgatcccaaagactggaagaaccaagatcattatgcagttcttggacttggccatgtgagatacaaggctacacagagacagatcaaagcagctcataaagcaatggttttaaaacatcacccagacaaacggaaagcagctggtgaaccaataaaagaaggagataatgactacttcacttgcataactaaagcttatgaaatgttatctgatccagtgaaaagacgagcatttaacagtgtagatcctacttttgataactcagttccttctaaaagtgaagcaaaggataatttcttcgaagtgtttaccccagtgtttgaaaggaattccagatggtcaaataaaaaaaatgttcctaaacttggtgatatgaattcatcatttgaagatgtagatatattttattctttctggtataattttgattcttggagagaattttcttatttagatgaagaagaaaaagaaaaagcagaatgtcgtgatgagaggagatggattgaaaagcagaacagagcaacaagagcacaaagaaaaaaagaagaaatgaacagaataagaacattagttgacaatgcatacagctgtgatccaaggataaaaaagttcaaggaagaagaaaaagccaagaaagaagcagaaaagaaagcaaaagcagaagctaaacggaaggagcaagaagctaaagaaaaacaaagacaagctgaattagaagctgctcggttagctaaggagaaagaagaggaggaagtcagacagcaagcattgctggcaaagaaggaaaaagatatccagaaaaaagccattaagaaggaaaggcaaaaacttcgaaactcatgcaagacctggaatcatttttctgataatgaggcagagcgggttaaaatgatggaagaagtggaaaaactttgtgatcggcttgaactggcaagcttacagtgcttgaatgaaacactcacatcatgcacaaaagaagtaggaaaggctgctttggaaaaacagatagaagaaataaatgagcaaatcagaaaagagaaagaggaagctgaggctcgtatgcgacaagcatctaagaacacagagaaatcaactggtggaggtggaaatggaagtaaaaattggtcagaagatgatctacaattactaattaaagctgtgaatctgttccctgctggaacaaattcaagatgggaagttattgctaattacatgaacatacattcttcctctggagtcaaaagaactgccaaagatgttattggcaaagcaaagagtctccaaaaacttggtgagttttgagaagtccatttgttactttaaacacctatttttaaaataacttatgcaatttaatgaaagattaaatgatgatctgttaagtattaaatttttttcatttctcagaccctcatcaaaaagatgacataaataaaaaggcatttgataagttcaaaaaagaacatggagtggtacctcaagcagacaacgcaacgccttcagaacgatttgaaggtaaattttgcttttctaaacgtagaaaatgctagccatgtatctgtgctgcttggacgtacaagacttagggtctatgttcagaatgatagggaaataaaatgtttagcagactggaagctgtaagcaaacatttccagggcaaagatttacttcacctaaccattaaaaatggagaattgcagttgttccatttcagatgccattagagaagggggctgtttgttttgcttaccaggttttacaaaacagtgttagaggatattattgggactaaagaatagtgttatatcgggataattgcttgattttgagaaatgtactgtaattatataagaaaatgtccttatgtttaaggaaaaacacagaagtgttaaggaataaagaggcatcatgtctgtaacttatggttcaaagtatgtctgtacatataggtaaaaataattagcaaatatgaaaatgttcacatttggggaatgtaggcagagtatacagggattctttctactcctctaaaattatttcaaaataaaatgttaaaaattgttagggttcaaaaccaggaaacatagtaagactca

SEQ ID NO: 459240 - DNA, 1577 bp, Homo sapiens
gacttctatgttttaaggagggaaatacttgttttcttgcaggaaaaaataggtaaagttatggtgatgtgatcttaacaatttttttctcagcttatgaaatgttatctgatccagtgaaaagacgagcatttaacagtgtagatcctacttttgataactcagttccttctaaaagtgaagcaaaggataatttcttcgaagtgtttaccccagtgtttgaaaggaattccagatggtcaaataaaaaaaatgttcctaaacttggtgatatgaattcatcatttgaagatgtagatatattttattctttctggtataattttgattcttggagagaattttcttatttagatgaagaagaaaaagaaaaagcagaatgtcgtgatgagaggagatggattgaaaagcagaacagagcaacaagagcacaaagaaaaaaagaagaaatgaacagaataagaacattagttgacaatgcatacagctgtgatccaaggataaaaaagttcaaggaagaagaaaaagccaagaaagaagcagaaaagaaagcaaaagcagaagctaaacggaaggagcaagaagctaaagaaaaacaaagacaagctgaattagaagctgctcggttagctaaggagaaagaagaggaggaagtcagacagcaagcattgctggcaaagaaggaaaaagatatccagaaaaaagccattaagaaggaaaggcaaaaacttcgaaactcatgcaagacctggaatcatttttctgataatgaggcagagcgggttaaaatgatggaagaagtggaaaaactttgtgatcggcttgaactggcaagcttacagtgcttgaatgaaacactcacatcatgcacaaaagaagtaggaaaggctgctttggaaaaacagatagaagaaataaatgagcaaatcagaaaagagaaagaggaagctgaggctcgtatgcgacaagcatctaagaacacagagaaatcaactggtggaggtggaaatggaagtaaaaattggtcagaagatgatctacaattactaattaaagctgtgaatctgttccctgctggaacaaattcaagatgggaagttattgctaattacatgaacatacattcttcctctggagtcaaaagaactgccaaagatgttattggcaaagcaaagagtctccaaaaacttgaccctcatcaaaaagatgacataaataaaaaggcatttgataagttcaaaaaagaacatggagtggtacctcaagcagacaacgcaacgccttcagaacgatttgaaggtccatatacagacttcaccccttggacaacagaagaacagaagcttttggaacaagctttgaaaacatacccagtaaatacacctgaaagatgggaaaaaatagcagaagcggtgcctggcaggacaaagaaggactgcatgaaacgatacaaggaacttgtcgagatggtaaaagcaaagaaagctgctcaagaacaagtgctgaatgcaagtagagccaagaaatgacaatctttgttgtgtgtgcatttttataataaaactgaaaatactgta

SEQ ID NO: 459241 - DNA, 1999 bp, Homo sapiens
accgcacacgtggcgggggtgggagggtgtgagactggcctccacaccacgaaagatccatcccggaagtgcttactcgtcgtctccatgcgccggttcctgggcgtcttagagccaaggcgcgaggctcggagtgagaggtagagctggaggggaccctaagcgccctccgcccgggacgtgagccgctgcgcccaccgggctagacccggcgccatcatgctgcttctgccaagcgccgcggacggccggggcaccgccatcacccacgctctgacctctgcctctacactctgtcaagttgaacctgtgggaagatggtttgaagcttttgttaagaggagaaacagaaatgcttctgcctcttttcaggaactggaggataagaaagagttatccgaggaatcagaagatgaagaattgcagttggaagagtttcccatgctgaaaacacttgatcccaaagactggaagaaccaagatcattatgcagttcttggacttggccatgtgagatacaaggctacacagagacagatcaaagcagctcataaagcaatggttttaaaacatcacccagacaaacggaaagcagctggtgaaccaataaaagaaggagataatgactacttcacttgcataactaaagcttatgaaatgttatctgatccagtgaaaagacgagcatttaacagtgtagatcctacttttgataactcagttccttctaaaagtgaagcaaaggataatttcttcgaagtgtttaccccagtgtttgaaaggaattccagatggtcaaataaaaaaaatgttcctaaacttggtgatatgaattcatcatttgaagatgtagatatattttattctttctggtataattttgattcttggagagaattttcttatttagatgaagaagaaaaagaaaaagcagaatgtcgtgatgagaggagatggattgaaaagcagaacagagcaacaagagcacaaagaaaaaaagaagaaatgaacagaataagaacattagttgacaatgcatacagctgtgatccaaggataaaaaagttcaaggaagaagaaaaagccaagaaagaagcagaaaagaaagcaaaagcagaagctaaacggaaggagcaagaagctaaagaaaaacaaagacaagctgaattagaagctgctcggttagctaaggagaaagaagaggaggaagtcagacagcaagcattgctggcaaagaaggaaaaagatatccagaaaaaagccattaagaaggaaaggcaaaaacttcgaaactcatgcaagacctggaatcatttttctgataatgaggcagagcgggttaaaatgatggaagaagtggaaaaactttgtgatcggcttgaactggcaaggtatacctatggaactgctattgaagtcttcacttgagcttaggataaagtttcatttcttctttttttttctttagcttacagtgcttgaatgaaacactcacatcatgcacaaaagaagtaggaaaggctgctttggaaaaacagatagaagaaataaatgagcaaatcagaaaagagaaagaggaagctgaggctcgtatgcgacaagcatctaagaacacagagaaatcaactggtggaggtggaaatggaagtaaaaattggtcagaagatgatctacaattactaattaaagctgtgaatctgttccctgctggaacaaattcaaggtactggttttaatgaaacttttcttcaactcacactggagcctggagataatgtagacagactccaaatagcagcacttgttatcacagaaacttgcagagataaattctgtgccacagcagaaaagtatgcacatatacatatgacagaatacttgtttctcaggaaattgaagatcatgagacaagtcttgatttatgttggcttactctgtcatggcttgttctagggattaggttttctgtagtttttcttttacagtcttgctctttgtt

SEQ ID NO: 459242 - DNA, 1552 bp, Homo sapiens
  misc_feature (41)..(41): n is a, c, g, or t
  misc_feature (43)..(43): n is a, c, g, or t
  misc_feature (45)..(47): n is a, c, g, or t
  misc_feature (51)..(51): n is a, c, g, or t
  misc_feature (54)..(54): n is a, c, g, or t
  misc_feature (56)..(56): n is a, c, g, or t
  misc_feature (61)..(61): n is a, c, g, or t
  misc_feature (65)..(65): n is a, c, g, or t
  misc_feature (70)..(70): n is a, c, g, or t
  misc_feature (72)..(72): n is a, c, g, or t
  misc_feature (83)..(84): n is a, c, g, or t
  misc_feature (123)..(123): n is a, c, g, or t
ggtcacagctgattcttgagggtacaacgacgcccagtgantngnnngtcntgngnatggntgcnttcangnacgacaccgannctatgcgaactagaaagttcatgaccaaccgactacttnagaggaaacaaatggtcattgatgtccttcaccccgggaaggcgacagtgcctaagacagaaattcgggaaaaactagccaaaatgtacaagaccacaccggatgtcatctttgtatttggattcagaactcattttggtggtggcaggacaactggctttggcatgatttatgattccctggattatgcaaagaaaaatgaacccaaacatagacttgcaagacatggcctgtatgagaagaaaaagacctcaagaaagcaacgaaaggaacaacaagagcacaaagaaaaaaagaagaaatgaacagaataagaacattagttgacaatgcatacagctgtgatccaaggataaaaaagttcaaggaagaagaaaaagccaagaaagaagcagaaaagaaagcaaaagcagaagctaaacggaaggagcaagaagctaaagaaaaacaaagacaagctgaattagaagctgctcggttagctaaggagaaagaagaggaggaagtcagacagcaagcattgctggcaaagaaggaaaaagatatccagaaaaaagccattaagaaggaaaggcaaaaacttcgaaactcatgcaagacctggaatcatttttctgataatgaggcagagcgggttaaaatgatggaagaagtggaaaaactttgtgatcggcttgaactggcaagcttacagtgcttgaatgaaacactcacatcatgcacaaaagaagtaggaaaggctgctttggaaaaacagatagaagaaataaatgagcaaatcagaaaagagaaagaggaagctgaggctcgtatgcgacaagcatctaagaacacagagaaatcaactggtggaggtggaaatggaagtaaaaattggtcagaagatgatctacaattactaattaaagctgtgaatctgttccctgctggaacaaattcaagatgggaagttattgctaattacatgaacatacattcttcctctggagtcaaaagaactgccaaagatgttattggcaaagcaaagagtctccaaaaacttgaccctcatcaaaaagatgacataaataaaaaggcatttgataagttcaaaaaagaacatggagtggtacctcaagcagacaacgcaacgccttcagaacgatttgaaggtccatatacagacttcaccccttggacaacagaagaacagaagcttttggaacaagctttgaaaacatacccagtaaatacacctgaaagatgggaaaaaatagcagaagcggtgcctggcaggacaaagaaggactgcatgaaacgatacaaggaacttgtcgagatggtaaaagcaaagaaagctgctcaagaacaagtgctgaatgcaagtagagccaagaaatgacaatctttgttgtgtgtgcatttttataataaaactgaaaatactgta

SEQ ID NO: 459243 - DNA, 1125 bp, Homo sapiens
gaaaatcaaggagaaagggaggaggcaggagggagtcgggaaaaaaaatgagagggcggaggaatggatggagggagcgaggctcagggaaaaaagacagatgtaaacaccgggagagatgagaggaacaaggagattcagggacaaagacaagctgaattagaagctgctcggttagctaaggagaaagaagaggaggaagtcagacagcaagcattgctggcaaagaaggaaaaagatatccagaaaaaagccattaagaaggaaaggcaaaaacttcgaaactcatgcaagacctggaatcatttttctgataatgaggcagagcgggttaaaatgatggaagaagtggaaaaactttgtgatcggcttgaactggcaagcttacagtgcttgaatgaaacactcacatcatgcacaaaagaagtaggaaaggctgctttggaaaaacagatagaagaaataaatgagcaaatcagaaaagagaaagaggaagctgaggctcgtatgcgacaagcatctaagaacacagagaaatcaactggtggaggtggaaatggaagtaaaaattggtcagaagatgatctacaattactaattaaagctgtgaatctgttccctgctggaacaaattcaagatgggaagttattgctaattacatgaacatacattcttcctctggagtcaaaagaactgccaaagatgttattggcaaagcaaagagtctccaaaaacttgaccctcatcaaaaagatgacataaataaaaaggcatttgataagttcaaaaaagaacatggagtggtacctcaagcagacaacgcaacgccttcagaacgatttgaaggtccatatacagacttcaccccttggacaacagaagaacagaagcttttggaacaagctttgaaaacatacccagtaaatacacctgaaagatgggaaaaaatagcagaagcggtgcctggcaggacaaagaaggactgcatgaaacgatacaaggaacttgtcgagatggtaaaagcaaagaaagctgctcaagaacaagtgctgaatgcaagtagagccaagaaatgacaatctttgttgtgtgtgcatttttataataaaactgaaaatactgta

SEQ ID NO: 459244 - DNA, 763 bp, Homo sapiens
tatacacaaataagtggttttatttatgttgatttgtacaccaaatctgtaagatgtatggacttaaaaccaagattatcgttgatttaaacacatgaaaagcaaaaaccgtagtccaggcaacaggaatttatagtagcagcataattagaccaccaatctgagctcattctgtacatactataacctttctgcagtaaaaatctaatggtttttgtcgtttcattttgtttttccttactactattcatattattgtataatatatcctatcagatgggaagttattgctaattacatgaacatacattcttcctctggagtcaaaagaactgccaaagatgttattggcaaagcaaagagtctccaaaaacttgaccctcatcaaaaagatgacataaataaaaaggcatttgataagttcaaaaaagaacatggagtggtacctcaagcagacaacgcaacgccttcagaacgatttgaaggtccatatacagacttcaccccttggacaacagaagaacagaagcttttggaacaagctttgaaaacatacccagtaaatacacctgaaagatgggaaaaaatagcagaagcggtgcctggcaggacaaagaaggactgcatgaaacgatacaaggaacttgtcgagatggtaaaagcaaagaaagctgctcaagaacaagtgctgaatgcaagtagagccaagaaatgacaatctttgttgtgtgtgcatttttataataaaactgaaaatactgta

SEQ ID NO: 459245 - DNA, 1110 bp, Homo sapiens
tatacacaaataagtggttttatttatgttgatttgtacaccaaatctgtaagatgtatggacttaaaaccaagattatcgttgatttaaacacatgaaaagcaaaaaccgtagtccaggcaacaggaatttatagtagcagcataattagaccaccaatctgagctcattctgtacatactataacctttctgcagtaaaaatctaatggtttttgtcgtttcattttgtttttccttactactattcatattattgtataatatatcctatcagatgggaagttattgctaattacatgaacatacattcttcctctggagtcaaaagaactgccaaagatgttattggcaaagcaaagagtctccaaaaacttggtgagttttgagaagtccatttgttactttaaacacctatttttaaaataacttatgcaatttaatgaaagattaaatgatgatctgttaagtattaaatttttttcatttctcagaccctcatcaaaaagatgacataaataaaaaggcatttgataagttcaaaaaagaacatggagtggtacctcaagcagacaacgcaacgccttcagaacgatttgaaggtccatatacagacttcaccccttggacaacagaagaacagaagcttttggaacaagctttgaaaacatacccagtaaatacacctgaaagatgggaaaaaatagcagaagcggtgcctggcaggacaaagaaggactgcatgaaacgatacaaggaacttgtcgagatggtaaaagcaaagaaagctgctcaagaacaagtgctgaatgcaagtagagccaagaaatgacaatctttgttgtgtgtgcatttttataataaaactgaaaatactgtaaacattttcattcttaaaattatactcatggtaataatttgaaagtatgctgcttccaacataatttctcagagaacaaagactgaccattaatacaaaacaaccttcagaggggtagtctttttatcctttgaaagtatgatacagtatttaattcaaatttccaaatgtatatacatgttcatttttatttttctctagctctgttttataaatacatgtgttcaaaca

SEQ ID NO: 459246 - DNA, 244 bp, Homo sapiens
aaagcaatggttttaaaacatcacccagacaaacggaaagcagctggtgaaccaataaaagaaggagataatgactacttcacttgcataactaaaggtaagaaaatgctttagagtcaggaatttctaatagtaattgttatttattaattgctgggattgggtttcttatgcatactgtagttcattcaactatcctttgacattttaaaacattttagttatatcaagttctttctaatca

SEQ ID NO: 459247 - DNA, 915 bp, Homo sapiens
accgcacacgtggcgggggtgggagggtgtgagactggcctccacaccacgaaagatccatcccggaagtgcttactcgtcgtctccatgcgccggttcctgggcgtcttagagccaaggcgcgaggctcggagtgagaggtagagctggaggggaccctaagcgccctccgcccgggacgtgagccgctgcgcccaccgggctagacccggcgccatcatgctgcttctgccaagcgccgcggacggccggggcaccgccatcacccacgctctgacctctgcctctacactctgtcaagttgaacctgtgggaagatggtttgaagcttttgttaagaggagaaacagaaatgcttctgcctcttttcaggaactggaggataagaaagagttatccgaggaatcagaagatgaagaattgcagttggaagagtttcccatgctgaaaacacttgatcccaaagactggaagaaccaagatcattatgcagttcttggacttggccatgtgagatacaaggctacacagagacagatcaaagcagctcataaagcaatggttttaaaacatcacccagacaaacggaaagcagctggtgaaccaataaaagaaggagataatgactacttcacttgcataactaaagcttatgaaatgttatctgatccagtgaaaagacgagcatttaacagtgtagatcctacttttgataactcagttccttctaaaagtgaagcaaaggataatttcttcgaagtgtttaccccagtgtttgaaaggaattccagatggtcaaataaaaaaaatgttcctaaacttggtgatatgaattcatcatttgaagatgtagatatattttattctttctggtaagtgaatatactgtttgtatgatgctgtcattttttaaaa

SEQ ID NO: 459248 - DNA, 2203 bp, Homo sapiens
accgcacacgtggcgggggtgggagggtgtgagactggcctccacaccacgaaagatccatcccggaagtgcttactcgtcgtctccatgcgccggttcctgggcgtcttagagccaaggcgcgaggctcggagtgagaggtagagctggaggggaccctaagcgccctccgcccgggacgtgagccgctgcgcccaccgggctagacccggcgccatcatgctgcttctgccaagcgccgcggacggccggggcaccgccatcacccacgctctgacctctgcctctacactctgtcaagttgaacctgtgggaagatggtttgaagcttttgttaagaggagaaacagaaatgcttctgcctcttttcaggaactggaggataagaaagagttatccgaggaatcagaagatgaagaattgcagttggaagagtttcccatgctgaaaacacttgatcccaaagactggaagaaccaagatcattatgcagttcttggacttggccatgtgagatacaaggctacacagagacagatcaaagcagctcataaagcaatggttttaaaacatcacccagacaaacggaaagcagctggtgaaccaataaaagaaggagataatgactacttcacttgcataactaaagcttatgaaatgttatctgatccagtgaaaagacgagcatttaacagtgtagatcctacttttgataactcagttccttctaaaagtgaagcaaaggataatttcttcgaagtgtttaccccagtgtttgaaaggaattccagatggtcaaataaaaaaaatgttcctaaacttggtgatatgaattcatcatttgaagatgtagatatattttattctttctggtataattttgattcttggagagaattttcttatttagatgaagaagaaaaagaaaaagcagaatgtcgtgatgagaggagatggattgaaaagcagaacagagcaacaagagcacaaagaaaaaaagaagaaatgaacagaataagaacattagttggtaagtagaattgatttaagtcccctaaatgttagaaattcaaaatgagattaactttttcttttgctagacaatgcatacagctgtgatccaaggataaaaaagttcaaggaagaagaaaaagccaagaaagaagcagaaaagaaagcaaaagcagaagctaaacggaaggagcaagaagctaaagaaaaacaaagacaagctgaattagaagctgctcggttagctaaggagaaagaagaggaggaagtcagacagcaagcattgctggcaaagaaggaaaaagatatccagaaaaaagccattaagaaggaaaggcaaaaacttcgaaactcatgcaagacctggaatcatttttctgataatgaggcagagcgggttaaaatgatggaagaagtggaaaaactttgtgatcggcttgaactggcaagcttacagtgcttgaatgaaacactcacatcatgcacaaaagaagtaggaaaggctgctttggaaaaacagatagaagaaataaatgagcaaatcagaaaagagaaagaggaagctgaggctcgtatgcgacaagcatctaagaacacagagaaatcaactggtggaggtggaaatggaagtaaaaattggtcagaagatgatctacaattactaattaaagctgtgaatctgttccctgctggaacaaattcaagatgggaagttattgctaattacatgaacatacattcttcctctggagtcaaaagaactgccaaagatgttattggcaaagcaaagagtctccaaaaacttgaccctcatcaaaaagatgacataaataaaaaggcatttgataagttcaaaaaagaacatggagtggtacctcaagcagacaacgcaacgccttcagaacgatttgaaggtccatatacagacttcaccccttggacaacagaagaacagaagcttttggaacaagctttgaaaacatacccagtaaatacacctgaaagatgggaaaaaatagcagaagcggtgcctggcaggacaaagaaggactgcatgaaacgatacaaggaacttgtcgagatggtaaaagcaaagaaagctgctcaagaacaagtgctgaatgcaagtagagccaagaaatgacaatctttgttgtgtgtgcatttttataataaaactgaaaatactgta

SEQ ID NO: 459249 - DNA, 2210 bp, Homo sapiens
accgcacacgtggcgggggtgggagggtgtgagactggcctccacaccacgaaagatccatcccggaagtgcttactcgtcgtctccatgcgccggttcctgggcgtcttagagccaaggcgcgaggctcggagtgagaggtagagctggaggggaccctaagcgccctccgcccgggacgtgagccgctgcgcccaccgggctagacccggcgccatcatgctgcttctgccaagcgccgcggacggccggggcaccgccatcacccacgctctgacctctgcctctacactctgtcaagttgaacctgtgggaagatggtttgaagcttttgttaagaggagaaacagaaatgcttctgcctcttttcaggaactggaggataagaaagagttatccgaggaatcagaagatgaagaattgcagttggaagagtttcccatgctgaaaacacttgatcccaaagactggaagaaccaagatcattatgcagttcttggacttggccatgtgagatacaaggctacacagagacagatcaaagcagctcataaagcaatggttttaaaacatcacccagacaaacggaaagcagctggtgaaccaataaaagaaggagataatgactacttcacttgcataactaaagcttatgaaatgttatctgatccagtgaaaagacgagcatttaacagtgtagatcctacttttgataactcagttccttctaaaagtgaagcaaaggataatttcttcgaagtgtttaccccagtgtttgaaaggaattccagatggtcaaataaaaaaaatgttcctaaacttggtgatatgaattcatcatttgaagatgtagatatattttattctttctggtataattttgattcttggagagaattttcttatttagatgaagaagaaaaagaaaaagcagaatgtcgtgatgagaggagatggattgaaaagcagaacagagcaacaagagcacaaagaaaaaaagaagaaatgaacagaataagaacattagttgacaatgcatacagctgtgatccaaggataaaaaagttcaaggaagaagaaaaagccaagaaagaagcagaaaagaaagcaaaagcagaagctaaacggaaggagcaagaagctaaagaaaaacaaagacaagctgaattagaagctgctcggttagctaaggagaaagaagaggaggaagtcagacagcaagcattgctggcaaagaaggaaaaagatatccagaaaaaagccattaagaaggaaaggcaaaaacttcgaaactcatgcaagacctggaatcatttttctgataatgaggcagagcgggttaaaatgatggaagaagtggaaaaactttgtgatcggcttgaactggcaaggtatacctatggaactgctattgaagtcttcacttgagcttaggataaagtttcatttcttctttttttttctttagcttacagtgcttgaatgaaacactcacatcatgcacaaaagaagtaggaaaggctgctttggaaaaacagatagaagaaataaatgagcaaatcagaaaagagaaagaggaagctgaggctcgtatgcgacaagcatctaagaacacagagaaatcaactggtggaggtggaaatggaagtaaaaattggtcagaagatgatctacaattactaattaaagctgtgaatctgttccctgctggaacaaattcaagatgggaagttattgctaattacatgaacatacattcttcctctggagtcaaaagaactgccaaagatgttattggcaaagcaaagagtctccaaaaacttgaccctcatcaaaaagatgacataaataaaaaggcatttgataagttcaaaaaagaacatggagtggtacctcaagcagacaacgcaacgccttcagaacgatttgaaggtccatatacagacttcaccccttggacaacagaagaacagaagcttttggaacaagctttgaaaacatacccagtaaatacacctgaaagatgggaaaaaatagcagaagcggtgcctggcaggacaaagaaggactgcatgaaacgatacaaggaacttgtcgagatggtaaaagcaaagaaagctgctcaagaacaagtgctgaatgcaagtagagccaagaaatgacaatctttgttgtgtgtgcatttttataataaaactgaaaatactgta

SEQ ID NO: 459250 - DNA, 2436 bp, Homo sapiens
accgcacacgtggcgggggtgggagggtgtgagactggcctccacaccacgaaagatccatcccggaagtgcttactcgtcgtctccatgcgccggttcctgggcgtcttagagccaaggcgcgaggctcggagtgagaggtagagctggaggggaccctaagcgccctccgcccgggacgtgagccgctgcgcccaccgggctagacccggcgccatcatgctgcttctgccaagcgccgcggacggccggggcaccgccatcacccacgctctgacctctgcctctacactctgtcaagttgaacctgtgggaagatggtttgaagcttttgttaagaggagaaacagaaatgcttctgcctcttttcaggaactggaggataagaaagagttatccgaggaatcagaagatgaagaattgcagttggaagagtttcccatgctgaaaacacttgatcccaaagactggaagaaccaagatcattatgcagttcttggacttggccatgtgagatacaaggctacacagagacagatcaaagcagctcataaagcaatggttttaaaacatcacccagacaaacggaaagcagctggtgaaccaataaaagaaggagataatgactacttcacttgcataactaaagcttatgaaatgttatctgatccagtgaaaagacgagcatttaacagtgtagatcctacttttgataactcagttccttctaaaagtgaagcaaaggataatttcttcgaagtgtttaccccagtgtttgaaaggaattccagatggtcaaataaaaaaaatgttcctaaacttggtgatatgaattcatcatttgaagatgtagatatattttattctttctggtataattttgattcttggagagaattttcttatttagatgaagaagaaaaagaaaaagcagaatgtcgtgatgagaggagatggattgaaaagcagaacagagcaacaagagcacaaagaaaaaaagaagaaatgaacagaataagaacattagttgacaatgcatacagctgtgatccaaggataaaaaagttcaaggaagaagaaaaagccaagaaagaagcagaaaagaaagcaaaagcagaagctaaacggaaggagcaagaagctaaagaaaaacaaagacaagctgaattagaagctgctcggttagctaaggagaaagaagaggaggaagtcagacagcaagcattgctggcaaagaaggaaaaagatatccagaaaaaagccattaagaaggaaaggcaaaaacttcgaaactcatgcaagacctggaatcatttttctgataatgaggcagagcgggttaaaatgatggaagaagtggaaaaactttgtgatcggcttgaactggcaagcttacagtgcttgaatgaaacactcacatcatgcacaaaagaagtaggaaaggctgctttggaaaaacagatagaagaaataaatgagcaaatcagaaaagagaaagaggaagctgaggctcgtatgcgacaagcatctaagaacacagagaaatcaactggtggaggtggaaatggaagtaaaaattggtcagaagatgatctacaattactaattaaagctgtgaatctgttccctgctggaacaaattcaagatgggaagttattgctaattacatgaacatacattcttcctctggagtcaaaagaactgccaaagatgttattggcaaagcaaagagtctccaaaaacttgaccctcatcaaaaagatgacataaataaaaaggcatttgataagttcaaaaaagaacatggagtggtacctcaagcagacaacgcaacgccttcagaacgatttgaaggtaaattttgcttttctaaacgtagaaaatgctagccatgtatctgtgctgcttggacgtacaagacttagggtctatgttcagaatgatagggaaataaaatgtttagcagactggaagctgtaagcaaacatttccagggcaaagatttacttcacctaaccattaaaaatggagaattgcagttgttccatttcagatgccattagagaagggggctgtttgttttgcttaccaggttttacaaaacagtgttagaggatattattgggactaaagaatagtgttatatcgggataattgcttgattttgagaaatgtactgtaattatataagaaaatgtccttatgtttaaggaaaaacacagaagtgttaaggaataaagaggcatcatgtctgtaacttatggttcaaagtatgtctgtacatataggtaaaaataattagcaaatatgaaaatgttcacatttggggaatgtaggcagagtatacagggattctttctactcctctaaaattatttcaaaataaaatgttaaaaattgttagggttcaaaaccaggaaacatagtaagactca

SEQ ID NO: 459251 - DNA, 1922 bp, Homo sapiens
accgcacacgtggcgggggtgggagggtgtgagactggcctccacaccacgaaagatccatcccggaagtgcttactcgtcgtctccatgcgccggttcctgggcgtcttagagccaaggcgcgaggctcggagtgagaggtagagctggaggggaccctaagcgccctccgcccgggacgtgagccgctgcgcccaccgggctagacccggcgccatcatgctgcttctgccaagcgccgcggacggccggggcaccgccatcacccacgctctgacctctgcctctacactctgtcaagttgaacctgtgggaagatggtttgaagcttttgttaagaggagaaacagaaatgcttctgcctcttttcaggaactggaggataagaaagagttatccgaggaatcagaagatgaagaattgcagttggaagagtttcccatgctgaaaacacttgatcccaaagactggaagaaccaagatcattatgcagttcttggacttggccatgtgagatacaaggctacacagagacagatcaaagcagctcataaagcaatggttttaaaacatcacccagacaaacggaaagcagctggtgaaccaataaaagaaggagataatgactacttcacttgcataactaaagcttatgaaatgttatctgatccagtgaaaagacgagcatttaacagtgtagatcctacttttgataactcagttccttctaaaagtgaagcaaaggataatttcttcgaagtgtttaccccagtgtttgaaaggaattccagatggtcaaataaaaaaaatgttcctaaacttggtgatatgaattcatcatttgaagatgtagatatattttattctttctggtataattttgattcttggagagaattttcttatttagatgaagaagaaaaagaaaaagcagaatgtcgtgatgagaggagatggattgaaaagcagaacagagcaacaagagcacaaagaaaaaaagaagaaatgaacagaataagaacattagttgacaatgcatacagctgtgatccaaggataaaaaagttcaaggaagaagaaaaagccaagaaagaagcagaaaagaaagcaaaagcagaagctaaacggaaggagcaagaagctaaagaaaaacaaagacaagctgaattagaagctgctcggttagctaaggagaaagaagaggaggaagtcagacagcaagcattgctggcaaagaaggaaaaagatatccagaaaaaagccattaagaaggaaaggcaaaaacttcgaaactcatgcaagacctggaatcatttttctgataatgaggcagagcgggttaaaatgatggaagaagtggaaaaactttgtgatcggcttgaactggcaagcttacagtgcttgaatgaaacactcacatcatgcacaaaagaagtaggaaaggctgctttggaaaaacagatagaagaaataaatgagcaaatcagaaaagagaaagaggaagctgaggctcgtatgcgacaagcatctaagaacacagagaaatcaactggtggaggtggaaatggaagtaaaaattggtcagaagatgatctacaattactaattaaagctgtgaatctgttccctgctggaacaaattcaaggtactggttttaatgaaacttttcttcaactcacactggagcctggagataatgtagacagactccaaatagcagcacttgttatcacagaaacttgcagagataaattctgtgccacagcagaaaagtatgcacatatacatatgacagaatacttgtttctcaggaaattgaagatcatgagacaagtcttgatttatgttggcttactctgtcatggcttgttctagggattaggttttctgtagtttttcttttacagtcttgctctttgtt

SEQ ID NO: 459252 - DNA, 1493 bp, Homo sapiens
acctaacaaagaagagatagcagggcggtgtggttttgattatggagtgatatgtgcattttagattttcataccaaatgcaatgtccttaaaaaaggagaaagacttgaccttagttcaatactagaagggaaggaaaggtatccattaaaacaaattcattcacttgcattaaaaagaattttttttcatttattctgtcttgatcatgtattatttctgtctatattaggtataattttgattcttggagagaattttcttatttagatgaagaagaaaaagaaaaagcagaatgtcgtgatgagaggagatggattgaaaagcagaacagagcaacaagagcacaaagaaaaaaagaagaaatgaacagaataagaacattagttgacaatgcatacagctgtgatccaaggataaaaaagttcaaggaagaagaaaaagccaagaaagaagcagaaaagaaagcaaaagcagaagctaaacggaaggagcaagaagctaaagaaaaacaaagacaagctgaattagaagctgctcggttagctaaggagaaagaagaggaggaagtcagacagcaagcattgctggcaaagaaggaaaaagatatccagaaaaaagccattaagaaggaaaggcaaaaacttcgaaactcatgcaagacctggaatcatttttctgataatgaggcagagcgggttaaaatgatggaagaagtggaaaaactttgtgatcggcttgaactggcaagcttacagtgcttgaatgaaacactcacatcatgcacaaaagaagtaggaaaggctgctttggaaaaacagatagaagaaataaatgagcaaatcagaaaagagaaagaggaagctgaggctcgtatgcgacaagcatctaagaacacagagaaatcaactggtggaggtggaaatggaagtaaaaattggtcagaagatgatctacaattactaattaaagctgtgaatctgttccctgctggaacaaattcaagatgggaagttattgctaattacatgaacatacattcttcctctggagtcaaaagaactgccaaagatgttattggcaaagcaaagagtctccaaaaacttgaccctcatcaaaaagatgacataaataaaaaggcatttgataagttcaaaaaagaacatggagtggtacctcaagcagacaacgcaacgccttcagaacgatttgaaggtccatatacagacttcaccccttggacaacagaagaacagaagcttttggaacaagctttgaaaacatacccagtaaatacacctgaaagatgggaaaaaatagcagaagcggtgcctggcaggacaaagaaggactgcatgaaacgatacaaggaacttgtcgagatggtaaaagcaaagaaagctgctcaagaacaagtgctgaatgcaagtagagccaagaaatgacaatctttgttgtgtgtgcatttttataataaaactgaaaatactgta

SEQ ID NO: 459253 - DNA, 1945 bp, Homo sapiens
accgcacacgtggcgggggtgggagggtgtgagactggcctccacaccacgaaagatccatcccggaagtgcttactcgtcgtctccatgcgccggttcctgggcgtcttagagccaaggcgcgaggctcggagtgagaggtagagctggaggggaccctaagcgccctccgcccgggacgtgagccgctgcgcccaccgggctagacccggcgccatcatgctgcttctgccaagcgccgcggacggccggggcaccgccatcacccacgctctgacctctgcctctacactctgtcaagttgaacctgtgggaagatggtttgaagcttttgttaagaggagaaacagaaatgcttctgcctcttttcaggaactggaggataagaaagagttatccgaggaatcagaagatgaagaattgcagttggaagagtttcccatgctgaaaacacttgatcccaaagactggaagaaccaagatcattatgcagttcttggacttggccatgtgagatacaaggctacacagagacagatcaaagcagctcataaagcaatggttttaaaacatcacccagacaaacggaaagcagctggtgaaccaataaaagaaggagataatgactacttcacttgcataactaaagcttatgaaatgttatctgatccagtgaaaagacgagcatttaacagtgtagatcctacttttgataactcagttccttctaaaagtgaagcaaaggataatttcttcgaagtgtttaccccagtgtttgaaaggaattccagatggtcaaataaaaaaaatgttcctaaacttggtgatatgaattcatcatttgaagatgtagatatattttattctttctggtataattttgattcttggagagaattttcttatttagatgaagaagaaaaagaaaaagcagaatgtcgtgatgagaggagatggattgaaaagcagaacagagcaacaagagcacaaagaaaaaaagaagaaatgaacagaataagaacattagttgacaatgcatacagctgtgatccaaggataaaaaagttcaaggaagaagaaaaagccaagaaagaagcagaaaagaaagcaaaagcagaagctaaacggaaggagcaagaagctaaagaaaaacaaagacaagctgaattagaagctgctcggttagctaaggagaaagaagaggaggaagtcagacagcaagcattgctggcaaagaaggaaaaagatatccagaaaaaagccattaagaaggaaaggcaaaaacttcgaaactcatgcaagacctggaatcatttttctgataatgaggcagagcgggttaaaatgatggaagaagtggaaaaactttgtgatcggcttgaactggcaaggtatacctatggaactgctattgaagtcttcacttgagcttaggataaagtttcatttcttctttttttttctttagcttacagtgcttgaatgaaacactcacatcatgcacaaaagaagtaggaaaggctgctttggaaaaacagatagaagaaataaatgagcaaatcagaaaagagaaagaggaagctgaggctcgtatgcgacaagcatctaagaacacagagaaatcaactggtggaggtggaaatggaagtactgctggaacaaattcaaggtactggttttaatgaaacttttcttcaactcacactggagcctggagataatgtagacagactccaaatagcagcacttgttatcacagaaacttgcagagataaattctgtgccacagcagaaaagtatgcacatatacatatgacagaatacttgtttctcaggaaattgaagatcatgagacaagtcttgatttatgttggcttactctgtcatggcttgttctagggattaggttttctgtagtttttcttttacagtcttgctctttgtt

SEQ ID NO: 459254 - DNA, 260 bp, Homo sapiens
agtctggtgagtagctgggactacaggcatgagccacactgttggcctcttcttgtacctctgaggtttcatttcttacatatgatttctttttgatactgctgagatttattctggtataaattgtgaggtgagatttcaccccatgttttaaaaaacaattttaggatttcttgatcttttatgtcttgtctggagagtaatttgtcagctgttttctgctaaactgtgagtggtgtaagaccagttagctatgccct

SEQ ID NO: 459255 - DNA, 1474 bp, Homo sapiens
gcagcctcacggcaagactactttgttctggggctcccccgacctcggcctgggccctgctgtctctacctgtggggcctacacatgtggacagctacagccagggggtgccacggtcacaccacccaacaaagcaagaaccccccagcagagaatgccctttcaaaggtgccactgaactctatccttggagacaacccctggctccgagggactgggtgtgcggtccagaactgcggtgccctgggctcaaccctggctgaaggcgctgaacacctcccacgaggcacctgcacctttgggtcagcaaagctccaaagaacctgttctcaggtgctgagaaaccactgtctcccccaagggcaaggccagccctgcccgcccttctcttggacggtattgaggccacagtattgcacccagcagggttccaattctctaggaatggaacgcagtgatctggataggaattaaatagatgaagtggagggtttgctcccacactggcttccacatcaacagcaccagttttgaccacgtggagctgctggcggagggcgcgcatggtggctgttgcccgtccggtgttttgctggattaatgtagactgctttgtttgcagggctcattgtcatccccaagccaggccagttctccaggtggaactgtagtgtagcgacctcactgctgcgcgcacagtctcccgggacttggactcgagggagtgacgaggaggagctccgagctgcgcctgagccgtgccagccggcggacctcaggcggtggacgtcggcgatactgtgtggacggtgaccggctcactctgcggcgccgtgctcccgctgctcacccaaagaagttgtttccattttaaaccggtcttttggggctgcagtaaaaaataagaaatggagttttcttgctttttactctaaaattcaatgtaattaaatttcatatatatataatatatacatatatacatagtgtaaaataaaatgtttcttggacaagaaatcccctgaaattcagctgttatagtgcttcactgtttttgcactgatttttctataccttaggtggtcagaagacaaccttgaatgcactcatagagaaaactgttactttctgacgtaatgtaattcaggaagacagacgctgcaatcacagattttaaaaaattgtttgcacttaaaaatagttgaatgctggtggaaagttactttgcagatgggtgtaaggactcatggccctctgaggtgcggcgtgaagatgccctttttacccgttgacgtttattttacgtaaaataaactgttgtttccaatgcaatcaactctgtattatatgtataaatattgtaattctgcaattggggaaaatagttacttcactagtaattttcatcatttaagagtgatatttctaattcacaaaagttaatattaaaactatcttgaatataaaaaaaatt

SEQ ID NO: 459256 - DNA, 2431 bp, Homo sapiens
agcgggcgcggtgggcgtgatccgggcacttagggcaggatgaacgctgctttccaagatggcgacggagggaggagggaaggagatgaacgagattaagacccaattcaccacccgggaaggtctgtacaagctgctgccgcactcggagtacagccggcccaaccgggtgcccttcaactcgcagggatccaaccctgtccgcgtctccttcgtaaacctcaacgaccagtctggcaacggcgaccgcctctgcttcaatgtgggccgggagctgtacttctatatctacaagggggtccgcaaggctgctgacttgagtaaaccaatagataaaaggatatacaaaggaacacagcctacttgtcatgacttcaaccacctaacagccacagcagaaagtgtctctctcctagtgggcttttccgcaggccaagtccagcttatagacccaatcaaaaaagaaactagcaaactttttaatgaggaaagactaatagacaagtcacgagttacctgtgtcaaatgggttcccggttcggaaagccttttcctagtagcccactcgagtgggaacatgtacttatataatgtggagcacacttgtggcaccacagccccccactaccagcttctgaagcagggagagagctttgccgtgcacacttgcaagagcaaatccacgaggaaccctctccttaagtggacggtgggcgagggggccctcaacgagtttgctttctccccagatggcaagttcttagcgtgcgtgagccaggacgggtttctgcgggtgttcaactttgactcagtggagctgcacggtacgatgaaaagctactttgggggcttgctgtgtgtgtgctggagcccggatggcaagtacatcgtgacaggtggggaggacgacttggtgacagtctggtcctttgtagactgccgagtaatagccagaggccacgggcacaagtcctgggtcagtgttgtagcgtttgacccttataccactagtgtagaagaaggtgaccctatggagtttagtggcagcgatgaggacttccaagaccttcttcattttggcagagatcgagcaaatagtacacagtccaggctctccaaacggaactctacagacagccgccccgtaagtgtcacgtatcggtttggttccgtgggccaggacacacagctctgtttatgggaccttacagaagatatccttttccctcaccaacccctctcaagagcaaggacacacacaaatgtcatgaatgccacgagtcctcctgctggaagcaatgggaacagtgttacaacacccgggaactctgtgccgcctcctctgccacggtccaacagccttccacattcagcagtctcaaatgctggcagcaaaagcagtgtcatggacggggccattgcttctggggtcagcaaatttgcaacactttcactacatgaccggaaggagaggcaccacgagaaagatcacaagcgaaatcatagcatgggacacatttctagcaagagcagtgacaaactgaatctagttaccaaaaccaaaacggaccctgctaaaactctgggaacgcccctgtgtcctcgaatggaagatgttcccttgttagagccgctgatatgtaaaaagatagcacatgagagactgactgtactaatatttcttgaagactgtatagtcactgcttgtcaggagggatttatttgcacatggggaaggcctggtaaagtggtaagttttaatccttaatgctgcaccagatctagaacttgaataggtagtgacttttttctttttcgtgggaggggtggggtgtacaatgaatgtgaatgacacttcttattcttaatgtaaatctcaatgcatcagagccataattttggatactgcatgccatgtaattctgaatcatttgataatttaccttagagcatttaaaaaaatataatcaaactaattgccagccaagtcagtcatcctcctgggagtatatagagtcccaaggttagcgctcctgtattagactatttcaattttaggaaaatcatgaccatgtggggaaacaatgactttaaaatgctgaaattaaaatttatgctttaactggaatattttttgcttaactactcaattagaatattgtacacctgatcaatgtgtgttcagcacagatggccatgaattgtcatttatagtccaattttttatcttaatcataaaatgtttaggaatctatgaaatttaactttaggaacaaaacgtttagcagggttgattgatattatttttacattgttctggcaatccacagaaagagaagagccttaatttttaaaacccattttagtcattttatgacaattaaagttgtttaataaacatcttttttcaaagaagcagtttgtagcactt

SEQ ID NO: 459257 - DNA, 1157 bp, Homo sapiens
agcgggcgcggtgggcgtgatccgggcacttagggcaggatgaacgctgctttccaagatggcgacggagggaggagggaaggagatgaacgagattaagacccaattcaccacccgggaaggctgctgacttgagtaaaccaatagataaaaggatatacaaaggaacacagcctacttgtcatgacttcaaccacctaacagccacagcagaaagtgtctctctcctagtgggcttttccgcaggccaagtccagcttatagacccaatcaaaaaagaaactagcaaactttttaatgaggaaggctcattgtcatccccaagccaggccagttctccaggtggaactgtagtgtagcgacctcactgctgcgcgcacagtctcccgggacttggactcgagggagtgacgaggaggagctccgagctgcgcctgagccgtgccagccggcggacctcaggcggtggacgtcggcgatactgtgtggacggtgaccggctcactctgcggcgccgtgctcccgctgctcacccaaagaagttgtttccattttaaaccggtcttttggggctgcagtaaaaaataagaaatggagttttcttgctttttactctaaaattcaatgtaattaaatttcatatatatataatatatacatatatacatagtgtaaaataaaatgtttcttggacaagaaatcccctgaaattcagctgttatagtgcttcactgtttttgcactgatttttctataccttaggtggtcagaagacaaccttgaatgcactcatagagaaaactgttactttctgacgtaatgtaattcaggaagacagacgctgcaatcacagattttaaaaaattgtttgcacttaaaaatagttgaatgctggtggaaagttactttgcagatgggtgtaaggactcatggccctctgaggtgcggcgtgaagatgccctttttacccgttgacgtttattttacgtaaaataaactgttgtttccaatgcaatcaactctgtattatatgtataaatattgtaattctgcaattggggaaaatagttacttcactagtaattttcatcatttaagagtgatatttctaattcacaaaagttaatattaaaactatcttgaatataaaaaaaatt

SEQ ID NO: 459258 - DNA, 2248 bp, Homo sapiens
agcgggcgcggtgggcgtgatccgggcacttagggcaggatgaacgctgctttccaagatggcgacggagggaggagggaaggagatgaacgagattaagacccaattcaccacccgggaaggtctgtacaagctgctgccgcactcggagtacagccggcccaaccgggtgcccttcaactcgcagggatccaaccctgtccgcgtctccttcgtaaacctcaacgaccagtctggcaacggcgaccgcctctgcttcaatgtgggccgggagctgtacttctatatctacaagggggtccgcaagagactaatagacaagtcacgagttacctgtgtcaaatgggttcccggttcggaaagccttttcctagtagcccactcgagtgggaacatgtacttatataatgtggagcacacttgtggcaccacagccccccactaccagcttctgaagcagggagagagctttgccgtgcacacttgcaagagcaaatccacgaggaaccctctccttaagtggacggtgggcgagggggccctcaacgagtttgctttctccccagatggcaagttcttagcgtgcgtgagccaggacgggtttctgcgggtgttcaactttgactcagtggagctgcacggtacgatgaaaagctactttgggggcttgctgtgtgtgtgctggagcccggatggcaagtacatcgtgacaggtggggaggacgacttggtgacagtctggtcctttgtagactgccgagtaatagccagaggccacgggcacaagtcctgggtcagtgttgtagcgtttgacccttataccactagtgtagaagaaggtgaccctatggagtttagtggcagcgatgaggacttccaagaccttcttcattttggcagagatcgagcaaatagtacacagtccaggctctccaaacggaactctacagacagccgccccgtaagtgtcacgtatcggtttggttccgtgggccaggacacacagctctgtttatgggaccttacagaagatatccttttccctcaccaacccctctcaagagcaaggacacacacaaatgtcatgaatgccacgagtcctcctgctggaagcaatgggaacagtgttacaacacccgggaactctgtgccgcctcctctgccacggtccaacagccttccacattcagcagtctcaaatgctggcagcaaaagcagtgtcatggacggggccattgcttctggggtcagcaaatttgcaacactttcactacatgaccggaaggagaggcaccacgagaaagatcacaagcgaaatcatagcatgggacacatttctagcaagagcagtgacaaactgaatctagttaccaaaaccaaaacggaccctgctaaaactctgggaacgcccctgtgtcctcgaatggaagatgttcccttgttagagccgctgatatgtaaaaagatagcacatgagagactgactgtactaatatttcttgaagactgtatagtcactgcttgtcaggagggatttatttgcacatggggaaggcctggtaaagtggtaagttttaatccttaatgctgcaccagatctagaacttgaataggtagtgacttttttctttttcgtgggaggggtggggtgtacaatgaatgtgaatgacacttcttattcttaatgtaaatctcaatgcatcagagccataattttggatactgcatgccatgtaattctgaatcatttgataatttaccttagagcatttaaaaaaatataatcaaactaattgccagccaagtcagtcatcctcctgggagtatatagagtcccaaggttagcgctcctgtattagactatttcaattttaggaaaatcatgaccatgtggggaaacaatgactttaaaatgctgaaattaaaatttatgctttaactggaatattttttgcttaactactcaattagaatattgtacacctgatcaatgtgtgttcagcacagatggccatgaattgtcatttatagtccaattttttatcttaatcataaaatgtttaggaatctatgaaatttaactttaggaacaaaacgtttagcagggttgattgatattatttttacattgttctggcaatccacagaaagagaagagccttaatttttaaaacccattttagtcattttatgacaattaaagttgtttaataaacatcttttttcaaagaagcagtttgtagcactt

SEQ ID NO: 459259 - DNA, 2172 bp, Homo sapiens
agcgggcgcggtgggcgtgatccgggcacttagggcaggatgaacgctgctttccaagatggcgacggagggaggagggaaggagatgaacgagattaagacccaattcaccacccgggaaggtctgtacaagctgctgccgcactcggagtacagccggcccaaccgggtgcccttcaactcgcagggatccaaccctgtccgcgtctccttcgtaaacctcaacgaccagtctggcaacggcgaccgcctctgcttcaatgtgggccgggagctgtacttctatatctacaagggggtccgcaaggctgctgacttgagtaaaccaatagataaaaggatatacaaaggaacacagcctacttgtcatgacttcaaccacctaacagccacagcagaaagtgtctctctcctagtgggcttttccgcaggccaagtccagcttatagacccaatcaaaaaagaaactagcaaactttttaatgaggaaatggcaagttcttagcgtgcgtgagccaggacgggtttctgcgggtgttcaactttgactcagtggagctgcacggtacgatgaaaagctactttgggggcttgctgtgtgtgtgctggagcccggatggcaagtacatcgtgacaggtggggaggacgacttggtgacagtctggtcctttgtagactgccgagtaatagccagaggccacgggcacaagtcctgggtcagtgttgtagcgtttgacccttataccactagtgtagaagaaggtgaccctatggagtttagtggcagcgatgaggacttccaagaccttcttcattttggcagagatcgagcaaatagtacacagtccaggctctccaaacggaactctacagacagccgccccgtaagtgtcacgtatcggtttggttccgtgggccaggacacacagctctgtttatgggaccttacagaagatatccttttccctcaccaacccctctcaagagcaaggacacacacaaatgtcatgaatgccacgagtcctcctgctggaagcaatgggaacagtgttacaacacccgggaactctgtgccgcctcctctgccacggtccaacagccttccacattcagcagtctcaaatgctggcagcaaaagcagtgtcatggacggggccattgcttctggggtcagcaaatttgcaacactttcactacatgaccggaaggagaggcaccacgagaaagatcacaagcgaaatcatagcatgggacacatttctagcaagagcagtgacaaactgaatctagttaccaaaaccaaaacggaccctgctaaaactctgggaacgcccctgtgtcctcgaatggaagatgttcccttgttagagccgctgatatgtaaaaagatagcacatgagagactgactgtactaatatttcttgaagactgtatagtcactgcttgtcaggagggatttatttgcacatggggaaggcctggtaaagtggtaagttttaatccttaatgctgcaccagatctagaacttgaataggtagtgacttttttctttttcgtgggaggggtggggtgtacaatgaatgtgaatgacacttcttattcttaatgtaaatctcaatgcatcagagccataattttggatactgcatgccatgtaattctgaatcatttgataatttaccttagagcatttaaaaaaatataatcaaactaattgccagccaagtcagtcatcctcctgggagtatatagagtcccaaggttagcgctcctgtattagactatttcaattttaggaaaatcatgaccatgtggggaaacaatgactttaaaatgctgaaattaaaatttatgctttaactggaatattttttgcttaactactcaattagaatattgtacacctgatcaatgtgtgttcagcacagatggccatgaattgtcatttatagtccaattttttatcttaatcataaaatgtttaggaatctatgaaatttaactttaggaacaaaacgtttagcagggttgattgatattatttttacattgttctggcaatccacagaaagagaagagccttaatttttaaaacccattttagtcattttatgacaattaaagttgtttaataaacatcttttttcaaagaagcagtttgtagcactt

SEQ ID NO: 459260 - DNA, 2246 bp, Homo sapiens
agcgggcgcggtgggcgtgatccgggcacttagggcaggatgaacgctgctttccaagatggcgacggagggaggagggaaggagatgaacgagattaagacccaattcaccacccgggaaggctgctgacttgagtaaaccaatagataaaaggatatacaaaggaacacagcctacttgtcatgacttcaaccacctaacagccacagcagaaagtgtctctctcctagtgggcttttccgcaggccaagtccagcttatagacccaatcaaaaaagaaactagcaaactttttaatgaggaaagactaatagacaagtcacgagttacctgtgtcaaatgggttcccggttcggaaagccttttcctagtagcccactcgagtgggaacatgtacttatataatgtggagcacacttgtggcaccacagccccccactaccagcttctgaagcagggagagagctttgccgtgcacacttgcaagagcaaatccacgaggaaccctctccttaagtggacggtgggcgagggggccctcaacgagtttgctttctccccagatggcaagttcttagcgtgcgtgagccaggacgggtttctgcgggtgttcaactttgactcagtggagctgcacggtacgatgaaaagctactttgggggcttgctgtgtgtgtgctggagcccggatggcaagtacatcgtgacaggtggggaggacgacttggtgacagtctggtcctttgtagactgccgagtaatagccagaggccacgggcacaagtcctgggtcagtgttgtagcgtttgacccttataccactagtgtagaagaaggtgaccctatggagtttagtggcagcgatgaggacttccaagaccttcttcattttggcagagatcgagcaaatagtacacagtccaggctctccaaacggaactctacagacagccgccccgtaagtgtcacgtatcggtttggttccgtgggccaggacacacagctctgtttatgggaccttacagaagatatccttttccctcaccaacccctctcaagagcaaggacacacacaaatgtcatgaatgccacgagtcctcctgctggaagcaatgggaacagtgttacaacacccgggaactctgtgccgcctcctctgccacggtccaacagccttccacattcagcagtctcaaatgctggcagcaaaagcagtgtcatggacggggccattgcttctggggtcagcaaatttgcaacactttcactacatgaccggaaggagaggcaccacgagaaagatcacaagcgaaatcatagcatgggacacatttctagcaagagcagtgacaaactgaatctagttaccaaaaccaaaacggaccctgctaaaactctgggaacgcccctgtgtcctcgaatggaagatgttcccttgttagagccgctgatatgtaaaaagatagcacatgagagactgactgtactaatatttcttgaagactgtatagtcactgcttgtcaggagggatttatttgcacatggggaaggcctggtaaagtggtaagttttaatccttaatgctgcaccagatctagaacttgaataggtagtgacttttttctttttcgtgggaggggtggggtgtacaatgaatgtgaatgacacttcttattcttaatgtaaatctcaatgcatcagagccataattttggatactgcatgccatgtaattctgaatcatttgataatttaccttagagcatttaaaaaaatataatcaaactaattgccagccaagtcagtcatcctcctgggagtatatagagtcccaaggttagcgctcctgtattagactatttcaattttaggaaaatcatgaccatgtggggaaacaatgactttaaaatgctgaaattaaaatttatgctttaactggaatattttttgcttaactactcaattagaatattgtacacctgatcaatgtgtgttcagcacagatggccatgaattgtcatttatagtccaattttttatcttaatcataaaatgtttaggaatctatgaaatttaactttaggaacaaaacgtttagcagggttgattgatattatttttacattgttctggcaatccacagaaagagaagagccttaatttttaaaacccattttagtcattttatgacaattaaagttgtttaataaacatcttttttcaaagaagcagtttgtagcactt

SEQ ID NO: 459261 - DNA, 2170 bp, Homo sapiens
aggggatctctgagggatgtagtaacttgccaaggctacacagctggctgctgacttgagtaaaccaatagataaaaggatatacaaaggaacacagcctacttgtcatgacttcaaccacctaacagccacagcagaaagtgtctctctcctagtgggcttttccgcaggccaagtccagcttatagacccaatcaaaaaagaaactagcaaactttttaatgaggaaagactaatagacaagtcacgagttacctgtgtcaaatgggttcccggttcggaaagccttttcctagtagcccactcgagtgggaacatgtacttatataatgtggagcacacttgtggcaccacagccccccactaccagcttctgaagcagggagagagctttgccgtgcacacttgcaagagcaaatccacgaggaaccctctccttaagtggacggtgggcgagggggccctcaacgagtttgctttctccccagatggcaagttcttagcgtgcgtgagccaggacgggtttctgcgggtgttcaactttgactcagtggagctgcacggtacgatgaaaagctactttgggggcttgctgtgtgtgtgctggagcccggatggcaagtacatcgtgacaggtggggaggacgacttggtgacagtctggtcctttgtagactgccgagtaatagccagaggccacgggcacaagtcctgggtcagtgttgtagcgtttgacccttataccactagtgtagaagaaggtgaccctatggagtttagtggcagcgatgaggacttccaagaccttcttcattttggcagagatcgagcaaatagtacacagtccaggctctccaaacggaactctacagacagccgccccgtaagtgtcacgtatcggtttggttccgtgggccaggacacacagctctgtttatgggaccttacagaagatatccttttccctcaccaacccctctcaagagcaaggacacacacaaatgtcatgaatgccacgagtcctcctgctggaagcaatgggaacagtgttacaacacccgggaactctgtgccgcctcctctgccacggtccaacagccttccacattcagcagtctcaaatgctggcagcaaaagcagtgtcatggacggggccattgcttctggggtcagcaaatttgcaacactttcactacatgaccggaaggagaggcaccacgagaaagatcacaagcgaaatcatagcatgggacacatttctagcaagagcagtgacaaactgaatctagttaccaaaaccaaaacggaccctgctaaaactctgggaacgcccctgtgtcctcgaatggaagatgttcccttgttagagccgctgatatgtaaaaagatagcacatgagagactgactgtactaatatttcttgaagactgtatagtcactgcttgtcaggagggatttatttgcacatggggaaggcctggtaaagtggtaagttttaatccttaatgctgcaccagatctagaacttgaataggtagtgacttttttctttttcgtgggaggggtggggtgtacaatgaatgtgaatgacacttcttattcttaatgtaaatctcaatgcatcagagccataattttggatactgcatgccatgtaattctgaatcatttgataatttaccttagagcatttaaaaaaatataatcaaactaattgccagccaagtcagtcatcctcctgggagtatatagagtcccaaggttagcgctcctgtattagactatttcaattttaggaaaatcatgaccatgtggggaaacaatgactttaaaatgctgaaattaaaatttatgctttaactggaatattttttgcttaactactcaattagaatattgtacacctgatcaatgtgtgttcagcacagatggccatgaattgtcatttatagtccaattttttatcttaatcataaaatgtttaggaatctatgaaatttaactttaggaacaaaacgtttagcagggttgattgatattatttttacattgttctggcaatccacagaaagagaagagccttaatttttaaaacccattttagtcattttatgacaattaaagttgtttaataaacatcttttttcaaagaagcagtttgtagcactt

SEQ ID NO: 459262 - DNA, 729 bp, Homo sapiens
agcgggcgcggtgggcgtgatccgggcacttagggcaggatgaacgctgctttccaagatggcgacggagggaggagggaaggagatgaacgagattaagacccaattcaccacccgggaaggtctgtacaagctgctgccgcactcggagtacagccggcccaaccgggtgcccttcaactcgcagggatccaaccctgtccgcgtctccttcgtaaacctcaacgaccagtctggcaacggcgaccgcctctgcttcaatgtgggccgggagctgtacttctatatctacaagggggtccgcaaggctgctgacttgagtaaaccaatagataaaaggatatacaaaggaacacagcctacttgtcatgacttcaaccacctaacagccacagcagaaagtgtctctctcctagtgggcttttccgcaggccaagtccagcttatagacccaatcaaaaaagaaactagcaaactttttaatgaggaagcttttgaggggaggtatgctacattttcaccatttgtatgaatgcagccacggaaaacttcacatcagctcagccctcggtttagttttcttcggaggagacattagttacagcttgagttctcagcctgccccactcgaaggcgccagcagggactctggatcacggggccatgaactatggagtgagtcttctagaaagagaaataataaaagacactaagacttgctgttctaaa

SEQ ID NO: 459263 - DNA, 597 bp, Homo sapiens
cacatgcattgtcccttatgatctcacagatactttgcagaagagggagtggcgcgtcccactttatattatatagagatgagagaggggatctctgagggatgtagtaacttgccaaggctacacagctggtaagtggcagccggagatttcagcaaggcctgtcagactccaaagcctatgttctttctagcaccccaccccgcttttcatgtaaactcttgctcccagagaatgcgtgtgcctgtgtggctgtcatgtggttttataataaatggttgtaatacctgtatttctagatttctctcctcatatacttaacccacccaataagcagcaacctttcagctttttaaaaaaagactattttctatttaataatattcatttatttacaatgtgtcagaattaggaggtattataaaagcggcctttgagatcatattctaacctctgtattttcacaggtagagccatcatatgtgctactctatttttgtctcagaaattaaactttcattgaggtgtaaattggtatactacacagttctgacctctgaacttctaacttttttttaaagtatttttttttttcta

SEQ ID NO: 459264 - DNA, 2524 bp, Homo sapiens
agcgggcgcggtgggcgtgatccgggcacttagggcaggatgaacgctgctttccaagatggcgacggagggaggagggaaggagatgaacgagattaagacccaattcaccacccgggaaggtctgtacaagctgctgccgcactcggagtacagccggcccaaccgggtgcccttcaactcgcagggatccaaccctgtccgcgtctccttcgtaaacctcaacgaccagtctggcaacggcgaccgcctctgcttcaatgtgggccgggagctgtacttctatatctacaagggggtccgcaaggctgctgacttgagtaaaccaatagataaaaggatatacaaaggaacacagcctacttgtcatgacttcaaccacctaacagccacagcagaaagtgtctctctcctagtgggcttttccgcaggccaagtccagcttatagacccaatcaaaaaagaaactagcaaactttttaatgaggaaaactcttgtcagcacttgtggaaggtggattggaatgaagaaagacagaatgaaggtagcaagaccagtgaggaggctctagtaactgtccagagactaatagacaagtcacgagttacctgtgtcaaatgggttcccggttcggaaagccttttcctagtagcccactcgagtgggaacatgtacttatataatgtggagcacacttgtggcaccacagccccccactaccagcttctgaagcagggagagagctttgccgtgcacacttgcaagagcaaatccacgaggaaccctctccttaagtggacggtgggcgagggggccctcaacgagtttgctttctccccagatggcaagttcttagcgtgcgtgagccaggacgggtttctgcgggtgttcaactttgactcagtggagctgcacggtacgatgaaaagctactttgggggcttgctgtgtgtgtgctggagcccggatggcaagtacatcgtgacaggtggggaggacgacttggtgacagtctggtcctttgtagactgccgagtaatagccagaggccacgggcacaagtcctgggtcagtgttgtagcgtttgacccttataccactagtgtagaagaaggtgaccctatggagtttagtggcagcgatgaggacttccaagaccttcttcattttggcagagatcgagcaaatagtacacagtccaggctctccaaacggaactctacagacagccgccccgtaagtgtcacgtatcggtttggttccgtgggccaggacacacagctctgtttatgggaccttacagaagatatccttttccctcaccaacccctctcaagagcaaggacacacacaaatgtcatgaatgccacgagtcctcctgctggaagcaatgggaacagtgttacaacacccgggaactctgtgccgcctcctctgccacggtccaacagccttccacattcagcagtctcaaatgctggcagcaaaagcagtgtcatggacggggccattgcttctggggtcagcaaatttgcaacactttcactacatgaccggaaggagaggcaccacgagaaagatcacaagcgaaatcatagcatgggacacatttctagcaagagcagtgacaaactgaatctagttaccaaaaccaaaacggaccctgctaaaactctgggaacgcccctgtgtcctcgaatggaagatgttcccttgttagagccgctgatatgtaaaaagatagcacatgagagactgactgtactaatatttcttgaagactgtatagtcactgcttgtcaggagggatttatttgcacatggggaaggcctggtaaagtggtaagttttaatccttaatgctgcaccagatctagaacttgaataggtagtgacttttttctttttcgtgggaggggtggggtgtacaatgaatgtgaatgacacttcttattcttaatgtaaatctcaatgcatcagagccataattttggatactgcatgccatgtaattctgaatcatttgataatttaccttagagcatttaaaaaaatataatcaaactaattgccagccaagtcagtcatcctcctgggagtatatagagtcccaaggttagcgctcctgtattagactatttcaattttaggaaaatcatgaccatgtggggaaacaatgactttaaaatgctgaaattaaaatttatgctttaactggaatattttttgcttaactactcaattagaatattgtacacctgatcaatgtgtgttcagcacagatggccatgaattgtcatttatagtccaattttttatcttaatcataaaatgtttaggaatctatgaaatttaactttaggaacaaaacgtttagcagggttgattgatattatttttacattgttctggcaatccacagaaagagaagagccttaatttttaaaacccattttagtcattttatgacaattaaagttgtttaataaacatcttttttcaaagaagcagtttgtagcactt

SEQ ID NO: 459265 - DNA, 2254 bp, Homo sapiens
agtctggtgagtagctgggactacaggcatgagccacactgttggcctcttcttgtacctctgaggtttcatttcttacatatgatttctttttgatactgctgagatttattctggtataaattgtgaggctgctgacttgagtaaaccaatagataaaaggatatacaaaggaacacagcctacttgtcatgacttcaaccacctaacagccacagcagaaagtgtctctctcctagtgggcttttccgcaggccaagtccagcttatagacccaatcaaaaaagaaactagcaaactttttaatgaggaaagactaatagacaagtcacgagttacctgtgtcaaatgggttcccggttcggaaagccttttcctagtagcccactcgagtgggaacatgtacttatataatgtggagcacacttgtggcaccacagccccccactaccagcttctgaagcagggagagagctttgccgtgcacacttgcaagagcaaatccacgaggaaccctctccttaagtggacggtgggcgagggggccctcaacgagtttgctttctccccagatggcaagttcttagcgtgcgtgagccaggacgggtttctgcgggtgttcaactttgactcagtggagctgcacggtacgatgaaaagctactttgggggcttgctgtgtgtgtgctggagcccggatggcaagtacatcgtgacaggtggggaggacgacttggtgacagtctggtcctttgtagactgccgagtaatagccagaggccacgggcacaagtcctgggtcagtgttgtagcgtttgacccttataccactagtgtagaagaaggtgaccctatggagtttagtggcagcgatgaggacttccaagaccttcttcattttggcagagatcgagcaaatagtacacagtccaggctctccaaacggaactctacagacagccgccccgtaagtgtcacgtatcggtttggttccgtgggccaggacacacagctctgtttatgggaccttacagaagatatccttttccctcaccaacccctctcaagagcaaggacacacacaaatgtcatgaatgccacgagtcctcctgctggaagcaatgggaacagtgttacaacacccgggaactctgtgccgcctcctctgccacggtccaacagccttccacattcagcagtctcaaatgctggcagcaaaagcagtgtcatggacggggccattgcttctggggtcagcaaatttgcaacactttcactacatgaccggaaggagaggcaccacgagaaagatcacaagcgaaatcatagcatgggacacatttctagcaagagcagtgacaaactgaatctagttaccaaaaccaaaacggaccctgctaaaactctgggaacgcccctgtgtcctcgaatggaagatgttcccttgttagagccgctgatatgtaaaaagatagcacatgagagactgactgtactaatatttcttgaagactgtatagtcactgcttgtcaggagggatttatttgcacatggggaaggcctggtaaagtggtaagttttaatccttaatgctgcaccagatctagaacttgaataggtagtgacttttttctttttcgtgggaggggtggggtgtacaatgaatgtgaatgacacttcttattcttaatgtaaatctcaatgcatcagagccataattttggatactgcatgccatgtaattctgaatcatttgataatttaccttagagcatttaaaaaaatataatcaaactaattgccagccaagtcagtcatcctcctgggagtatatagagtcccaaggttagcgctcctgtattagactatttcaattttaggaaaatcatgaccatgtggggaaacaatgactttaaaatgctgaaattaaaatttatgctttaactggaatattttttgcttaactactcaattagaatattgtacacctgatcaatgtgtgttcagcacagatggccatgaattgtcatttatagtccaattttttatcttaatcataaaatgtttaggaatctatgaaatttaactttaggaacaaaacgtttagcagggttgattgatattatttttacattgttctggcaatccacagaaagagaagagccttaatttttaaaacccattttagtcattttatgacaattaaagttgtttaataaacatcttttttcaaagaagcagtttgtagcactt

SEQ ID NO: 459266 - DNA, 2063 bp, Homo sapiens
agcgggcgcggtgggcgtgatccgggcacttagggcaggatgaacgctgctttccaagatggcgacggagggaggagggaaggagatgaacgagattaagacccaattcaccacccgggaagagactaatagacaagtcacgagttacctgtgtcaaatgggttcccggttcggaaagccttttcctagtagcccactcgagtgggaacatgtacttatataatgtggagcacacttgtggcaccacagccccccactaccagcttctgaagcagggagagagctttgccgtgcacacttgcaagagcaaatccacgaggaaccctctccttaagtggacggtgggcgagggggccctcaacgagtttgctttctccccagatggcaagttcttagcgtgcgtgagccaggacgggtttctgcgggtgttcaactttgactcagtggagctgcacggtacgatgaaaagctactttgggggcttgctgtgtgtgtgctggagcccggatggcaagtacatcgtgacaggtggggaggacgacttggtgacagtctggtcctttgtagactgccgagtaatagccagaggccacgggcacaagtcctgggtcagtgttgtagcgtttgacccttataccactagtgtagaagaaggtgaccctatggagtttagtggcagcgatgaggacttccaagaccttcttcattttggcagagatcgagcaaatagtacacagtccaggctctccaaacggaactctacagacagccgccccgtaagtgtcacgtatcggtttggttccgtgggccaggacacacagctctgtttatgggaccttacagaagatatccttttccctcaccaacccctctcaagagcaaggacacacacaaatgtcatgaatgccacgagtcctcctgctggaagcaatgggaacagtgttacaacacccgggaactctgtgccgcctcctctgccacggtccaacagccttccacattcagcagtctcaaatgctggcagcaaaagcagtgtcatggacggggccattgcttctggggtcagcaaatttgcaacactttcactacatgaccggaaggagaggcaccacgagaaagatcacaagcgaaatcatagcatgggacacatttctagcaagagcagtgacaaactgaatctagttaccaaaaccaaaacggaccctgctaaaactctgggaacgcccctgtgtcctcgaatggaagatgttcccttgttagagccgctgatatgtaaaaagatagcacatgagagactgactgtactaatatttcttgaagactgtatagtcactgcttgtcaggagggatttatttgcacatggggaaggcctggtaaagtggtaagttttaatccttaatgctgcaccagatctagaacttgaataggtagtgacttttttctttttcgtgggaggggtggggtgtacaatgaatgtgaatgacacttcttattcttaatgtaaatctcaatgcatcagagccataattttggatactgcatgccatgtaattctgaatcatttgataatttaccttagagcatttaaaaaaatataatcaaactaattgccagccaagtcagtcatcctcctgggagtatatagagtcccaaggttagcgctcctgtattagactatttcaattttaggaaaatcatgaccatgtggggaaacaatgactttaaaatgctgaaattaaaatttatgctttaactggaatattttttgcttaactactcaattagaatattgtacacctgatcaatgtgtgttcagcacagatggccatgaattgtcatttatagtccaattttttatcttaatcataaaatgtttaggaatctatgaaatttaactttaggaacaaaacgtttagcagggttgattgatattatttttacattgttctggcaatccacagaaagagaagagccttaatttttaaaacccattttagtcattttatgacaattaaagttgtttaataaacatcttttttcaaagaagcagtttgtagcactt

SEQ ID NO: 459267 - DNA, 2126 bp, Homo sapiens
agcgggcgcggtgggcgtgatccgggcacttagggcaggatgaacgctgctttccaagatggcgacggagggaggagggaaggagatgaacgagattaagacccaattcaccacccgggaaggtctgtacaagctgctgccgcactcggagtacagccggcccaaccgggtgcccttcaactcgcagggatccaaccctgtccgcgtctccttcgtaaacctcaacgaccagtctggcaacggcgaccgcctctgcttcaatgtgggccgggagctgtacttctatatctacaagggggtccgcaaggctgctgacttgagtaaaccaatagataaaaggatatacaaaggaacacagcctacttgtcatgacttcaaccacctaacagccacagcagaaagtgtctctctcctagtgggcttttccgcaggccaagtccagcttatagacccaatcaaaaaagaaactagcaaactttttaatgaggaaagactaatagacaagtcacgagttacctgtgtcaaatgggttcccggttcggaaagccttttcctagtagcccactcgagtgggaacatgtacttatataatgtggagcacacttgtggcaccacagccccccactaccagcttctgaagcagggagagagctttgccgtgcacacttgcaagagcaaatccacgaggaaccctctccttaagtggacggtgggcgagggggccctcaacgagtttgctttctccccagatggcaagttcttagcgtgcgtgagccaggacgggtttctgcgggtgttcaactttgactcagtggagctgcacggtacgatgaaaagctactttgggggcttgctgtgtgtgtgctggagcccggatggcaagtacatcgtgacaggtggggaggacgacttggtgacagtctggtcctttgtagactgccgagtaatagccagaggccacgggcacaagtcctgggtcagtgttgtagcgtttgacccttataccactagtgtagaagaaggtgaccctatggagtttagtggcagcgatgaggacttccaagaccttcttcattttggcagagatcgagcaaatagtacacagtccaggctctccaaacggaactctacagacagccgccccgtaagtgtcacgtatcggtttggttccgtgggccaggacacacagctctgtttatgggaccttacagaagatatccttttccctcaccaacccctctcaagagcaaggacacacacaaatgtcatgaatgccacgagtcctcctgctggaagcaatgggaacagtgttacaacacccgggaactctgtgccgcctcctctgccacggtccaacagccttccacattcagcagtctcaaatgctggcagcaaaagcagtgtcatggacggggccattgcttctggggtcagcaaatttgcaacactttcactacatgaccggaaggagaggcaccacgagaaagatcacaagcgaaatcatagcatgggacacatttctagcaagagcagtgacaaactgaatctagttaccaaaaccaaaacggaccctgctaaaactctgggaacgcccctgtgtcctcgaatggaagatgttcccttgttagagccgctgatatgtaaaaagatagcacatgagagactgactgtactaatatttcttgaagactgtatagtcactgcttgtcaggagggatttatttgcacatggggaaggcctggtaaagtggtaagttttaatccttaatgctgcaccagatctagaacttgaataggtagtgacttttttctttttcgtgggaggggtggggtgtacaatgaatgtgaatgacacttcttattcttaatgtaaatctcaatgcatcagagccataattttggatactgcatgccatgtaattctgaatcatttgataatttaccttagagcatttaaaaaaatataatcaaactaattgccagccaagtcagtcatcctcctgggagtatatagagtcccaaggttagcgctcctgtattagactatttcaattttaggaaaatcatgaccatgtggggaaacaatgactttaaaatgctgaaattaaaatttatgctttaactgg

SEQ ID NO: 459268 - DNA, 575 bp, Homo sapiens
gctagtcactttggctattaactcttaggaaattcaaagaaagacatttgaaaataggaacctattattattacaagtaagaatccttatgcaacattcacattaataggctactgatacatggcttgagggagaggaaatcactgcatacccaggtgtgccctccatgtcagcctaaaggactggtttgggtgctttgagtccccagacccaggagtctttgattttaaacttcctttccttctggtgcggcagcaaaggtgccatctagaaagcccagagtttctgagtacacatgggatacccaggaagtccagtgtgcaatgtatcaggtgccaggggaggtaagcaggtgtgttctatggaacagcaccaggtcacctgtccctgtagcatacagagggaattaccacccccgcaactgccccacctaacgtggccatctgttcaccaccagccagtgctaccagccatttcagcttagaataacatctcaggtgtttctcagctgtacctgagctggaagctgctttctcctgcctcagacttttgttcctttactttccatgttccac

SEQ ID NO: 459269 - DNA, 1113 bp, Homo sapiens
cacttagcaaagacagcagatcctggtgccagggcacagggctcacctggatgtggggaggagtggctctggcacctgccaatactttgggtcctacaggccctgcttgaggtctttggcctctttggtctttggtctttttctcctggaacagaagttgaaatggggaggagacctgggcagtgctcttggaaattaacccttcacttctctgcccctgtgtttcagttcaaatcagccttctcatctgcggaaaccacagaattgagtggcaaatgtgtggtggctttggcaacaggtgaagtttgggggcagctggtaataagaaagggcatggaggatgtgtagtgcggtagcatccagtgcccagatctggctcgggagttggttgaggaacatgtcattcttttctctgctttttgaggcccaaggggtcagcattcccagtttgaggtctgagagccttaggagcaggctcctgggaagtgtggaaaaagtccaaggcccaagagaaagagctctccagggatcctgagctccagggctctcagcagtgccctgtccaactgggcccaaaccttgtcactctgcatactcccctgcctgccatctccacctgtctgtgtgcccgcagatcccaatatcctgagcctgagtggtaaggtgctgccatcctgtgaccttgctcgacgctatggccttcgggatgtggacggccgccccgtccaagactatttgtctttgagctctgttctctcacacgtgtccggcctgggctggctggcctcctacctgccctccttcctccgtgtgcccaagtggattattgccctctacactagcaagttctaaccctcctggtctgacactacgtctctgcttgtcttctcatttggacttggtggttcgtcctgtctcagtgaaacagcagcctttcttgtttacccatacccttgatatgaagagaagccctctgctgtgtgtccgtggtgagttctggggtgcgcctaggtcccttctttgtgccttggttttccttgtccttctttttactttttgccttagtattgaaaaatgctcttggagctaataaaagtctcatttctctttcaa

SEQ ID NO: 459270 - DNA, 386 bp, Homo sapiens
atcaccctccctgtgccttccagacgatcctgaacaccaggaataaggcattctgggaaacccctgcctccatgtgggatgatatcaacaacgtcggactcagcctctacactagcaagttctaaccctcctggtctgacactacgtctctgcttgtcttctcatttggacttggtggttcgtcctgtctcagtgaaacagcagcctttcttgtttacccatacccttgatatgaagagaagccctctgctgtgtgtccgtggtgagttctggggtgcgcctaggtcccttctttgtgccttggttttccttgtccttctttttactttttgccttagtattgaaaaatgctcttggagctaataaaagtctcatttctctttcaa

SEQ ID NO: 459271 - DNA, 129 bp, Homo sapiens
aaggacaaggaaaaccaaggcacaaagaagggacctaggcgccttggttttccttgtccttctttttactttttgccttagtattgaaaaatgctcttggagctaataaaagtctcatttctctttcaa

SEQ ID NO: 459272 - DNA, 1763 bp, Homo sapiens
cagatcgctccgcccccatccgcaggttctaacttgggctgggactctgcccctctacctcagcacagaatcgccccgggtcctactacagaatcaatccttgaacactgcctccacgtcgccggctcaatctgggcgagaacccagacttccaccgcagccccgcaatctgcagacctcagcggcagcgcaggtggcagacctgcctcctttgcctgtgagtcatggcagctcccatgaatggccaagtgtgtgtggtgactggtgcctccaggggtattggccgtggcattgccttgcagctctgcaaagcaggcgccacagtttacatcactggccgccatctggacacccttcgcgttgttgctcaggaggcacaatccctcgggggccaatgtgtgcctgtggtgtgcgattcaagccaggagagtgaagtgcgaagcctgtttgagcaagtggatcgggaacagcaagggcgtctagatgtgctggtcaacaatgcttatgcaggggtccagacgatcctgaacaccaggaataaggcattctgggaaacccctgcctccatgtgggatgatatcaacaacgtcggactcagaggccactacttttgctcagtgtatggggcacggctgatggtaccagctggccaggggctcatcgtggtcatctcctccccaggaagcctgcagtatatgttcaatgtcccctatggtgtgggcaaagctgcgtgtgacaagctggctgctgactgtgcccacgagctgcggcgccatggggtcagctgtgtgtctctgtggccggggattgtgcagacagaactgctgaaggagcatatggcaaaggaggaggtcctgcaggatcctgtgttgaagcagttcaaatcagccttctcatctgcggaaaccacagaattgagtggcaaatgtgtggtggctttggcaacaggtgaagtttgggggcagctggtaataagaaagggcatggaggatgtgtagtgcggtagcatccagtgcccagatctggctcgggagttggttgaggaacatgtcattcttttctctgctttttgaggcccaaggggtcagcattcccagtttgaggtctgagagccttaggagcaggctcctgggaagtgtggaaaaagtccaaggcccaagagaaagagctctccagggatcctgagctccagggctctcagcagtgccctgtccaactgggcccaaaccttgtcactctgcatactcccctgcctgccatctccacctgtctgtgtgcccgcagatcccaatatcctgagcctgagtggtaaggtgctgccatcctgtgaccttgctcgacgctatggccttcgggatgtggacggccgccccgtccaagactatttgtctttgagctctgttctctcacacgtgtccggcctgggctggctggcctcctacctgccctccttcctccgtgtgcccaagtggattattgccctctacactagcaagttctaaccctcctggtctgacactacgtctctgcttgtcttctcatttggacttggtggttcgtcctgtctcagtgaaacagcagcctttcttgtttacccatacccttgatatgaagagaagccctctgctgtgtgtccgtggtgagttctggggtgcgcctaggtcccttctttgtgccttggttttccttgtccttctttttactttttgccttagtattgaaaaatgctcttggagctaataaaagtctcatttctctttcaa

SEQ ID NO: 459273 - DNA, 976 bp, Homo sapiens
cagatcgctccgcccccatccgcaggttctaacttgggctgggactctgcccctctacctcagcacagaatcgccccgggtcctactacagaatcaatccttgaacactgcctccatgtgggatgatatcaacaacgtcggactcagaggccactacttttgctcagtgtatggggcacggctgatggtaccagctggccaggggctcatcgtggtcatctcctccccaggaagcctgcagtatatgttcaatgtcccctatggtgtgggcaaagctgcgtgtgacaagctggctgctgactgtgcccacgagctgcggcgccatggggtcagctgtgtgtctctgtggccggggattgtgcagacagaactgctgaaggagcatatggcaaaggaggaggtcctgcaggatcctgtgttgaagcagttcaaatcagccttctcatctgcggaaaccacagaattgagtggcaaatgtgtggtggctttggcaacagatcccaatatcctgagcctgagtggtaaggtgctgccatcctgtgaccttgctcgacgctatggccttcgggatgtggacggccgccccgtccaagactatttgtctttgagctctgttctctcacacgtgtccggcctgggctggctggcctcctacctgccctccttcctccgtgtgcccaagtggattattgccctctacactagcaagttctaaccctcctggtctgacactacgtctctgcttgtcttctcatttggacttggtggttcgtcctgtctcagtgaaacagcagcctttcttgtttacccatacccttgatatgaagagaagccctctgctgtgtgtccgtggtgagttctggggtgcgcctaggtcccttctttgtgccttggttttccttgtccttctttttactttttgccttagtattgaaaaatgctcttggagctaataaaagtctcatttctctttcaa

SEQ ID NO: 459274 - DNA, 1373 bp, Homo sapiens
cagatcgctccgcccccatccgcaggttctaacttgggctgggactctgcccctctacctcagcacagaatcgccccgggtcctactacagaatcaatccttgaacactgcctccacgtcgccggctcaatctgggcgagaacccagacttccaccgcagccccgcaatctgcagacctcagcggcagcgcaggtggcagacctgcctcctttgcctgtgagtcatggcagctcccatgaatggccaagtgtgtgtggtgactggtgcctccaggggtattggccgtggcattgccttgcagctctgcaaagcaggcgccacagtttacatcactggccgccatctggacacccttcgcgttgttgctcaggaggcacaatccctcgggggccaatgtgtgcctgtggtgtgcgattcaagccaggagagtgaagtgcgaagcctgtttgagcaagtggatcgggaacagcaagggcgtctagatgtgctggtcaacaatgcttatgcaggggtccagacgatcctgaacaccaggaataaggcattctgggaaacccctgcctccatgtgggatgatatcaacaacgtcggactcagaggccactacttttgctcagtgtatggggcacggctgatggtaccagctggccaggggctcatcgtggtcatctcctccccaggaagcctgcagtatatgttcaatgtcccctatggtgtgggcaaagctgcgtgtgacaagctggctgctgactgtgcccacgagctgcggcgccatggggtcagctgtgtgtctctgtggccggggattgtgcagacagaactgctgaaggagcatatggcaaaggaggaggtcctgcaggatcctgtgttgaagcagttcaaatcagccttctcatctgcggaaaccacagaattgagtggcaaatgtgtggtggctttggcaacagatcccaatatcctgagcctgagtggtaaggtgctgccatcctgtgaccttgctcgacgctatggccttcgggatgtggacggccgccccgtccaagactatttgtctttgagctctgttctctcacacgtgtccggcctgggctggctggcctcctacctgccctccttcctccgtgtgcccaagtggattattgccctctacactagcaagttctaaccctcctggtctgacactacgtctctgcttgtcttctcatttggacttggtggttcgtcctgtctcagtgaaacagcagcctttcttgtttacccatacccttgatatgaagagaagccctctgctgtgccttgtccttctttttactttttgccttagtattgaaaaatgctcttggagctaataaaagtctcatttctctttcaa

SEQ ID NO: 459275 - DNA, 1427 bp, Homo sapiens
cagatcgctccgcccccatccgcaggttctaacttgggctgggactctgcccctctacctcagcacagaatcgccccgggtcctactacagaatcaatccttgaacactgcctccacgtcgccggctcaatctgggcgagaacccagacttccaccgcagccccgcaatctgcagacctcagcggcagcgcaggtggcagacctgcctcctttgcctgtgagtcatggcagctcccatgaatggccaagtgtgtgtggtgactggtgcctccaggggtattggccgtggcattgccttgcagctctgcaaagcaggcgccacagtttacatcactggccgccatctggacacccttcgcgttgttgctcaggaggcacaatccctcgggggccaatgtgtgcctgtggtgtgcgattcaagccaggagagtgaagtgcgaagcctgtttgagcaagtggatcgggaacagcaagggcgtctagatgtgctggtcaacaatgcttatgcaggggtccagacgatcctgaacaccaggaataaggcattctgggaaacccctgcctccatgtgggatgatatcaacaacgtcggactcagaggccactacttttgctcagtgtatggggcacggctgatggtaccagctggccaggggctcatcgtggtcatctcctccccaggaagcctgcagtatatgttcaatgtcccctatggtgtgggcaaagctgcgtgtgacaagctggctgctgactgtgcccacgagctgcggcgccatggggtcagctgtgtgtctctgtggccggggattgtgcagacagaactgctgaaggagcatatggcaaaggaggaggtcctgcaggatcctgtgttgaagcagttcaaatcagccttctcatctgcggaaaccacagaattgagtggcaaatgtgtggtggctttggcaacagatcccaatatcctgagcctgagtggtaaggtgctgccatcctgtgaccttgctcgacgctatggccttcgggatgtggacggccgccccgtccaagactatttgtctttgagctctgttctctcacacgtgtccggcctgggctggctggcctcctacctgccctccttcctccgtgtgcccaagtggattattgccctctacactagcaagttctaaccctcctggtctgacactacgtctctgcttgtcttctcatttggacttggtggttcgtcctgtctcagtgaaacagcagcctttcttgtttacccatacccttgatatgaagagaagccctctgctgtgtgtccgtggtgagttctggggtgcgcctaggtcccttctttgtgccttggttttccttgtccttctttttactttttgccttagtattgaaaaatgctcttggagctaataaaagtctcatttctctttcaa

SEQ ID NO: 459276 - DNA, 992 bp, Homo sapiens
cagatcgctccgcccccatccgcaggttctaacttgggctgggactctgcccctctacctcagcacagaatcgccccgggtcctactacagaatcaatccttgaacactgcctccacgtcgccggctcaatctgggcgagaacccagacttccaccgcagccccgcaatctgcagacctcagcggcagcgcaggtggcagacctgcctcctttgcctgtgagtcatggcagctcccatgaatggccaagtgtgtgtggtgactggtgcctccaggggtattggccgtggcattgccttgcagctctgcaaagcaggcgccacagtttacatcactggccgccatctggacacccttcgcgttgttgctcaggaggcacaatccctcgggggccaatgtgtgcctgtggtgtgcgattcaagccaggagagtgaagtgcgaagcctgtttgagcaagtggatcgggaacagcaagggcgtctagatgtgctggtcaacaatgcttatgcaggggtccagacgatcctgaacaccaggaataaggcattctgggaaacccctgcctccatgtgggatgatatcaacaacgtcggactcagaggccactacttttgctcagtgtatggggcacggctgatggtaccagctggccaggggctcatcgtggtcatctcctccccaggaagcctgcagtatatgttcaatgtcccctatggtgtgggcaaagctgcggtgaggacccagtggcataggagctgaggaggtcaaagacagtgatgttacctatagctcaggaggtacaatccccagtggtcagaatggtaagggctggctcctctcagcgtcctcctctgcctcatccatggacagttcctttgcttgttgctcctcttgggtggctagaagtaggcattcacactggggagcgttggcagctgagaccttggggctcctgggaaggacaggtggttggagcattcacagtagaagcag

SEQ ID NO: 459277 - DNA, 1488 bp, Homo sapiens
cagatcgctccgcccccatccgcaggttctaacttgggctgggactctgcccctctacctcagcacagaatcgccccgggtcctactacagaatcaatccttgaacactgcctccacgtcgccggctcaatctgggcgagaacccagacttccaccgcagccccgcaatctgcagacctcagcggcagcgcaggtggcagacctgcctcctttgcctgtgagtcatggcagctcccatgaatggccaagtgtgtgtggtgactggtgcctccaggggtattggccgtggcattgccttgcagctctgcaaagcaggcgccacagtttacatcactggccgccatctggacacccttcgcgttgttgctcaggaggcacaatccctcgggggccaatgtgtgcctgtggtgtgcgattcaagccaggagagtgaagtgcgaagcctgtttgagcaagtggatcgggaacagcaagggcgtctagatgtgctggtcaacaatgcttatgcaggggtccagacgatcctgaacaccaggaataaggcattctgggaaacccctgcctccatgtgggatgatatcaacaacgtcggactcagaggccactacttttgctcagtgtatggggcacggctgatggtaccagctggccaggggctcatcgtggtcatctcctccccaggaagcctgcagtatatgttcaatgtcccctatggtgtgggcaaagctgcgtgtgacaagctggctgctgactgtgcccacgagctgcggcgccatggggtcagctgtgtgtctctgtggccggggattgtgcagacagaactgctgaaggagcatatggcaaaggaggaggtcctgcaggatcctgtgttgaagcagttcaaatcagccttctcatctgcggaaaccacagaattgagtggcaaatgtgtggtggctttggcaacagatcccaatatcctgagcctgagtggtaaggtgctgccatcctgtgaccttgctcgacgctatggccttcgggatgtggacggccgccccgtccaagactatttgtctttgagctctgttctctcacacgtgtccggcctgggctggctggcctcctacctgccctccttcctccgtgtgcccaagtggattattgccctctacactagcaagttctaaccctcctggtctgacactacgtctctgcttgtcttctcatttggacttggtggttcgtcctgtctcagtgaaacagcagcctttcttgtttacccatacccttgatatgaagagaagccctctgctgtgtgtccgtggtgagttctggggtgcgcctaggtcccttctttgtgccttggttttccttgtccttctttttactttttgccttagtattgaaaaatgctcttggagctaataaaagtctcatttctctttcaacatctcctactctcccatcatccttctacctccttccctccctccccttcttctctttcct

SEQ ID NO: 459278 - DNA, 2408 bp, Homo sapiens
gtccgttgagggcccgcgccgcatggaggccggctgaggagcgccgctgcctcgcctcggtacgccgcgcggcgcggacggcgcgctccccacaggtgcaggaagccgccgcccagccatggacggggaggagcagcagccaccgcacgaggccaacgtggaacctgttgtgccgtcagaggcttcagagccggtgcccagggtgctttctggagacccccagaacctgtccgacgtggacgccttcaacctgctcctggagatgaagctgaagcggcggcgtcagcggcccaacctgccgcgcactgtgacccagttggtggctgaggacgggagcagggtgtacgtggtggggacagcccacttcagcgacgacagcaagagggacgttgtgaagaccatccgggaggtgcagcctgacgtggtggtcgtggagctctgccaatatcgtgtgtccatgctgaagatggacgagagcacgctgctgcgggaggcccaggagctcagcctggagaagctgcagcaggccgtgaggcagaacgggctcatgtcggggctgatgcagatgctgctgctgaaggtgtctgcacacatcaccgagcagctgggcatggccccaggtggcgagttcagggaggccttcaaggaggccagcaaggtgcctttctgcaagttccacctgggtgaccgacccatccccgtcaccttcaagagggccatcgcagcgctctccttctggcagaaggtcaggctggcttggggcctgtgcttcctgtcagaccccatcagcaaggatgacgtggaacgctgcaagcagaaggacctactggagcagatgatggccgagatgattggcgagttcccagacctgcaccgcaccatcgtctcggagcgcgacgtctacctaacctacatgctgcgccaggccgcgcggcgcctcgagctgcctcgggcctctgacggtgacggccgcccgcaggcgtgggaccccctgtgaggctgaggcccgagcaggtactgaccccttgtccttccccacagccgagcccaggaagtgcgtcccctccgtggtcgtgggcgtcgtgggcatgggccacgtgcctggcatcgagaagaactggagcaccgacctcaacatccaggagatcatgaccgtgcccccgccgtccgtctccggcagagtgtctcggttggccgtgaaggccgccttcttcggcctgctgggctacagcctgtactggatgggccgccgcaccgcgagcctggtcctgtcgctgcccgccgcgcagtactgcctgcagagggtgaccgaggcccggcacaagtaggagactgctccccgcccgctcgggcccctgaggagccagtgcccccgcggcacttctgggtgccaggtgcatcctagcccgcccgaggcccctgccaccccccatgggggtctgggcccggcctcgcctgccctcctgggccagtcacccctcccccagcccacccaaataaaggattatttaactgtctgagctcaggcctcccggcagcccctcccctcccacactgcaggggccgttccccggcttctggacaagacacccagctccgagggggcaggggcttataggaggggccgaggcgtgcgctgccctctcagccctggtggcaggcgggggacaatggccactgtccctacctcactgtgccttcctgtgctccggccacaggagcgtcggcccaggggcggctcctgggggctccagggcaggcgagactgggaaaggcccagccctggagctccagccgaccccaccgtgcccctggcatcctggccctggccgccacctccctggcaccgtctgcctgcagggattctgtgtttttggcttttttaatgtcttaaaatcttttactcaggtaattttaatttcagagagaaaaactgaagtaaatgtcaaaaaacaccagccttaaatccaaagggacagaattcgtgttcttgggtctgtcccgagtgggctcgcgtgcagccaaacatcagctctgggtccaggcgtggcctcagctgggagcctgtgtcctgagcccccggagcgaaggggtgcctggggcatcttggccctctctgggcagacaatgtgtgcacctatgtggaaggccaaggacatgggctgtggccaggcctgtcccgctcaggccccctgcccggcggccgtctgtgtgcggggcctccctcctggctgtccaggacacagcccgtgcagccccagcctggacccaggccatctctggttgtgtctgtgccgactcggtgttgaatcaaatcaggtgtgcgtcaggagccggctgtgtccttcctgccacactcggggattcattccttagaaactgaaataaattctaattttggaaactcc

SEQ ID NO: 459279 - DNA, 2162 bp, Homo sapiens
gtccgttgagggcccgcgccgcatggaggccggctgaggagcgccgctgcctcgcctcggtacgccgcgcggcgcggacggcgcgctccccacaggtgcaggaagccgccgcccagccatggacggggaggagcagcagccaccgcacgaggccaacgtggaacctgttgtgccgtcagaggcttcagagccggtgcccagggtgctttctggagacccccagaacctgtaccatccgggaggtgcagcctgacgtggtggtcgtggagctctgccaatatcgtgtgtccatgctgaagatggacgagagcacgctgctgcgggaggcccaggagctcagcctggagaagctgcagcaggccgtgaggcagaacgggctcatgtcggggctgatgcagatgctgctgctgaaggtgtctgcacacatcaccgagcagctgggcatggccccaggtggcgagttcagggaggccttcaaggaggccagcaaggtgcctttctgcaagttccacctgggtgaccgacccatccccgtcaccttcaagagggccatcgcagcgctctccttctggcagaaggtcaggctggcttggggcctgtgcttcctgtcagaccccatcagcaaggatgacgtggaacgctgcaagcagaaggacctactggagcagatgatggccgagatgattggcgagttcccagacctgcaccgcaccatcgtctcggagcgcgacgtctacctaacctacatgctgcgccaggccgcgcggcgcctcgagctgcctcgggcctctgacgccgagcccaggaagtgcgtcccctccgtggtcgtgggcgtcgtgggcatgggccacgtgcctggcatcgagaagaactggagcaccgacctcaacatccaggagatcatgaccgtgcccccgccgtccgtctccggcagagtgtctcggttggccgtgaaggccgccttcttcggcctgctgggctacagcctgtactggatgggccgccgcaccgcgagcctggtcctgtcgctgcccgccgcgcagtactgcctgcagagggtgaccgaggcccggcacaagtaggagactgctccccgcccgctcgggcccctgaggagccagtgcccccgcggcacttctgggtgccaggtgcatcctagcccgcccgaggcccctgccaccccccatgggggtctgggcccggcctcgcctgccctcctgggccagtcacccctcccccagcccacccaaataaaggattatttaactgtctgagctcaggcctcccggcagcccctcccctcccacactgcaggggccgttccccggcttctggacaagacacccagctccgagggggcaggggcttataggaggggccgaggcgtgcgctgccctctcagccctggtggcaggcgggggacaatggccactgtccctacctcactgtgccttcctgtgctccggccacaggagcgtcggcccaggggcggctcctgggggctccagggcaggcgagactgggaaaggcccagccctggagctccagccgaccccaccgtgcccctggcatcctggccctggccgccacctccctggcaccgtctgcctgcagggattctgtgtttttggcttttttaatgtcttaaaatcttttactcaggtaattttaatttcagagagaaaaactgaagtaaatgtcaaaaaacaccagccttaaatccaaagggacagaattcgtgttcttgggtctgtcccgagtgggctcgcgtgcagccaaacatcagctctgggtccaggcgtggcctcagctgggagcctgtgtcctgagcccccggagcgaaggggtgcctggggcatcttggccctctctgggcagacaatgtgtgcacctatgtggaaggccaaggacatgggctgtggccaggcctgtcccgctcaggccccctgcccggcggccgtctgtgtgcggggcctccctcctggctgtccaggacacagcccgtgcagccccagcctggacccaggccatctctggttgtgtctgtgccgactcggtgttgaatcaaatcaggtgtgcgtcaggagccggctgtgtccttcctgccacactcggggattcattccttagaaactgaaataaattctaattttggaaactcc

SEQ ID NO: 459280 - DNA, 2091 bp, Homo sapiens
gtccgttgagggcccgcgccgcatggaggccggctgaggagcgccgctgcctcgcctcggtacgccgcgcggcgcggacggcgcgctccccacaggtgcaggaagccgccgcccagccatggacggggaggagcagcagccaccgcacgaggccaacgtggaacctgttgtgccgtcagaggcttcagagccggtgcccagggtgctttctggagacccccagaacctgtccgacgtggacgccttcaacctgctcctggagatgaagctgaagcggcggcgtcagcggcccaacctgccgcgcactgtgacccagttggtggctgaggacgggagcagggtgtacgtggtggggacagcccacttcagcgacgacagcaagagggacgttgtgaagaccatccgggaggtgcagcctgacgtggtggtcgtggagctctgccaatatcgtgtgtccatgctgaagatggacgagagcacgctgctgcgggaggcccaggagctcagcctggagaagctgcagcaggccgtgaggcagaacgggctcatgtcggggctgatgcagatgctgctgctgaaggtgtctgcacacatcaccgagcagctgggcatggccccaggtggcgagttcagggaggccttcaaggaggccagcaaggtgcctttctgcaagttccacctgggtgaccgacccatccccgtcaccttcaagagggccatcgcagcgctctccttctggcagaaggtcaggctggcttggggcctgtgcttcctgtcagaccccatcagcaaggatgacgtggaacgctgcaagcagaaggacctactggagcagatgatggccgagatgattggcgagttcccagacctgcaccgcaccatcgtctcggagcgcgacgtctacctaacctacatgctgcgccaggccgcgcggcgcctcgagctgcctcgggcctctgacgccgagcccaggaagtgcgtcccctccgtggtcgtgggcgtcgtgggcatgggccacgtgcctggcatcgagaagaactggagcaccgacctcaacatccaggagatcatgaccgtgcccccgccgtccgtctccggcagagtgtctcggttggccgtgaaggccgccttcttcggcctgctgggctacagcctgtactggatgggccgccgcaccgcgagcctggtcctgtcgctgcccgccgcgcagtactgcctgcagagggtgaccgaggcccggcacaagtaggagactgctccccgcccgctcgggcccctgaggagccagtgcccccgcggcacttctgggtgccaggtgcatcctagcccgcccgaggcccctgccaccccccatgggggtctgggcccggcctcgcctgccctcctgggccagtcacccctcccccagcccacccaaataaaggattatttaactgtctgagctcaggcctcccggcagcccctcccctcccacactgcaggggccgttccccggcttctggacaagacacccagctccgagggggcaggggcttataggaggggccgaggcgtgcgctgccctctcagccctggtggcaggcgggggacaatggccactgtccctacctcactgtgccttcctgtgctccggccacaggagcgtcggcccaggggcggctcctgggggctccagggcaggcgagactgggaaaggcccagccctggagctccagccgaccccaccgtgcccctggcatcctggccctggccgccacctccctggcaccgtctgcctgcagggattctgtgtttttggcttttttaatgtcttaaaatcttttactcaggtaattttaatttcagagagaaaaactgaagtaaatgtcaaaaaacaccagccttaaatccaaagggacagaattcgtgttcttgggtctgtcccgagtgggctcgcgtgcagccaaacaacccaggccatctctggttgtgtctgtgccgactcggtgttgaatcaaatcaggtgtgcgtcaggagccggctgtgtccttcctgccacactcggggattcattccttagaaactgaaataaattctaattttggaaactcc

SEQ ID NO: 459281 - DNA, 2563 bp, Homo sapiens
gtccgttgagggcccgcgccgcatggaggccggctgaggagcgccgctgcctcgcctcggtacgccgcgcggcgcggacggcgcgctccccacaggtgcaggaagccgccgcccagccatggacggggaggagcagcagccaccgcacgaggccaacgtggaacctgttgtgccgtcagaggcttcagagccggtgcccagggtgctttctggagacccccagaacctgtccgacgtggacgccttcaacctgctcctggagatgaagctgaagcggcggcgtcagcggcccaacctgccgcgcactgtgacccagttggtggctgaggacgggagcagggtgtacgtggtggggacagcccacttcagcgacgacagcaagagggacgttgtgaagaccatccgggaggtgcagcctgacgtggtggtcgtggagctctgccaatatcgtgtgtccatgctgaagatggacgagagcacgctgctgcgggaggcccaggagctcagcctggagaagctgcagcaggccgtgaggcagaacgggctcatgtcggggctgatgcagatgctgctgctgaaggtgtctgcacacatcaccgagcagctgggcatggccccaggtggcgagttcagggaggccttcaaggaggccagcaaggtgcctttctgcaagttccacctgggtgaccgacccatccccgtcaccttcaagagggccatcgcagcgctctccttctggcagaaggtcaggctggcttggggcctgtgcttcctgtcagaccccatcaggtagggctgcccccgggaccctggccggcctgcagggtggtctgtgggaggctccaggccctcctgtgcaggtccaagcgcagccaatcctcactcaaggccttccctgccctttccttccgccacaaatcccaaacaaacgtgctgtggtccctgcccggtgtccacagtgccagccccacccccccagcccgttgcccatccctgcggggctgcagccatccctctccacagcaaggatgacgtggaacgctgcaagcagaaggacctactggagcagatgatggccgagatgattggcgagttcccagacctgcaccgcaccatcgtctcggagcgcgacgtctacctaacctacatgctgcgccaggccgcgcggcgcctcgagctgcctcgggcctctgacgccgagcccaggaagtgcgtcccctccgtggtcgtgggcgtcgtgggcatgggccacgtgcctggcatcgagaagaactggagcaccgacctcaacatccaggagatcatgaccgtgcccccgccgtccgtctccggcagagtgtctcggttggccgtgaaggccgccttcttcggcctgctgggctacagcctgtactggatgggccgccgcaccgcgagcctggtcctgtcgctgcccgccgcgcagtactgcctgcagagggtgaccgaggcccggcacaagtaggagactgctccccgcccgctcgggcccctgaggagccagtgcccccgcggcacttctgggtgccaggtgcatcctagcccgcccgaggcccctgccaccccccatgggggtctgggcccggcctcgcctgccctcctgggccagtcacccctcccccagcccacccaaataaaggattatttaactgtctgagctcaggcctcccggcagcccctcccctcccacactgcaggggccgttccccggcttctggacaagacacccagctccgagggggcaggggcttataggaggggccgaggcgtgcgctgccctctcagccctggtggcaggcgggggacaatggccactgtccctacctcactgtgccttcctgtgctccggccacaggagcgtcggcccaggggcggctcctgggggctccagggcaggcgagactgggaaaggcccagccctggagctccagccgaccccaccgtgcccctggcatcctggccctggccgccacctccctggcaccgtctgcctgcagggattctgtgtttttggcttttttaatgtcttaaaatcttttactcaggtaattttaatttcagagagaaaaactgaagtaaatgtcaaaaaacaccagccttaaatccaaagggacagaattcgtgttcttgggtctgtcccgagtgggctcgcgtgcagccaaacatcagctctgggtccaggcgtggcctcagctgggagcctgtgtcctgagcccccggagcgaaggggtgcctggggcatcttggccctctctgggcagacaatgtgtgcacctatgtggaaggccaaggacatgggctgtggccaggcctgtcccgctcaggccccctgcccggcggccgtctgtgtgcggggcctccctcctggctgtccaggacacagcccgtgcagccccagcctggacccaggccatctctggttgtgtctgtgccgactcggtgttgaatcaaatcaggtgtgcgtcaggagccggctgtgtccttcctgccacactcggggattcattccttagaaactgaaataaattctaattttggaaactcc

SEQ ID NO: 459282 - DNA, 2642 bp, Homo sapiens
gtccgttgagggcccgcgccgcatggaggccggctgaggagcgccgctgcctcgcctcggtacgccgcgcggcgcggacggcgcgctccccacaggtgcaggaagccgccgcccagccatggacggggaggagcagcagccaccgcacgaggccaacgtggaacctgttgtgccgtcagaggcttcagagccggtgcccagggtgctttctggagacccccagaacctgtccgacgtggacgccttcaacctgctcctggagatgaagctgaagcggcggcgtcagcggcccaacctgccgcgcactgtgacccagttggtggctgaggacgggagcagggtgtacgtggtggggacagcccacttcagcgacgacagcaagagggacgttgtgaagaccatccgggaggtgcagcctgacgtggtggtcgtggagctctgccaatatcgtgtgtccatgctgaagatggacgagagcacgctgctgcgggaggcccaggagctcagcctggagaagctgcagcaggccgtgaggcagaacgggctcatgtcggggctgatgcagatgctgctgctgaaggtgtctgcacacatcaccgagcagctgggcatggccccaggtggcgagttcagggaggccttcaaggaggccagcaaggtgcctttctgcaagttccacctgggtgaccgacccatccccgtcaccttcaagagggccatcgcagcgctctccttctggcagaaggtcaggctggcttggggcctgtgcttcctgtcagaccccatcaggtagggctgcccccgggaccctggccggcctgcagggtggtctgtgggaggctccaggccctcctgtgcaggtccaagcgcagccaatcctcactcaaggccttccctgccctttccttccgccacaaatcccaaacaaacgtgctgtggtccctgcccggtgtccacagtgccagccccacccccccagcccgttgcccatccctgcggggctgcagccatccctctccacagcaaggatgacgtggaacgctgcaagcagaaggacctactggagcagatgatggccgagatgattggcgagttcccagacctgcaccgcaccatcgtctcggagcgcgacgtctacctaacctacatgctgcgccaggccgcgcggcgcctcgagctgcctcgggcctctgacggtgacggccgcccgcaggcgtgggaccccctgtgaggctgaggcccgagcaggtactgaccccttgtccttccccacagccgagcccaggaagtgcgtcccctccgtggtcgtgggcgtcgtgggcatgggccacgtgcctggcatcgagaagaactggagcaccgacctcaacatccaggagatcatgaccgtgcccccgccgtccgtctccggcagagtgtctcggttggccgtgaaggccgccttcttcggcctgctgggctacagcctgtactggatgggccgccgcaccgcgagcctggtcctgtcgctgcccgccgcgcagtactgcctgcagagggtgaccgaggcccggcacaagtaggagactgctccccgcccgctcgggcccctgaggagccagtgcccccgcggcacttctgggtgccaggtgcatcctagcccgcccgaggcccctgccaccccccatgggggtctgggcccggcctcgcctgccctcctgggccagtcacccctcccccagcccacccaaataaaggattatttaactgtctgagctcaggcctcccggcagcccctcccctcccacactgcaggggccgttccccggcttctggacaagacacccagctccgagggggcaggggcttataggaggggccgaggcgtgcgctgccctctcagccctggtggcaggcgggggacaatggccactgtccctacctcactgtgccttcctgtgctccggccacaggagcgtcggcccaggggcggctcctgggggctccagggcaggcgagactgggaaaggcccagccctggagctccagccgaccccaccgtgcccctggcatcctggccctggccgccacctccctggcaccgtctgcctgcagggattctgtgtttttggcttttttaatgtcttaaaatcttttactcaggtaattttaatttcagagagaaaaactgaagtaaatgtcaaaaaacaccagccttaaatccaaagggacagaattcgtgttcttgggtctgtcccgagtgggctcgcgtgcagccaaacatcagctctgggtccaggcgtggcctcagctgggagcctgtgtcctgagcccccggagcgaaggggtgcctggggcatcttggccctctctgggcagacaatgtgtgcacctatgtggaaggccaaggacatgggctgtggccaggcctgtcccgctcaggccccctgcccggcggccgtctgtgtgcggggcctccctcctggctgtccaggacacagcccgtgcagccccagcctggacccaggccatctctggttgtgtctgtgccgactcggtgttgaatcaaatcaggtgtgcgtcaggagccggctgtgtccttcctgccacactcggggattcattccttagaaactgaaataaattctaattttggaaactcc

SEQ ID NO: 459283 - DNA, 1751 bp, Homo sapiens
gtccgttgagggcccgcgccgcatggaggccggctgaggagcgccgctgcctcgcctcggtacgccgcgcggcgcggacggcgcgctccccacaggtgcaggaagccgccgcccagccatggacggggaggagcagcagccaccgcacgaggccaacgtggaacctgttgtgccgtcagaggcttcagagccggtgcccagggtgctttctggagacccccagaacctgtccgacgtggacgccttcaacctgctcctggagatgaagctgaagcggcggcgtcagcggcccaacctgccgcgcactgtgacccagttggtggctgaggacgggagcagggtgtacgtggtggggacagcccacttcagcgacgacagcaagagggacgttgtgaagaccatccgggaggtgcagcctgacgtggtggtcgtggagctctgccaatatcgtgtgtccatgctgaagatggacgagagcacgctgctgcgggaggcccaggagctcagcctggagaagctgcagcaggccgtgaggcagaacgggctcatgtcggggctgatgcagatgctgctgctgaaggtgtctgcacacatcaccgagcagctgggcatggccccaggtggcgagttcagggaggccttcaaggaggccagcaaggtgcctttctgcaagttccacctgggtgaccgacccatccccgtcaccttcaagagggccatcgcagcgctctccttctggcagaaggtcaggctggcttggggcctgtgcttcctgtcagaccccatcagcaaggatgacgtggaacgctgcaagcagaaggacctactggagcagatgatggccgagatgattggcgagttcccagacctgcaccgcaccatcgtctcggagcgcgacgtctacctaacctacatgctgcgccaggccgcgcggcgcctcgagctgcctcgggcctctgacgccgagcccaggaagtgcgtcccctccgtggtcgtgggcgtcgtgggcatgggccacgtgcctggcatcgagaagaactggagcaccgacctcaacatccaggagatcatgaccgtgcccccgccgtccgtctccggcagagtgtctcggttggccgtgaaggccgccttcttcggcctgctgggctacagcctgtactggatgggccgccgcaccgcgagcctggtcctgtcgctgcccgccgcgcagtactgcctgcagagggtgaccgaggcccggcacaagtaggagactgctccccgcccgctcgggcccctgaggagccagtgcccccgcggcacttctgggtgccaggtgcatcctagcccgcccgaggcccctgccaccccccatgggggtctgggcccggcctcgcctgccctcctgggccagtcacccctcccccagcccacccaaataaaggattatttaaccttggtctggacaaacacccaaccacagacaaacaaacacctgaagcgaaccatcaaactgtcacagggaatgcggcaacaaacgacggcacgtccgaaccggggccacaagcgggcacaatgcacgcgtgcaacccagcgaaacccccggcgcctccagtcagcgcacaacaaacaggcggggagaaagaaccccgcccccggggtcacacccactcaataagagcggacggccggatgctcaaaagacgccaacgaaaagacccgcagggctcaacacgccgggacacataagaggcgaagctagcggacccaat

SEQ ID NO: 459284 - DNA, 4305 bp, Homo sapiens
  misc_feature (1557)..(1557): n is a, c, g, or t
  misc_feature (2861)..(2861): n is a, c, g, or t
gtccgttgagggcccgcgccgcatggaggccggctgaggagcgccgctgcctcgcctcggtacgccgcgcggcgcggacggcgcgctccccacaggtgcaggaagccgccgcccagccatggacggggaggagcagcagccaccgcacgaggccaacgtggaacctgttgtgccgtcagaggcttcagagccggtgcccagggtgctttctggagacccccagaacctgtccgacgtggacgccttcaacctgctcctggagatgaagctgaagcggcggcgtcagcggcccaacctgccgcgcactgtgacccagttggtggctgaggacgggagcagggtgtacgtggtggggacagcccacttcagcgacgacagcaagagggacgttgtgaagaccatccgggaggtgcagcctgacgtggtggtcgtggagctctgccaatatcgtgtgtccatgctgaagatggacgagagcacgctgctgcgggaggcccaggagctcagcctggagaagctgcagcaggccgtgaggcagggtgcgcagccgcgggcaagggtcagggtcagggtcggggtcaaagccacctgtttgcctgttgcccaggttcctctcacagcccatgcccccagtcagtgtggctgtgcctggcctgccctggggattgccgggttagggacctcccctgggccaggagaaatgaaagaggctccattacccggtttcaggcaagggaggaggaaatgggtggctctccaagctgaggcaggggctggtcacccgaggactgggttgctgagcagttgctggggatgggtcaggtctcagtgcaaggttggccccccggtaccacacccaggcccaaagtgggtggggctcagggctcctcctgtccccacttctccagccttgcagtgaccggagaggcaggactttctcattgctctttgtgttttcggtttttgttttttttttttgagacagagtctcgctctgttgcccaggctggagtgcagtggtgcgatcttggctcactgcaaccttcgcctcctgggttctagtgatgctcccgcctcagcctcctgagtagctgggattacaggtgcctgccaccacacctggctaattttttgtatttttagtagagacggggtttcaccatgttgcccaggttcatctcaaactcctgagctcaggcaatccacccacctcagcctcccaaagtgctgggaatacaggcatgagccaccgcgcccggccaggctttgtgttttcaaaggaaacaattataatgagatcttatagaaatgtccctaaacgtttggcgcctgcctttcattttttaatttctccagatgaggcaagtcaccaaagaagacctctgtgggccgtcttctaaagggcagtccccggtccagccagggcccagcactgggcagcctccccaccagagcctggggcccagtgatctcgaaggggcatagaattcggcagtgccgtgctgctcactgctgcggtgtcacagagggaagggggcgtggggcagggtctggganacaccaggtgtccgcttcacctgtcccctcccgggggacactcgctgtgccctggtgtctaggtttctactggggttggtcacaggcacgtctgagctcagaccccagcccctccagaggtggagtgggtcccagtggaccaaggcctcgtgaatgtctcatcctaagttagcctgggctccccagggtggcctgggccccggggaaacacgggcactccatcaggcgggacattcccagggctcatggctcaggcccagaccgtccctgggcgcgtgcaggtgtgagcgattgcccggcgctgtgtggcccccggggctttgctgcccttctgtgggcatcatctccttcacacgtggacacccccgtggtgccagccggccggtgagacaggggcaataggcctcgggctgtagctgctgaagatgggggtggcctggtgtccgcaccagcagtgctgtgctgacctcagcaggcaggtgtgagtggtgaggccctttctccagcctgcctgcccagcacccagcgtctgtgccagctcaaggcggccccttcgcagaacgagactgcctcatgaaggccttttcttcttctttttttttttttgagacagagcagtctcactctgtcacccaggctggtgatctcggctcactgcaacctctgcctccggggttcaagtgattctcctgcctcagcctcccgagtagctgggattacaggcacccgccagcacacccggctaatttttatatttttagtagagatggggtttcgccatgttggccaggctggtctgagagagaactcctgacctcgtgatccgcctgcctcagcctcccaaagtgctgggatgacaggcgtgcgccactgcacccggcccgtgaaggtcttttctgaagggagctacctttgagaagtgcctgttgggacagaactccctgctctggtctgaccctctgcacgctagggtggtcctgcacctgtcggggagggggccaaggacacagcactgggctggggcagggctctgcgctggtgctgcctgccatcccagttctgccattcccccagcgcacccccgcacccgcccctccagctgatgcctgctccctctctctgcagaacgggctcatgtcggggctgatgcagatgctgctgctgaaggtgtctgcacacatcaccgagcagctgggcatggccccaggtggcgagttcagggaggccttcaaggaggtgggcacagggtgaggtagggggtggccacagggatgtggctcacaggggtggtccggggttcccantgctccccaacacccagcctctgctccaggccagcaaggtgcctttctgcaagttccacctgggtgaccgacccatccccgtcaccttcaagagggccatcgcagcgctctccttctggcagaaggtcaggctggcttggggcctgtgcttcctgtcagaccccatcaggtagggctgcccccgggaccctggccggcctgcagggtggtctgtgggaggctccaggccctcctgtgcaggtccaagcgcagccaatcctcactcaaggccttccctgccctttccttccgccacaaatcccaaacaaacgtgctgtggtccctgcccggtgtccacagtgccagccccacccccccagcccgttgcccatccctgcggggctgcagccatccctctccacagcaaggatgacgtggaacgctgcaagcagaaggacctactggagcagatgatggccgagatgattggcgagttcccagacctgcaccgcaccatcgtctcggagcgcgacgtctacctaacctacatgctgcgccaggccgcgcggcgcctcgagctgcctcgggcctctgacggtgacggccgcccgcaggcgtgggaccccctgtgaggctgaggcccgagcaggtactgaccccttgtccttccccacagccgagcccaggaagtgcgtcccctccgtggtcgtgggcgtcgtgggcatgggccacgtgcctggcatcgagaagaactggagcaccgacctcaacatccaggagatcatgaccgtgcccccgccgtccgtctccggcagagtgtctcggttggccgtgaaggccgccttcttcggcctgctgggctacagcctgtactggatgggccgccgcaccgcgagcctggtcctgtcgctgcccgccgcgcagtactgcctgcagagggtgaccgaggcccggcacaagtaggagactgctccccgcccgctcgggcccctgaggagccagtgcccccgcggcacttctgggtgccaggtgcatcctagcccgcccgaggcccctgccaccccccatgggggtctgggcccggcctcgcctgccctcctgggccagtcacccctcccccagcccacccaaataaaggattatttaaccttggtctggacaaacacccaaccacagacaaacaaacacctgaagcgaaccatcaaactgtcacagggaatgcggcaacaaacgacggcacgtccgaaccggggccacaagcgggcacaatgcacgcgtgcaacccagcgaaacccccggcgcctccagtcagcgcacaacaaacaggcggggagaaagaaccccgcccccggggtcacacccactcaataagagcggacggccggatgctcaaaagacgccaacgaaaagacccgcagggctcaacacgccgggacacataagaggcgaagctagcggacccaat

SEQ ID NO: 459285 - DNA, 2107 bp, Homo sapiens
gtccgttgagggcccgcgccgcatggaggccggctgaggagcgccgctgcctcgcctcggtacgccgcgcggcgcggacggcgcgctccccacaggtgcaggaagccgccgcccagccatggacggggaggagcagcagccaccgcacgaggccaacgtggaacctgttgtgccgtcagaggcttcagagccggtgcccagggtgctttctggagacccccagaacctgtccgacgtggacgccttcaacctgctcctggagatgaagctgaagcggcggcgtcagcggcccaacctgccgcgcactgtgacccagttggtggctgaggacgggagcagggtgtacgtggtggggacagcccacttcagcgacgacagcaagagggacgttgtgaagaccatccgggaggtgcagcctgacgtggtggtcgtggagctctgccaatatcgtgtgtccatgctgaagatggacgagagcacgctgctgcgggaggcccaggagctcagcctggagaagctgcagcaggccgtgaggcagaacgggctcatgtcggggctgatgcagatgctgctgctgaaggtgtctgcacacatcaccgagcagctgggcatggccccaggtggcgagttcagggaggccttcaaggaggccagcaaggtgcctttctgcaagttccacctgggtgaccgacccatccccgtcaccttcaagagggccatcgcagcgctctccttctggcagaaggtcaggctggcttggggcctgtgcttcctgtcagaccccatcagcaaggatgacgtggaacgctgcaagcagaaggacctactggagcagatgatggccgagatgattggcgagttcccagacctgcaccgcaccatcgtctcggagcgcgacgtctacctaacctacatgctgcgccaggccgcgcggcgcctcgagctgcctcgggcctctgacgccgagcccaggaagtgcgtcccctccgtggtcgtgggcgtcgtgggcatgggccacgtgcctggcatcgagaagaactggagcaccgacctcaacatccaggagatcatgaccgtgcccccgccgtccgtctccggcagagtgtctcggttggccgtgaaggccgccttcttcggcctgctgggctacagcctgtactggatgggccgccgcaccgcgagcctggtcctgtcgctgcccgccgcgcagtactgcctgcagagggtgaccgaggcccggcacaaagagaaaaactgaagtaaatgtcaaaaaacaccagccttaaatccaaagggacagaattcgtgttcttgggtctgtcccgagtgggctcgcgtgcagccaaacatcagctctgggtccaggcgtggcctcagctgggagcctgtgtcctgagcccccggagcgaaggggtgcctggggcatcttggccctctctgggcagacaatgtgtgcacctatgtggaaggccaaggacatgggctgtggccaggcctgtcccgctcaggccccctgcccggcggccgtctgtgtgcggggcctccctcctggctgtccaggacacagcccgtgcagccccagcctggacccaggccatctctggttgtgtctgtgccgactcggtgttgaatcaaatcaggtgtgcgtcaggagccggctgtgtccttcctgccacactcggggattcattccttagaaactgaaataaattctaattttggaaactcccaaacaaccaaaacacaacaaacacaaaaaacataacaaatctacaaaaaaacaactcgaacccacaacaccggcgcgggcggcgacaccttaaaagaatagacccccctacggggggggcacaacattatacgcagtttcgaactcagggtgagcttgaactaaaacaagatcgggcggccacaactatttaggaggacgttaactaaaaataaaccagatagggtagggtgctacgtatctttaaacgacgagccgttctaagacaagcgctacaacaggctcaaccaaggaaggaaacactcatagtggaaaggaaagagccccaactctaagatggtggggggaagtcaaaaacggaggccgaacatgatcccg

SEQ ID NO: 459286 - DNA, 965 bp, Homo sapiens
gtccgttgagggcccgcgccgcatggaggccggctgaggagcgccgctgcctcgcctcggtacgccgcgcggcgcggacggcgcgctccccacaggtgcaggaagccgccgcccagccatggacggggaggagcagcagccaccgcacgaggccaacgtggaacctgttgtgccgtcagaggcttcagagccggtgcccagggtgctttctggagacccccagaacctgtccgacgtggacgccttcaacctgctcctggagatgaagctgaagcggcggcgtcagcggcccaacctgccgcgcactgtgacccagttggtggctgaggacgggagcagggtgtacgtggtggggacagcccacttcagcgacgacagcaagagggacgttgtgaagaccatccgggaggtgcagcctgacgtggtggtcgtggagctctgccaatatcgtgtgtccatgctgaagatggacgagagcacgctgctgcgggaggcccaggagctcagcctggagaagctgcagcaggccgtgaggcagaacgggctcatgtcggggctgatgcagatgctgctgctgaaggtgtctgcacacatcaccgagcagctgggcatggccccaggtggcgagttcagggaggccttcaaggaggccagcaaggtgcctttctgcaagttccacctgggtgaccgacccatccccgtcaccttcaagagggccatcgcagcgctctccttctggcagaaggtcaggctggcttggggcctgtgcttcctgtcagaccccatcagcaaggatgacgtggaacgctgcaagcagaaggacacccaggccatctctggttgtgtctgtgccgactcggtgttgaatcaaatcaggtgtgcgtcaggagccggctgtgtccttcctgccacactcggggattcattccttagaaactgaaataaattctaattttggaaactcc

SEQ ID NO: 459287 - DNA, 2329 bp, Homo sapiens
gtccgttgagggcccgcgccgcatggaggccggctgaggagcgccgctgcctcgcctcggtacgccgcgcggcgcggacggcgcgctccccacaggtgcaggaagccgccgcccagccatggacggggaggagcagcagccaccgcacgaggccaacgtggaacctgttgtgccgtcagaggcttcagagccggtgcccagggtgctttctggagacccccagaacctgtccgacgtggacgccttcaacctgctcctggagatgaagctgaagcggcggcgtcagcggcccaacctgccgcgcactgtgacccagttggtggctgaggacgggagcagggtgtacgtggtggggacagcccacttcagcgacgacagcaagagggacgttgtgaagaccatccgggaggtgcagcctgacgtggtggtcgtggagctctgccaatatcgtgtgtccatgctgaagatggacgagagcacgctgctgcgggaggcccaggagctcagcctggagaagctgcagcaggccgtgaggcagaacgggctcatgtcggggctgatgcagatgctgctgctgaaggtgtctgcacacatcaccgagcagctgggcatggccccaggtggcgagttcagggaggccttcaaggaggccagcaaggtgcctttctgcaagttccacctgggtgaccgacccatccccgtcaccttcaagagggccatcgcagcgctctccttctggcagaaggtcaggctggcttggggcctgtgcttcctgtcagaccccatcagcaaggatgacgtggaacgctgcaagcagaaggacctactggagcagatgatggccgagatgattggcgagttcccagacctgcaccgcaccatcgtctcggagcgcgacgtctacctaacctacatgctgcgccaggccgcgcggcgcctcgagctgcctcgggcctctgacgccgagcccaggaagtgcgtcccctccgtggtcgtgggcgtcgtgggcatgggccacgtgcctggcatcgagaagaactggagcaccgacctcaacatccaggagatcatgaccgtgcccccgccgtccgtctccggcagagtgtctcggttggccgtgaaggccgccttcttcggcctgctgggctacagcctgtactggatgggccgccgcaccgcgagcctggtcctgtcgctgcccgccgcgcagtactgcctgcagagggtgaccgaggcccggcacaagtaggagactgctccccgcccgctcgggcccctgaggagccagtgcccccgcggcacttctgggtgccaggtgcatcctagcccgcccgaggcccctgccaccccccatgggggtctgggcccggcctcgcctgccctcctgggccagtcacccctcccccagcccacccaaataaaggattatttaactgtctgagctcaggcctcccggcagcccctcccctcccacactgcaggggccgttccccggcttctggacaagacacccagctccgagggggcaggggcttataggaggggccgaggcgtgcgctgccctctcagccctggtggcaggcgggggacaatggccactgtccctacctcactgtgccttcctgtgctccggccacaggagcgtcggcccaggggcggctcctgggggctccagggcaggcgagactgggaaaggcccagccctggagctccagccgaccccaccgtgcccctggcatcctggccctggccgccacctccctggcaccgtctgcctgcagggattctgtgtttttggcttttttaatgtcttaaaatcttttactcaggtaattttaatttcagagagaaaaactgaagtaaatgtcaaaaaacaccagccttaaatccaaagggacagaattcgtgttcttgggtctgtcccgagtgggctcgcgtgcagccaaacatcagctctgggtccaggcgtggcctcagctgggagcctgtgtcctgagcccccggagcgaaggggtgcctggggcatcttggccctctctgggcagacaatgtgtgcacctatgtggaaggccaaggacatgggctgtggccaggcctgtcccgctcaggccccctgcccggcggccgtctgtgtgcggggcctccctcctggctgtccaggacacagcccgtgcagccccagcctggacccaggccatctctggttgtgtctgtgccgactcggtgttgaatcaaatcaggtgtgcgtcaggagccggctgtgtccttcctgccacactcggggattcattccttagaaactgaaataaattctaattttggaaactcc

SEQ ID NO: 459288 - DNA, 2302 bp, Homo sapiens
gtccgttgagggcccgcgccgcatggaggccggctgaggagcgccgctgcctcgcctcggtacgccgcgcggcgcggacggcgcgctccccacaggtgcaggaagccgccgcccagccatggacggggaggagcagcagccaccgcacgaggccaacgtggaacctgttgtgccgtcagaggcttcagagccggtgcccagggtgctttctggagacccccagaacctgtccgacgtggacgccttcaacctgctcctggagatgaagctgaagcggcggcgtcagcggcccaacctgccgcgcactgtgacccagttggtggctgaggacgggagcagggtgtacgtggtggggacagcccacttcagcgacgacagcaagagggacgttgtgaagaccatccgggaggtgcagcctgacgtggtggtcgtggagctctgccaatatcgtgtgtccatgctgaagatggacgagagcacgctgctgcgggaggcccaggagctcagcctggagaagctgcagcaggccgtgaggcagaacgggctcatgtcggggctgatgcagatgctgctgctgaaggtgtctgcacacatcaccgagcagctgggcatggccccaggtggcgagttcagggaggccttcaaggaggccagcaaggtgcctttctgcaagttccacctgggtgaccgacccatccccgtcaccttcaagagggccatcgcagcgctctccttctggcagaaggtcaggctggcttggggcctgtgcttcctgtcagaccccatcagcaaggatgacgtggaacgctgcaagcagaaggacctactggagcagatgatggccgagatgattggcgagttcccagacctgcaccgcaccatcgtctcggagcgcgacgtctacctaacctacatgctgcgccaggccgcgcggcgcctcgagctgcctcgggcctctgacgccgagcccaggaagtgcgtcccctccgtggtcgtgggcgtcgtgggcatgggccacgtgcctggcatcgagaagaactggagcaccgacctcaacatccaggagatcatgacagtgtctcggttggccgtgaaggccgccttcttcggcctgctgggctacagcctgtactggatgggccgccgcaccgcgagcctggtcctgtcgctgcccgccgcgcagtactgcctgcagagggtgaccgaggcccggcacaagtaggagactgctccccgcccgctcgggcccctgaggagccagtgcccccgcggcacttctgggtgccaggtgcatcctagcccgcccgaggcccctgccaccccccatgggggtctgggcccggcctcgcctgccctcctgggccagtcacccctcccccagcccacccaaataaaggattatttaactgtctgagctcaggcctcccggcagcccctcccctcccacactgcaggggccgttccccggcttctggacaagacacccagctccgagggggcaggggcttataggaggggccgaggcgtgcgctgccctctcagccctggtggcaggcgggggacaatggccactgtccctacctcactgtgccttcctgtgctccggccacaggagcgtcggcccaggggcggctcctgggggctccagggcaggcgagactgggaaaggcccagccctggagctccagccgaccccaccgtgcccctggcatcctggccctggccgccacctccctggcaccgtctgcctgcagggattctgtgtttttggcttttttaatgtcttaaaatcttttactcaggtaattttaatttcagagagaaaaactgaagtaaatgtcaaaaaacaccagccttaaatccaaagggacagaattcgtgttcttgggtctgtcccgagtgggctcgcgtgcagccaaacatcagctctgggtccaggcgtggcctcagctgggagcctgtgtcctgagcccccggagcgaaggggtgcctggggcatcttggccctctctgggcagacaatgtgtgcacctatgtggaaggccaaggacatgggctgtggccaggcctgtcccgctcaggccccctgcccggcggccgtctgtgtgcggggcctccctcctggctgtccaggacacagcccgtgcagccccagcctggacccaggccatctctggttgtgtctgtgccgactcggtgttgaatcaaatcaggtgtgcgtcaggagccggctgtgtccttcctgccacactcggggattcattccttagaaactgaaataaattctaattttggaaactcc

SEQ ID NO: 459289 - DNA, 2225 bp, Homo sapiens
gtccgttgagggcccgcgccgcatggaggccggctgaggagcgccgctgcctcgcctcggtacgccgcgcggcgcggacggcgcgctccccacaggtgcaggaagccgccgcccagccatggacggggaggagcagcagccaccgcacgaggccaacgtggaacctgttgtgccgtcagaggcttcagagccggtgcccagggtgctttctggagacccccagaacctgtccgacgtggacgccttcaacctgctcctggagatgaagctgaagcggcggcgtcagcggcccaacctgccgcgcactgtgacccagttggtggctgaggacgggagcagggtgtacgtggtggggacagcccacttcagcgacgacagcaagagggacgttgtgaagaccatccgggaggtgcagcctgacgtggtggtcgtggagctctgccaatatcgtgtgtccatgctgaagatggacgagagcacgctgctgcgggaggcccaggagctcagcctggagaagctgcagcaggccgtgaggcagaacgggctcatgtcggggctgatgcagatgctgctgctgaaggtgtctgcacacatcaccgagcagctgggcatggccccaggtggcgagttcagggaggccttcaaggaggccagcaaggtgcctttctgcaagttccacctgggtgaccgacccatccccgtcaccttcaagagggccatcgcagcgctctccttctggcagaaggtcaggctggcttggggcctgtgcttcctgtcagaccccatcagcaaggatgacgtggaacgctgcaagcagaaggacctactggagcagatgatggccgagatgattggcgagttcccagacctgcaccgcaccatcgtctcggagcgcgacgtctacctaacctacatgctgcgccaggccgcgcggcgcctcgagctgcctcgggcctctgacgccgagcccaggaagtgcgtcccctccgtggtcgtgggcgtcgtgggcatgggccacgtgcctggcatcgagaagaactggagcaccgacctcaacatccaggagatcatgacgtgagtgcccgcccctccctgcaagccccaccccacaagcccccaggtggaggctgagcgccctggaggccaaccacatgcggcagtgacccaggcatgggggctggggtatggggagcccacccccagccaggcccagcgccccctccctcccacagcgtgcccccgccgtccgtctccggcagagtgtctcggttggccgtgaaggccgccttcttcggcctgctgggctacagcctgtactggattatttaactgtctgagctcaggcctcccggcagcccctcccctcccacactgcaggggccgttccccggcttctggacaagacacccagctccgagggggcaggggcttataggaggggccgaggcgtgcgctgccctctcagccctggtggcaggcgggggacaatggccactgtccctacctcactgtgccttcctgtgctccggccacaggagcgtcggcccaggggcggctcctgggggctccagggcaggcgagactgggaaaggcccagccctggagctccagccgaccccaccgtgcccctggcatcctggccctggccgccacctccctggcaccgtctgcctgcagggattctgtgtttttggcttttttaatgtcttaaaatcttttactcaggtaattttaatttcagagagaaaaactgaagtaaatgtcaaaaaacaccagccttaaatccaaagggacagaattcgtgttcttgggtctgtcccgagtgggctcgcgtgcagccaaacatcagctctgggtccaggcgtggcctcagctgggagcctgtgtcctgagcccccggagcgaaggggtgcctggggcatcttggccctctctgggcagacaatgtgtgcacctatgtggaaggccaaggacatgggctgtggccaggcctgtcccgctcaggccccctgcccggcggccgtctgtgtgcggggcctccctcctggctgtccaggacacagcccgtgcagccccagcctggacccaggccatctctggttgtgtctgtgccgactcggtgttgaatcaaatcaggtgtgcgtcaggagccggctgtgtccttcctgccacactcggggattcattccttagaaactgaaataaattctaattttggaaactcc

SEQ ID NO: 459290 - DNA, 1771 bp, Homo sapiens
gtccgttgagggcccgcgccgcatggaggccggctgaggagcgccgctgcctcgcctcggtacgccgcgcggcgcggacggcgcgctccccacaggtgcaggaagccgccgcccagccatggacggggaggagcagcagccaccgcacgaggccaacgtggaacctgttgtgccgtcagaggcttcagagccggtgcccagggtgctttctggagacccccagaacctgtccgacgtggacgccttcaacctgctcctggagatgaagctgaagcggcggcgtcagcggcccaacctgccgcgcactgtgacccagttggtggctgaggacgggagcagggtgtacgtggtggggacagcccacttcagcgacgacagcaagagggacgttgtgaagaccatccgggaggtgcagcctgacgtggtggtcgtggagctctgccaatatcgtgtgtccatgctgaagatggacgagagcacgctgctgcgggaggcccaggagctcagcctggagaagctgcagcaggccgtgaggcagaacgggctcatgtcggggctgatgcagatgctgctgctgaaggtgtctgcacacatcaccgagcagctgggcatggccccaggtggcgagttcagggaggccttcaaggaggccagcaaggtgcctttctgcaagttccacctgggtgaccgacccatccccgtcaccttcaagagggccatcgcagcgctctccttctggcagaaggtcaggctggcttggggcctgtgcttcctgtcagaccccatcagcaaggatgacgtggaacgctgcaagcagaaggacctactggagcagatgatggccgagatgattggcgagttcccagacctgcaccgcaccatcgtctcggagcgcgacgtctacctaacctacatgctgcgccaggccgcgcggcgcctcgagctgcctcgggcctctgacgccgagcccaggaagtgcgtcccctccgtggtcgtgggcgtcgtgggcatgggccacgtgcctggcatcgagaagaactggagcaccgacctcaacatccaggagatcatgaccgtgcccccgccgtccgtctccggcagagtgtctcggttggccgtgaaggccgccttcttcggcctgctgggctacagcctgtactggatgggccgccgcaccgcgagcctggtcctgtcgctgcccgccgcgcagtactgcctgcagagggtgaccgaggcccggcacaagtaggagactgctccccgcccgctcgggcccctgaggagccagtgcccccgcggcacttctgggtgccaggtgcatcctagcccgcccgaggcccctgccaccccccatgggggtctgggcccggcctcgcctgccctcctgggccagtcacccctcccccagcccacccaaataaaggattatttaactgtctgagctcaggcctcccggcagcccctcccctcccacactgcaggggccgttccccggcttctggacaagacacccagctccgagggggcaggggcttataggaggggccgaggcgtgcgctgccctctcagccctggtggcaggcgggggacaatggccactgtccctacctcactgtgccttcctgtgctacccaggccatctctggttgtgtctgtgccgactcggtgttgaatcaaatcaggtgtgcgtcaggagccggctgtgtccttcctgccacactcggggattcattccttagaaactgaaataaattctaattttggaaactcc

SEQ ID NO: 459291 - DNA, 4570 bp, Homo sapiens
  misc_feature (1557)..(1557): n is a, c, g, or t
  misc_feature (2861)..(2861): n is a, c, g, or t
gtccgttgagggcccgcgccgcatggaggccggctgaggagcgccgctgcctcgcctcggtacgccgcgcggcgcggacggcgcgctccccacaggtgcaggaagccgccgcccagccatggacggggaggagcagcagccaccgcacgaggccaacgtggaacctgttgtgccgtcagaggcttcagagccggtgcccagggtgctttctggagacccccagaacctgtccgacgtggacgccttcaacctgctcctggagatgaagctgaagcggcggcgtcagcggcccaacctgccgcgcactgtgacccagttggtggctgaggacgggagcagggtgtacgtggtggggacagcccacttcagcgacgacagcaagagggacgttgtgaagaccatccgggaggtgcagcctgacgtggtggtcgtggagctctgccaatatcgtgtgtccatgctgaagatggacgagagcacgctgctgcgggaggcccaggagctcagcctggagaagctgcagcaggccgtgaggcagggtgcgcagccgcgggcaagggtcagggtcagggtcggggtcaaagccacctgtttgcctgttgcccaggttcctctcacagcccatgcccccagtcagtgtggctgtgcctggcctgccctggggattgccgggttagggacctcccctgggccaggagaaatgaaagaggctccattacccggtttcaggcaagggaggaggaaatgggtggctctccaagctgaggcaggggctggtcacccgaggactgggttgctgagcagttgctggggatgggtcaggtctcagtgcaaggttggccccccggtaccacacccaggcccaaagtgggtggggctcagggctcctcctgtccccacttctccagccttgcagtgaccggagaggcaggactttctcattgctctttgtgttttcggtttttgttttttttttttgagacagagtctcgctctgttgcccaggctggagtgcagtggtgcgatcttggctcactgcaaccttcgcctcctgggttctagtgatgctcccgcctcagcctcctgagtagctgggattacaggtgcctgccaccacacctggctaattttttgtatttttagtagagacggggtttcaccatgttgcccaggttcatctcaaactcctgagctcaggcaatccacccacctcagcctcccaaagtgctgggaatacaggcatgagccaccgcgcccggccaggctttgtgttttcaaaggaaacaattataatgagatcttatagaaatgtccctaaacgtttggcgcctgcctttcattttttaatttctccagatgaggcaagtcaccaaagaagacctctgtgggccgtcttctaaagggcagtccccggtccagccagggcccagcactgggcagcctccccaccagagcctggggcccagtgatctcgaaggggcatagaattcggcagtgccgtgctgctcactgctgcggtgtcacagagggaagggggcgtggggcagggtctggganacaccaggtgtccgcttcacctgtcccctcccgggggacactcgctgtgccctggtgtctaggtttctactggggttggtcacaggcacgtctgagctcagaccccagcccctccagaggtggagtgggtcccagtggaccaaggcctcgtgaatgtctcatcctaagttagcctgggctccccagggtggcctgggccccggggaaacacgggcactccatcaggcgggacattcccagggctcatggctcaggcccagaccgtccctgggcgcgtgcaggtgtgagcgattgcccggcgctgtgtggcccccggggctttgctgcccttctgtgggcatcatctccttcacacgtggacacccccgtggtgccagccggccggtgagacaggggcaataggcctcgggctgtagctgctgaagatgggggtggcctggtgtccgcaccagcagtgctgtgctgacctcagcaggcaggtgtgagtggtgaggccctttctccagcctgcctgcccagcacccagcgtctgtgccagctcaaggcggccccttcgcagaacgagactgcctcatgaaggccttttcttcttctttttttttttttgagacagagcagtctcactctgtcacccaggctggtgatctcggctcactgcaacctctgcctccggggttcaagtgattctcctgcctcagcctcccgagtagctgggattacaggcacccgccagcacacccggctaatttttatatttttagtagagatggggtttcgccatgttggccaggctggtctgagagagaactcctgacctcgtgatccgcctgcctcagcctcccaaagtgctgggatgacaggcgtgcgccactgcacccggcccgtgaaggtcttttctgaagggagctacctttgagaagtgcctgttgggacagaactccctgctctggtctgaccctctgcacgctagggtggtcctgcacctgtcggggagggggccaaggacacagcactgggctggggcagggctctgcgctggtgctgcctgccatcccagttctgccattcccccagcgcacccccgcacccgcccctccagctgatgcctgctccctctctctgcagaacgggctcatgtcggggctgatgcagatgctgctgctgaaggtgtctgcacacatcaccgagcagctgggcatggccccaggtggcgagttcagggaggccttcaaggaggtgggcacagggtgaggtagggggtggccacagggatgtggctcacaggggtggtccggggttcccantgctccccaacacccagcctctgctccaggccagcaaggtgcctttctgcaagttccacctgggtgaccgacccatccccgtcaccttcaagagggccatcgcagcgctctccttctggcagaaggtcaggctggcttggggcctgtgcttcctgtcagaccccatcagcaaggatgacgtggaacgctgcaagcagaaggacctactggagcagatgatggccgagatgattggcgagttcccagacctgcaccgcaccatcgtctcggagcgcgacgtctacctaacctacatgctgcgccaggccgcgcggcgcctcgagctgcctcgggcctctgacgccgagcccaggaagtgcgtcccctccgtggtcgtgggcgtcgtgggcatgggccacgtgcctggcatcgagaagaactggagcaccgacctcaacatccaggagatcatgaccgtgcccccgccgtccgtctccggcagagtgtctcggttggccgtgaaggccgccttcttcggcctgctgggctacagcctgtactggatgggccgccgcaccgcgagcctggtcctgtcgctgcccgccgcgcagtactgcctgcagagggtgaccgaggcccggcacaagtaggagactgctccccgcccgctcgggcccctgaggagccagtgcccccgcggcacttctgggtgccaggtgcatcctagcccgcccgaggcccctgccaccccccatgggggtctgggcccggcctcgcctgccctcctgggccagtcacccctcccccagcccacccaaataaaggattatttaactgtctgagctcaggcctcccggcagcccctcccctcccacactgcaggggccgttccccggcttctggacaagacacccagctccgagggggcaggggcttataggaggggccgaggcgtgcgctgccctctcagccctggtggcaggcgggggacaatggccactgtccctacctcactgtgccttcctgtgctccggccacaggagcgtcggcccaggggcggctcctgggggctccagggcaggcgagactgggaaaggcccagccctggagctccagccgaccccaccgtgcccctggcatcctggccctggccgccacctccctggcaccgtctgcctgcagggattctgtgtttttggcttttttaatgtcttaaaatcttttactcaggtaattttaatttcagagagaaaaactgaagtaaatgtcaaaaaacaccagccttaaatccaaagggacagaattcgtgttcttgggtctgtcccgagtgggctcgcgtgcagccaaacatcagctctgggtccaggcgtggcctcagctgggagcctgtgtcctgagcccccggagcgaaggggtgcctggggcatcttggccctctctgggcagacaatgtgtgcacctatgtggaaggccaaggacatgggctgtggccaggcctgtcccgctcaggccccctgcccggcggccgtctgtgtgcggggcctccctcctggctgtccaggacacagcccgtgcagccccagcctggacccaggccatctctggttgtgtctgtgccgactcggtgttgaatcaaatcaggtgtgcgtcaggagccggctgtgtccttcctgccacactcggggattcattccttagaaactgaaataaattctaattttggaaactcc

SEQ ID NO: 459292 - DNA, 1389 bp, Homo sapiens
ggaagaactggagcaccgacctcaacatccaggcacgtggcccatgcccacgacgcccacgaccacggaggggacgcacttcctggcatcgagaagaactggagcaccgacctcaacatccaggagatcatgaccgtgcccccgccgtccgtctccggcagagtgtctcggttggccgtgaaggccgccttcttcggcctgctgggctacagcctgtactggatgggccgccgcaccgcgagcctggtcctgtcgctgcccgccgcgcagtactgcctgcagagggtgaccgaggcccggcacaagtaggagactgctccccgcccgctcgggcccctgaggagccagtgcccccgcggcacttctgggtgccaggtgcatcctagcccgcccgaggcccctgccaccccccatgggggtctgggcccggcctcgcctgccctcctgggccagtcacccctcccccagcccacccaaataaaggattatttaactgtctgagctcaggcctcccggcagcccctcccctcccacactgcaggggccgttccccggcttctggacaagacacccagctccgagggggcaggggcttataggaggggccgaggcgtgcgctgccctctcagccctggtggcaggcgggggacaatggccactgtccctacctcactgtgccttcctgtgctccggccacaggagcgtcggcccaggggcggctcctgggggctccagggcaggcgagactgggaaaggcccagccctggagctccagccgaccccaccgtgcccctggcatcctggccctggccgccacctccctggcaccgtctgcctgcagggattctgtgtttttggcttttttaatgtcttaaaatcttttactcaggtaattttaatttcagagagaaaaactgaagtaaatgtcaaaaaacaccagccttaaatccaaagggacagaattcgtgttcttgggtctgtcccgagtgggctcgcgtgcagccaaacatcagctctgggtccaggcgtggcctcagctgggagcctgtgtcctgagcccccggagcgaaggggtgcctggggcatcttggccctctctgggcagacaatgtgtgcacctatgtggaaggccaaggacatgggctgtggccaggcctgtcccgctcaggccccctgcccggcggccgtctgtgtgcggggcctccctcctggctgtccaggacacagcccgtgcagccccagcctggacccaggccatctctggttgtgtctgtgccgactcggtgttgaatcaaatcaggtgtgcgtcaggagccggctgtgtccttcctgccacactcggggattcattccttagaaactgaaataaattctaattttggaaactcc

SEQ ID NO: 459293 - DNA, 1583 bp, Homo sapiens
gtccgttgagggcccgcgccgcatggaggccggctgaggagcgccgctgcctcgcctcggtacgccgcgcggcgcggacggcgcgctccccacaggtgcaggaagccgccgcccagccatggacggggaggagcagcagccaccgcacgaggccaacgtggaacctgttgtgccgtcagaggcttcagagccggtgcccagggtgctttctggagacccccagaacctgtccgacgtggacgccttcaacctgctcctggagatgaagctgaagcggcggcgtcagcggcccaacctgccgcgcactgtgacccagttggtggctgaggacgggagcagggtgtacgtggtggggacagcccacttcagcgacgacagcaagagggacgttgtgaagaccatccgggaggtgcagcctgacgtggtggtcgtggagctctgccaatatcgtgtgtccatgctgaagatggacgagagcacgctgctgcgggaggcccaggagctcagcctggagaagctgcagcaggccgtgaggcagccagtgcccccgcggcacttctgggtgccaggtgcatcctagcccgcccgaggcccctgccaccccccatgggggtctgggcccggcctcgcctgccctcctgggccagtcacccctcccccagcccacccaaataaaggattatttaactgtctgagctcaggcctcccggcagcccctcccctcccacactgcaggggccgttccccggcttctggacaagacacccagctccgagggggcaggggcttataggaggggccgaggcgtgcgctgccctctcagccctggtggcaggcgggggacaatggccactgtccctacctcactgtgccttcctgtgctccggccacaggagcgtcggcccaggggcggctcctgggggctccagggcaggcgagactgggaaaggcccagccctggagctccagccgaccccaccgtgcccctggcatcctggccctggccgccacctccctggcaccgtctgcctgcagggattctgtgtttttggcttttttaatgtcttaaaatcttttactcaggtaattttaatttcagagagaaaaactgaagtaaatgtcaaaaaacaccagccttaaatccaaagggacagaattcgtgttcttgggtctgtcccgagtgggctcgcgtgcagccaaacatcagctctgggtccaggcgtggcctcagctgggagcctgtgtcctgagcccccggagcgaaggggtgcctggggcatcttggccctctctgggcagacaatgtgtgcacctatgtggaaggccaaggacatgggctgtggccaggcctgtcccgctcaggccccctgcccggcggccgtctgtgtgcggggcctccctcctggctgtccaggacacagcccgtgcagccccagcctggacccaggccatctctggttgtgtctgtgccgactcggtgttgaatcaaatcaggtgtgcgtcaggagccggctgtgtccttcctgccacactcggggattcattccttagaaactgaaataaattctaattttggaaactcc

SEQ ID NO: 459294 - DNA, 652 bp, Homo sapiens
aagtagctgggagtacaggcatgcgccaccacacttggctaattttaaaatgttttttttaaagatgcggtctcaccatattgtccagactggtcttgaactcctgggctcaagccatcctcccatcttggccttccaaagtgttgggattacaggcatgagccaccacatgtggccaggagttccagaccagcctgagcaacatagcgagaccctgtctctgtttgtgtgtgtgtggttggggttttgtttttttttttttttaaagaattatagctcagtcctatgattaggcaagttgagaaaatattgatgaagatcaggggtgctgaagcctggttcctggggtcgcttctgatctaggcggttcttgcctctggtgactggtgttaattggcaggagtgggaggagggaggacaagtggaagtctaggctggctgagctgttctgtctcgaaaagttcctaaaactgtgctgctttaaaaaaaaaaaaagtaatttatgagacacattctcaatttccattaatcatctcctaaagggggtaaaccaggaagccgctgggtgaaaacaggctgttggcaattcctgagtcatgtgacccattctctaaagactagaatatttaacttaaatcagtgagaaactctg

SEQ ID NO: 459295 - DNA, 3921 bp, Homo sapiens
  misc_feature (1955)..(1955): n is a, c, g, or t
cctgcgtagcgtgaccctgcgcagcctgggaggcgggtcttagctccaggtgcgtacggcatctgacttgacgtggcccacaactgaaaggtctggggagaaggcgccgtgtccgggtgtggagaggggcgtcgtggaagcgagaagagtggcccgtccctctcctccccctttccctctttcggaaagtggtttctgcggggcccgggagcctcggagtaccgaacctcgatctccggggcggggtccttggtggggactgagcgccccctcccggggacgggcggtctggccgcggagtcccctgcgggagcgtgattggctggaaacggtcccgaacccccaggggagcccgatccctgggggaccctggcttcggactccagtatctgtcgtcgcagggtccctgccctagtggcctatgtcccttgctcggggccatggagacactgcggccagtacggcggcgcctctgtctgaagaaggggaagtgacctccggcctccaggctctggccgtggaggataccggaggcccctctgcctcggccggtaaggccgaggacgagggggaaggaggccgagaggagaccgagcgtgaggggtccgggggcgaggaggcgcagggagaagtccccagcgctgggggagaagagcctgccgaggaggactccgaggactggtgcgtgccctgcagcgacgaggaggtggagctgcctgcggatgggcagccctggatgcccccgccctccgaaatccagcggctctatgaactgctggctgcccacggtactctggagctgcaagccgagatcctgccccgcgggctcccacgccggaggcccagagcgaagaggagagatccgatgaggagccggaggccaaagaagaggaagaggaaaaaccacacatgcccacggaatttgattttgatgatgagccagtgacaccaaaggactccctgattgaccggagacgcaccccaggaagctcagcccggagccagaaacgggaggcccgcctggacaaggtgctgtcggacatgaagagacacaagaagctggaggagcagatccttcgtaccgggagggacctcttcagcctggactcggaggaccccagccccgccagccccccactccgatcctccgggagtagtctcttccctcggcagcggaaatactgattcccactgctcctgcctctagggtgcagtgtccgtacctgctggagcctgggccctccttccccagcccagacattgagaaacttgggaagaagagagaaacctcaagctcccaaacagcacgttgcgggaaagaggaagagagagtgtgagtgtgtgtgtgtgttttttctattgaacacctgtagagtgtgtgtgtgtgttttctattgaacacctatagagagagtgtgtgtgttttctattgaacatctatatagagagagtgtgtgagtgtgtgttttctattgaacacctattcagagacctggactgaattttctgagtctgaaataaaagatgcagagctatcatctcttaaaaggaggggctgtagctgtagctcaacagttaggccccacttgaagggagaggcagaattgtactcacccagattggaaaatgaaagccagatgggtagaggtgccctcagttagcacctgtcccatctcgggccctccaactcctcccagtcccactccagtgcagccagctggctccaaggtagaaacccatgagcactcagggagcagtgtgccttcagctgcagcagaagcagcccggaggataaaatgagaaccagctgcacacgggccctttaactcccaagccccacccctgggcttggcctgccttgccctgccgggaagtgatccccaaggcagggtgagagttccccatctgaggcgtttgttgcagctacctgcacttctagatgtgagtacattgtnctagccccccaaaccccaaatcaggggcagatctttgtatcccttgaggctctctttagtcctgtcttgctttgaagggccttgcttctgctggggcagggaaaacatgtctgaatcagagtggggaaggaggatgggtggtggctttgcttttggaggtttcactttccaatagttgggagtcttctgggttttgaagtaaaggcagattaacaccaacaccggtcccccacccccctgcaactctcaggcctctctctgacttcagggtcccacctgggaaatcaggtggggaaccttacagggtcattcagaccccatcttagccctagatcggtgcttgctctactcacctgcactgtcctggggacctgggctctggcctgtcaccttgagctccaagaatgtgacctgtacccattcaggccccttaactctgacagatgagggtttcttactcctccatgcagggctgggccagctgttggtctcagtcgatcattcaggaagtcattagcagagtgatttccagaaggcgtagaatttagtgaccaaggttctttcctttttgggaggagaaagtgaaaactaggatgctcagctggacccaccagcctgagattctggggattttagagctgtcccttggggagccaagcacttgggggtggaggtgatagcgaggctgatggcccctgtgttctcagctctctgcctgggtagcccctgggtgatgggggagaggccagctgtcacgtggggtatcaggtggctctgccagaaactcccttggcacacagagcactgggtcggccctcgggtgtggctgtttgggcaggacagccctctgtatgtagccttgagcaggtaggggggccaccttgagtgggtggcccagagacagcctcagggctccaaggtaacggggtgctcaggttatcttgggtgctgccctcccaggttctgggggagcagaggctgggcgctggcccaacttacaggaaacactcacctttgaactgccattggcaccatctgggcagtacacagccccacccaggtcctctagttcttgttctcggcttagaatctttgtgtttctgcctgagaagccactgcctcctagtttgtggtctctacagttatagccaggttggacttccggctccgtcctttgataactgtgtgctcttgggcaaatttcttaacttgcaggttcttgtgaggataacatgagttaattgagggcacttaacactacctggcacagattaagctcatctgaagtgggagctgttacttaggggcgtttgcctagaacacagggtccagaggctctctcccggaaacttagacccagtgagtcagaagtgaggcctgcaaaaagcagcaggagtggggttaagaattccagcctagggctggatgcggtggctcaggcctgtaatcccagtactttgggaggcccgaatgggaggatggcttgaggccaggagttccagaccagcctgagcaacatagcgagaccctgtctctgtttgtgtgtgtgtggttggggttttgtttttttttttttttaaagaattatagctcagtcctatgattaggcaagttgagaaaatattgatgaagatcaggggtgctgaagcctggttcctggggtcgcttctgatctaggcggttcttgcctctggtgactggtgttaattggcaggagtgggaggagggaggacaagtggaagtctaggctggctgagctgttctgtctcgaaaagttcctaaaactgtgctgctttaaaaaaaaaaaaagtaatttatgagacacattctcaatttccattaatcatctcctaaagggggtaaaccaggaagccgctgggtgaaaacaggctgttggcaattcctgagtcatgtgacccattctctaaagactagaatatttaacttaaatcagtgagaaactctg

SEQ ID NO: 459296 - DNA, 1284 bp, Homo sapiens
cctgcgtagcgtgaccctgcgcagcctgggaggcgggtcttagctccaggtgcgtacggcatctgacttgacgtggcccacaactgaaaggtctggggagaaggcgccgtgtccgggtgtggagaggggcgtcgtggaagcgagaagagtggcccgtccctctcctccccctttccctctttcggaaagtggtttctgcggggcccgggagcctcggagtaccgaacctcgatctccggggcggggtccttggtggggactgagcgccccctcccggggacgggcggtctggccgcggagtcccctgcgggagcgtgattggctggaaacggtcccgaacccccaggggagcccgatccctgggggaccctggcttcggactccagtatctgtcgtcgcagggtccctgccctagtggcctatgtcccttgctcggggccatggagacactgcggccagtacggcggcgcctctgtctgaagaaggggaagtgacctccggcctccaggctctggccgtggaggataccggaggcccctctgcctcggccggtaaggccgaggacgagggggaaggaggccgagaggagaccgagcgtgaggggtccgggggcgaggaggcgcagggagaagtccccagcgctgggggagaagagcctgccgaggaggactccgaggactggtgcgtgccctgcagcgacgaggaggtggagctgcctgcggatgggcagccctggatgcccccgccctccgaaatccagcggctctatgaactgctggctgcccacggtactctggagctgcaagccgagatcctgccccgcgggctcccacgccggaggcccagagcgaagaggagagatccgatgaggagccggaggccaaagaagaggaagaggaaaaaccacacatgcccacggaatttgattttgatgatgagccagtgacaccaaaggactccctgattgaccggagacgcaccccaggaagctcagcccggagccagaaacgggaggcccgcctggacaaggtgctgtcggacatgaagagacacaagaagctggaggagcagatccttcgtaccgggagggacctcttcagcctggactcggaggaccccagccccgccagccccccactccgatcctccgggagtagtctcttccctcggcagcggaaatactgattccatggtctgcttagggggatgtcgaactgtggagccgggctctctccagcaactgagaattggagataaagaactacgtccaagcgtcggaaagcc

SEQ ID NO: 459297 - DNA, 1002 bp, Homo sapiens
cctgcgtagcgtgaccctgcgcagcctgggaggcgggtcttagctccaggtgcgtacggcatctgacttgacgtggcccacaactgaaaggtctggggagaaggcgccgtgtccgggtgtggagaggggcgtcgtggaagcgagaagagtggcccgtccctctcctccccctttccctctttcggaaagtggtttctgcggggcccgggagcctcggagtaccgaacctcgatctccggggcggggtccttggtggggactgagcgccccctcccggggacgggcggtctggccgcggagtcccctgcgggagcgtgattggctggaaacggtcccgaacccccaggggagcccgatccctgggggaccctggcttcggactccagtatctgtcgtcgcagggtccctgccctagtggcctatgtcccttgctcggggccatggagacactgcggccagtacggcggcgcctctgtctgaagaaggggaagtgacctccggcctccaggctctggccgtggaggataccggaggcccctctgcctcggccggtaaggccgaggacgagggggaaggaggccgagaggagaccgagcgtgaggggtccgggggcgaggaggcgcagggagaagtccccagcgctgggggagaagagcctgccgaggaggactccgaggactggtgcgtgccctgcagcgacgaggaggtggagctgcctgcggatgggcagccctggatgcccccgccctccgaaatccagcggctctatgaactgctggctgcccacggtactctggagctgcaagccgagatcctgccccgcgggctcccacgccggaggcccagagcgaagaggagagatccgatgaggagccgttaggccacatcgtcacgagtgatcatgggactacgtccactcactgcccagggcacttggacttggcatgattgagcctggttacagctatcggacttcccctgattgacccgcaaaccgcaccc

SEQ ID NO: 459298 - DNA, 1545 bp, Homo sapiens
cctgcgtagcgtgaccctgcgcagcctgggaggcgggtcttagctccaggtgcgtacggcatctgacttgacgtggcccacaactgaaaggtctggggagaaggcgccgtgtccgggtgtggagaggggcgtcgtggaagcgagaagagtggcccgtccctctcctccccctttccctctttcggaaagtggtttctgcggggcccgggagcctcggagtaccgaacctcgatctccggggcggggtccttggtggggactgagcgccccctcccggggacgggcggtctggccgcggagtcccctgcgggagcgtgattggctggaaacggtcccgaacccccaggggagcccgatccctgggggaccctggcttcggactccagtatctgtcgtcgcagggtccctgccctagtggcctatgtcccttgctcggggccatggagacactgcggccagtacggcggcgcctctgtctgaagaaggggaagtgacctccggcctccaggctctggccgtggaggataccggaggcccctctgcctcggccggtaaggccgaggacgagggggaaggaggccgagaggagaccgagcgtgaggggtccgggggcgaggaggcgcagggagaagtccccagcgctgggggagaagagcctgccgaggaggactccgaggactggtgcgtgccctgcagcgacgaggaggtggagctgcctgcggatgggcagccctggatgcccccgccctccgaaatccagcggctctatgaactgctggctgcccacggtactctggagctgcaagccgagatcctgccccgcgggctcccacgccggaggcccagagcgaagaggagagatccgatgaggagccggaggccaaagaagaggaagaggaaaaaccacacatgcccacggaatttgattttgatgatgagccagtgacaccaaaggactccctgattgaccggagacgcaccccaggaagctcagcccggagccagaaacgggaggcccgcctggacaaggtgctgtcggacatgaagagacacaagaagctggaggagcagatccttcgtaccgggagggacctcttcagcctggactcggaggaccccagccccgccagccccccactccgatcctccgggagtagtctcttccctcggcagcggaaatactgattcccactgctcctgcctctagggtgcagtgtccgtacctgctggagcctgggccctccttccccagcccagacattgagaaacttgggaagaagagagaaacctcaagctcccaaacagcacgttgcgggaaagaggaagagagagtgtgagtgtgtgtgtgtgttttttctattgaacacctgtagagtgtgtgtgtgtgttttctattgaacacctatagagagagtgtgtgtgttttctattgaacatctatatagagagagtgtgtgagtgtgtgttttctattgaacacctattcagagacctggactgaattttctgagtctgaaataaaagatgcagagctatcatctctta

SEQ ID NO: 459299 - DNA, 1552 bp, Homo sapiens
cctgcgtagcgtgaccctgcgcagcctgggaggcgggtcttagctccaggtgcgtacggcatctgacttgacgtggcccacaactgaaaggtctggggagaaggcgccgtgtccgggtgtggagaggggcgtcgtggaagcgagaagagtggcccgtccctctcctccccctttccctctttcggaaagtggtttctgcggggcccgggagcctcggagtaccgaacctcgatctccggggcggggtccttggtggggactgagcgccccctcccggggacgggcggtctggccgcggagtcccctgcgggagcgtgattggctggaaacggtcccgaacccccaggggagcccgatccctgggggaccctggcttcggactccagtatctgtcgtcgcagggtccctgccctagtggcctatgtcccttgctcggggccatggagacactgcggccagtacggcggcgcctctgtctgaagaaggggaagtgacctccggcctccaggctctggccgtggaggataccggaggcccctctgcctcggccggtaaggccgaggacgagggggaaggaggccgagaggagaccgagcgtgaggggtccgggggcgaggaggcgcagggagaagtccccagcgctgggggagaagagcctgccgaggaggactccgaggactggtgcgtgccctgcagcgacgaggaggtggagctgcctgcggatgggcagccctggatgcccccgccctccgaaatccagcggctctatgaactgctggctgcccacggtactctggagctgcaagccgagatcctgccccgcgggctcccacgccggaggcccagagcgaagaggagagatccgatgaggagccggaggccaaagaagaggaagaggaaaaaccacacatgcccacggaatttgattttgatgatgagccagtgacaccaaaggactccctgattgaccggagacgcaccccaggaagctcagcccggagccagaaacgggaggcccgcctggacaaggtgctgtcggacatgaagagacacaagaagctggaggagcagatccttcgtaccgggagggacctcttcagcctggactcggaggaccccagccccgccagccccccactccgatcctccgggagtagtctcttccctcggcagcggaaatactgattcccactgctcctgcctctagggtgcagtgtccgtacctgctggagcctgggccctccttccccagcccagacattgagaaacttgggaagaagagagaaacctcaagctcccaaacagcacgttgcgggaaagaggaagagagagtgtgagtgtgtgtgtgtgttttttctattgaacacctgtagagtgtgtgtgtgtgttttctattggcccctgggcagaagggtggccagtgggcccagccctggggaggggatatccccccagtctgctcaggcccctcaagctcctggagacaaccacgtggtgcctgtactgcgctaactcctgattaatacaatggaagtttctgggcatttacaat

SEQ ID NO: 459300 - DNA, 1185 bp, Homo sapiens
agacagcgtggggtggggagggtcctcggggtccttggcagggcacgtgcgggaggaagtggagctgcctgtacgcgcggccctagtcggctcctcaacgtggagcgatgggaggccttgagaagaagaagtatgaacgaggctcggccaccaactacatcacccggaacaaagcccggaagaagctccagctgagcttggctgactttaggcggctgtgcattctgaagggcatttatccccatgaacccaaacacaagaagaaggttaacaagggttctacagcagcccgaacgttttaccttatcaaagacatcaggtttctcctccacgaacccattgtcaacaagttccgtgaatacaaggtgttcgtccggaagctccggaaggcttatgggaagagcgagtggaacactgtagagcgtttaaaggacaataagcccaactacaaactcgaccacatcatcaaggaacggtatcccacgttcatcgatgccctgcgggacctggacgatgccctctccatgtgcttcctgttttccaccttcccgcggactggcaagtgccacgtgcagaccattcagctgtgccgccggctcactgtggagttcatgcactacattatcgctgcccgtgccctgcgcaaggtcttcctgtccatcaaaggcatttactaccaggccgaggtactggggcagcccatcgtgtggatcactccctatgccttctcccatgaccacccgacagacgtggactacagggtcatggccaccttcaccgagttctacaccacgctgctgggctttgtcaacttccgcctttaccagttgctcaacctccactatcccccgaagtcgagggtcagccaagccaagggaaacgccggtgagggccaaagcgttgagtcgcaaagtgatggcgaactgggagcccataaagtcagagggacccgggtaggcgccgtccccaaggcgagaggaccagaaggcaggtaataccccccgaggggaactataacagcggaagccaagacaagacaagagaggccaaacacagagaaaatagaagggccccaccatcatccaaaggagaagaggcaggagaacacacacagagagagagccacaacacacgacgtcgacgacgaaaccaacgcaccacaaaaacagcagcgaaaacagaagc

SEQ ID NO: 459301 - DNA, 988 bp, Homo sapiens
ccggaggctgaagtgggaggatcgtttgaggctgcagtgagctatgattgtgccactgtgctccaggctgagcaacagagaaagaccctgtccctttaaaaaaattaaaaatatattgtcagatgaccccggaaagaaggttcttcctgttgtacccctttccaccagctcctggtgaaggttctagtggcatccagctttcccaggtggtgtagggaaatggggcagttgccaaggctccttccagctctgggagtttaggattctcttatctcgagatttgtgggcccatgaaataatgttgttaaagcagggctagcgcatgttttctcaccatgaagtgggtcaggtagatttttttcctgtgagaatttgtgaccttttcttgaagctctgcttttaagggatatagctttgagttctgtgccccccaccctcccttctacacatacctcagcctgaccttcgccttccccctcacaggccaacaagctggcggagaagcggaaagcccacgatgaggcggtgaggtctgagaagaaggccaagaaggcaaggccggagtgagtgcctgcggcccctcacagggctgaggccagcccctagcagctggatgtggcagaggcaggccagaggacctaagtgtgatggaccagagtcacttctcctcctcctttctccagccagccctgacccctcatgctctctggctgggccagtgggcagccctcgcttcccttggatggagctgccctgctggtgcctggtcagagaagaggcctctgtgcccagcctgattctctgctcccaggagccagtgacatgaggtgcagaggcccacccagccccctacctactgcccccattcatcctggctttccacagccccctcccacacagttggacccgtgattctcagggtgctgtgatggggtgagggtagggggagcatttgttattaaatgactggacttttgtgccaattgca

SEQ ID NO: 459302 - DNA, 734 bp, Homo sapiens
gggggaaggtctgtggtggcggggaacataaggccaaagaacagaggaaggaagggcagagcagccctcctggaggtagggaacaaagggaggaggagggctagtgggaccatgtgagacatcttgaggccattcacgttcctgcttaaagagcccgggaccagcgcagagggcctgatgcctgatctgtcaagtctgtccgaccgtgcctgtctgctgtccccccagctgttccagtggtggattggcaggaccgggtgcctacccggtactccttaccaaaggagcccctggtagtgcccacctagcccaggacaaggagtggaacgggagctgcagctgcagtggtcacgaaggcagcctggaggaggtggccatggaggatagccttcgttatcgtcagcctctgtttccaaggaaacaagactctaggtccactttgccgtccagacctgaagcggacccttcatacacagccctgtgatacttggagcctgcttgcctcaaaacactgcttgctttacacttcacctaactccacccttcccttcaattctttaataacctttccctttgttcagccagatcactatagttcctctgctgggtggtttccctcattggaataagtcaacaactgggtttgtttctggtggttttaggctgacttggcgaggactagcctaaaaattaacccaaaagagaaaaataaaattgtatgcatgaagatggca

SEQ ID NO: 459303 - DNA, 781 bp, Homo sapiens
gggggaaggtctgtggtggcggggaacataaggccaaagaacagaggaaggaagggcagagcagccctcctggaggtagggaacaaagggaggaggagggctagtgggaccatgtgagacatcttgaggccattcacgttcctgcttaaagagcccgggaccagcgcagagggcctgatgcctgatctgtcaagtctgtccgaccgtgcctgtctgctgtccccccagctgttccagtggtggattggcaggaccgggtgcctacccggtactccttaccaaaggagcccctggtagtgcccacctagcccaggacaaggagtggaacgggagctgcagctgcagtggtcacgaaggcagcctggaggaggtggccatggaggatagccttcgttatcgtcagcctctggtgagaagcagcagcatccttccagagagtcacttctgatccccaagtttccaaggaaacaagactctaggtccactttgccgtccagacctgaagcggacccttcatacacagccctgtgatacttggagcctgcttgcctcaaaacactgcttgctttacacttcacctaactccacccttcccttcaattctttaataacctttccctttgttcagccagatcactatagttcctctgctgggtggtttccctcattggaataagtcaacaactgggtttgtttctggtggttttaggctgacttggcgaggactagcctaaaaattaacccaaaagagaaaaataaaattgtatgcatgaagatggca

SEQ ID NO: 459304 - DNA, 2275 bp, Homo sapiens
agacagcgtggggtggggagggtcctcggggtccttggcagggcacgtgcgggaggaagtggagctgcctgtacgcgcggccctagtcggctcctcaacgtggagcgatgggaggccttgagaagaagaagtatgaacgaggctcggccaccaactacatcacccggaacaaagcccggaagaagctccagctgagcttggctgactttaggcggctgtgcattctgaagggcatttatccccatgaacccaaacacaagaagaaggttaacaagggttctacagcagcccgaacgttttaccttatcaaagacatcaggtttctcctccacgaacccattgtcaacaagttccgtgaatacaaggtgttcgtccggaagctccggaaggcttatgggaagagcgagtggaacactgtagagcgtttaaaggacaataagcccaactacaaactcgaccacatcatcaaggaacggtatcccacgttcatcgatgccctgcgggacctggacgatgccctctccatgtgcttcctgttttccaccttcccgcggactggcaagtgccacgtgcagaccattcagctgtgccgccggctcactgtggagttcatgcactacattatcgctgcccgtgccctgcgcaaggtcttcctgtccatcaaaggcatttactaccaggccgaggtactggggcagcccatcgtgtggatcactccctatgccttctcccatgaccacccgacagacgtggactacagggtcatggccaccttcaccgagttctacaccacgctgctgggctttgtcaacttccgcctttaccagttgctcaacctccactatcccccgaagctcgagggtcaggcccaagcagaggcaaaggccggtgagggcacctacgcgttggactccgagagttgtatggagaaactggcagccctcagtgccagcctggcccgcgtggtggtgcctgccacagaggaggaggccgaggtggatgagtttcccaccgatggggagatgtcagcgcaggaggaagaccgcaggaaggagctggaggcgcaggagaagcacaagaagctttttgagggcctgaagttcttcctgaaccgagaggtgccccgtgaggccctggccttcatcatcaggagttttggtggggaagtgtcctgggacaaatctttgtgcattggggccacctatgacgtcacagactcccgcatcacccatcagattgtcgaccggcctgggcagcagacctcagtcattggcaggtgctacgtgcagccccagtgggtgtttgactcagtgaacgccaggctccttctccccgtggcagagtacttctctggggtgcagctgcccccacacctttcaccctttgtgaccgagaaggaaggagattacgttccacctgagaagctgaagctgctggctctgcagcggggagaggacccaggaaacctgaatgagtcagaagaggaggaggaagaggacgacaacaacgaaggtgatggtgatgaagagggagaaaatgaggaggaggaggaagatgcagaggctggttcagaaaaggaggaagaggcccggctggcagccctggaagaagcccagggtgatggcaggcaccttgaagctggaggataagcagcggctggcccaggaggaggagagtgaggccaagcgcctggccattatgatgatgaagaagcgggagaagtacctgtaccagaagatcatgtttggcaagaggcgaaaaatccgagaggccaacaagctggcggagaagcggaaagcccacgatgaggcggtgaggtctgagaagaaggccaagaaggcaaggccggagtgagtgcctgcggcccctcacagggctgaggccagcccctagcagctggatgtggcagaggcaggccagaggacctaagtgtgatggaccagagtcacttctcctcctcctttctccagccagccctgacccctcatgctctctggctgggccagtgggcagccctcgcttcccttggatggagctgccctgctggtgcctggtcagagaagaggcctctgtgcccagcctgattctctgctcccaggagccagtgacatgaggtgcagaggcccacccagccccctacctactgcccccattcatcctggctttccacagccccctcccacacagttggacccgtgattctcagggtgctgtgatggggtgagggtagggggagcatttgttattaaatgactggacttttgtgccaattgca

SEQ ID NO: 459305 - DNA, 2887 bp, Homo sapiens
gggggaaggtctgtggtggcggggaacataaggccaaagaacagaggaaggaagggcagagcagccctcctggaggtagggaacaaagggaggaggagggctagtgggaccatgtgagacatcttgaggccattcacgttcctgcttaaagagcccgggaccagcgcagagggcctgatgcctgatctgtcaagtctgtccgaccgtgcctgtctgctgtccccccagctgttccagtggtggattggcaggaccgggtgcctacccggtactccttaccaaaggagcccctggtagtgcccacctagcccaggacaaggagtggaacgggagctgcagctgcagtggtcacgaaggcagcctggaggaggtggccatggaggatagccttcgttatcgtcagcctctggtgagaagcagcagcatccttccagagagtcacttctgatccccaagccgtataaccgcgaatgaaccaaagagaacccgaagccggtgggaactcagcgcagtctcaccctgcccctcgggaaccgcttctcagcagcggcagccgaagtctgacgacgcttagcaaccgttaccttgacaacgcaatcctatcgcgcaccatggagtgcggcgcccctctgcatcccagaaggcaccgcgctgtccctaagccttccgcccctctccgtcccaacatgcaacgaggctcacagtcaatgaatcgtcatcaggtatgaacgaggctcggccaccaactacatcacccggaacaaagcccggaagaagctccagctgagcttggctgactttaggcggctgtgcattctgaagggcatttatccccatgaacccaaacacaagaagaaggttaacaagggttctacagcagcccgaacgttttaccttatcaaagacatcaggtttctcctccacgaacccattgtcaacaagttccgtgaatacaaggtgttcgtccggaagctccggaaggcttatgggaagagcgagtggaacactgtagagcgtttaaaggacaataagcccaactacaaactcgaccacatcatcaaggaacggtatcccacgttcatcgatgccctgcgggacctggacgatgccctctccatgtgcttcctgttttccaccttcccgcggactggcaagtgccacgtgcagaccattcagctgtgccgccggctcactgtggagttcatgcactacattatcgctgcccgtgccctgcgcaaggtcttcctgtccatcaaaggcatttactaccaggccgaggtactggggcagcccatcgtgtggatcactccctatgccttctcccatgaccacccgacagacgtggactacagggtcatggccaccttcaccgagttctacaccacgctgctgggctttgtcaacttccgcctttaccagttgctcaacctccactatcccccgaagctcgagggtcaggcccaagcagaggcaaaggccggtgagggcacctacgcgttggactccgagagttgtatggagaaactggcagccctcagtgccagcctggcccgcgtggtggtgcctgccacagaggaggaggccgaggtggatgagtttcccaccgatggggagatgtcagcgcaggaggaagaccgcaggaaggagctggaggcgcaggagaagcacaagaagctttttgagggcctgaagttcttcctgaaccgagaggtgccccgtgaggccctggccttcatcatcaggagttttggtggggaagtgtcctgggacaaatctttgtgcattggggccacctatgacgtcacagactcccgcatcacccatcagattgtcgaccggcctgggcagcagacctcagtcattggcaggtgctacgtgcagccccagtgggtgtttgactcagtgaacgccaggctccttctccccgtggcagagtacttctctggggtgcagctgcccccacacctttcaccctttgtgaccgagaaggaaggagattacgttccacctgagaagctgaagctgctggctctgcagcggggagaggacccaggaaacctgaatgagtcagaagaggaggaggaagaggacgacaacaacgaaggtgatggtgatgaagagggagaaaatgaggaggaggaggaagatgcagaggctggttcagaaaaggaggaagaggcccggctggcagccctggaagagcagaggatggaggggaagaagcccagggtgatggcaggcaccttgaagctggaggataagcagcggctggcccaggaggaggagagtgaggccaagcgcctggccattatgatgatgaagaagcgggagaagtacctgtaccagaagatcatgtttggcaagaggcgaaaaatccgagaggccaacaagctggcggagaagcggaaagcccacgatgaggcggtgaggtctgagaagaaggccaagaaggcaaggccggagtgagtgcctgcggcccctcacagggctgaggccagcccctagcagctggatgtggcagaggcaggccagaggacctaagtgtgatggaccagagtcacttctcctcctcctttctccagccagccctgacccctcatgctctctggctgggccagtgggcagccctcgcttcccttggatggagctgccctgctggtgcctggtcagagaagaggcctctgtgcccagcctgattctctgctcccaggagccagtgacatgaggtgcagaggcccacccagccccctacctactgcccccattcatcctggctttccacagccccctcccacacagttggacccgtgattctcagggtgctgtgatggggtgagggtagggggagcatttgttattaaatgactggacttttgtgccaattgca

SEQ ID NO: 459306 - DNA, 2198 bp, Homo sapiens
agacagcgtggggtggggagggtcctcggggtccttggcagggcacgtgcgggaggaagtggagctgcctgtacgcgcggccctagtcggctcctcaacgtggagcgatgggaggccttgagaagaagaagtatgaacgaggctcggccaccaactacatcacccggaacaaagcccggaagaagctccagctgagcttggctgactttaggcggctgtgcattctgaagggcatttatccccatgaacccaaacacaagaagaaggttaacaagggttctacagcagcccgaacgttttaccttatcaaagacatcaggtttctcctccacgaacccattgtcaacaagttccgtgaatacaaggtgttcgtccggaagctccggaaggcttatgggaagagcgagtggaacactgtagagcgtttaaaggacaataagcccaactacaaactcgaccacatcatcaaggaacggtatcccacgttcatcgatgccctgcgggacctggacgatgccctctccatgtgcttcctgttttccaccttcccgcggactggcaagtgccacgtgcagaccattcagctgtgccgccggctcactgtggagttcatgcactacattatcgctgcccgtgccctgcgcaaggtcttcctgtccatcaaaggcatttactaccaggccgaggtactggggcagcccatcgtgtggatcactccctatgccttctcccatgaccacccgacagacgtggactacagggtcatggccaccttcaccgagttctacaccacgctgctgggctttgtcaacttccgcctttaccagttgctcaacctccactatcccccgaagctcgagggtcaggcccaagcagaggcaaaggccggtgagggcacctacgcgttggactccgagagttgtatggagaaactggcagccctcagtgccagcctggcccgcgtggtggtgcctgccacagaggaggaggccgaggtggatgagtttcccaccgatggggagatgtcagcgcaggaggaagaccgcaggaaggagctggaggcgcaggagaagcacaagaagctttttgagggcctgaagttcttcctgaaccgagaggtgccccgtgaggccctggccttcatcatcaggagttttggtggggaagtgtcctgggacaaatctttgtgcattggggccacctatgacgtcacagactcccgcatcacccatcagattgtcgaccggcctgggcagcagacctcagtcattggcaggtgctacgtgcagccccagtgggtgtttgactcagtgaacgccaggctccttctccccgtggcagagtacttctctggggtgcagctgcccccacacctttcaccctttgtgaccgagaaggaaggagattacgttccacctgagaagctgaagctgctggctctgcagcggggagaggacccaggaaacctgaatgagtcagaagaggaggaggaagaggacgacaacaacgaaggtgatggtgatgaagagggagaaaatgaggaggaggaggaagatgcagaggctggttcagaaaaggaggaagaggcccggctggcagccctggaagagcagaggatggaggggaagaagcccagggtgatggcaggcaccttgaagctggaggataagcagcggctggcccaggaggaggagagtgaggccaagcgcctggccattatgatgatgaagaagcgggagaagtacctgtaccagaagatcatgtttggcaagaggcgaaaaatccgagaggccaacaagctggcggagaagcggaaagcccacgatgaggcggtgaggtctgagaagaaggccaagaaggcaaggccggagtgagtgcctgcggcccctcacagggctgaggacccctcatgctctctggctgggccagtgggcagccctcgcttcccttggatggagctgccctgctggtgcctggtcagagaagaggcctctgtgcccagcctgattctctgctcccaggagccagtgacatgaggtgcagaggcccacccagccccctacctactgcccccattcatcctggctttccacagccccctcccacacagttggacccgtgattctcagggtgctgtgatggggtgagggtagggggagcatttgttattaaatgactggacttttgtgccaattgca

SEQ ID NO: 459307 - DNA, 1559 bp, Homo sapiens
agacagcgtggggtggggagggtcctcggggtccttggcagggcacgtgcgggaggaagtggagctgcctgtacgcgcggccctagtcggctcctcaacgtggagcgatgggaggccttgagaagaagaagtatgaacgaggctcggccaccaactacatcacccggaacaaagcccggaagaagctccagctgagcttggctgactttaggcggctgtgcattctgaagggcatttatccccatgaacccaaacacaagaagaaggttaacaagggttctacagcagcccgaacgttttaccttatcaaagacatcaggtttctcctccacgaacccattgtcaacaagttccgtgaatacaaggtgttcgtccggaagctccggaaggcttatgggaagagcgagtggaacactgtagagcgtttaaaggacaataagcccaactacaaactcgaccacatcatcaaggaacggtatcccacgttcatcgatgccctgcgggacctggacgatgccctctccatgtgcttcctgttttccaccttcccgcggactggcaagtgccacgtgcagaccattcagctgtgccgccggctcactgtggagttcatgcactacattatcgctgcccgtgccctgcgcaaggtcttcctgtccatcaaaggcatttactaccaggccgaggtactggggcagcccatcgtgtggatcactccctatgccttctcccatgaccacccgacagacgtggactacagggtcatggccaccttcaccgagttctacaccacgctgctgggctttgtcaacttccgcctttaccagttgctcaacctccactatcccccgaagctcgagggtcaggcccaagcagaggcaaaggccggtgagggcacctacgcgttggactccgagagttgtatggagaaactggcagccctcagtgccagcctggcccgcgtggtggtgcctgccacagaggaggaggccgaggtggatgagtttcccaccgatggggagatgtcagcgcaggaggaagaccgcaggaaggagctggaggcgcaggagaagcacaagaagctttttgagggcctgaagttcttcctgaaccgagaggtgccccgtgaggccctggccttcatcatcaggagttttggtggggaagtgtcctgggacaaatctttgtgcattggggccacctatgacgtcacagactcccgcatcacccatcagattgtcgaccggcctgggcagcagacctcagtcattggcaggtgctacgtgcagccccagtgggtgtttgactcagtgaacgccaggctccttctccccgtggcagagtacttctctggggtgcagctgcccccacacctttcaccctttgtgaccgagaaggaaggagattacgttccacctgagaagctgaagctgctggctctgcagcggggagaggacccacggacacctgtaatgagtcagaagacggagaggaagacggattgacgtgagagttcaggcagagcaaatatcacagtgcccggtgagatagcatcggca

SEQ ID NO: 459308 - DNA, 1425 bp, Homo sapiens
agccatcccccttcgtgcggtcttccacctacgcgttggactccgagagttgtatggagaaactggcagccctcagtgccagcctggcccgcgtggtggtgcctgccacagaggaggaggccgaggtggatgagtttcccaccgatggggagatgtcagcgcaggaggaagaccgcaggaaggagctggaggcgcaggagaagcacaagaagctttttgagggcctgaagttcttcctgaaccgagaggtgccccgtgaggccctggccttcatcatcaggagttttggtggggaagtgtcctgggacaaatctttgtgcattggggccacctatgacgtcacagactcccgcatcacccatcagattgtcgaccggcctgggcagcagacctcagtcattggcaggtgctacgtgcagccccagtgggtgtttgactcagtgaacgccaggctccttctccccgtggcagagtacttctctggggtgcagctgcccccacacctttcaccctttgtgaccgagaaggaaggagattacgttccacctgagaagctgaagctgctggctctgcagcggggagaggacccaggaaacctgaatgagtcagaagaggaggaggaagaggacgacaacaacgaaggtgatggtgatgaagagggagaaaatgaggaggaggaggaagatgcagaggctggttcagaaaaggaggaagaggcccggctggcagccctggaagagcagaggatggaggggaagaagcccagggtgatggcaggcaccttgaagctggaggataagcagcggctggcccaggaggaggagagtgaggccaagcgcctggccattatgatgatgaagaagcgggagaagtacctgtaccagaagatcatgtttggcaagaggcgaaaaatccgagaggccaacaagctggcggagaagcggaaagcccacgatgaggcggtgaggtctgagaagaaggccaagaaggcaaggccggagtgagtgcctgcggcccctcacagggctgaggccagcccctagcagctggatgtggcagaggcaggccagaggacctaagtgtgatggaccagagtcacttctcctcctcctttctccagccagccctgacccctcatgctctctggctgggccagtgggcagccctcgcttcccttggatggagctgccctgctggtgcctggtcagagaagaggcctctgtgcccagcctgattctctgctcccaggagccagtgacatgaggtgcagaggcccacccagccccctacctactgcccccattcatcctggctttccacagccccctcccacacagttggacccgtgattctcagggtgctgtgatggggtgagggtagggggagcatttgttattaaatgactggacttttgtgccaattgca

SEQ ID NO: 459309 - DNA, 1175 bp, Homo sapiens
agacagcgtggggtggggagggtcctcggggtccttggcagggcacgtgcgggaggaagtggagctgcctgtacgcgcggccctagtcggctcctcaacgtggagcgatgggaggccttgagaagaagaagtatgaacgaggctcggccaccaactacatcacccggaacaaagcccggaagaagctccagctgagcttggctgactttaggcggctgtgcattctgaagggcatttatccccatgaacccaaacacaagaagaaggttaacaagggttctacagcagcccgaacgttttaccttatcaaagacatcaggtttctcctccacgaacccattgtcaacaagttccgtgaatacaaggtgttcgtccggaagctccggaaggcttatgggaagagcgagtggaacactgtagagcgtttaaaggacaataagcccaactacaaactcgaccacatcatcaaggaacggtatcccacgttcatcgatgccctgcgggacctggacgatgccctctccatgtgcttcctgttttccaccttcccgcggactggcaagtgccacgtgcagaccattcagctgtgccgccggctcactgtggagttcatgcactacattatcgctgcccgtgccctgcgcaaggtcttcctgtccatcaaaggcatttactaccaggccgaggtactggggcagcccatcgtgtggatcactccctatgccttctcccatgaccacccgacagacgtggactacagggtcatggccaccttcaccgagttctacaccacgctgctgggctttgtcaacttccgcctttaccagttgctcaacctccactatcccccgaagctcgagggtcaggcccaagcagaggcaaaggccggtgagggcacctacgcgttggactccgagagttgtatggagaaactggcagccctcagtgccagcctggcccgcgtggtggtgcctgccacagaggaggaggccgaggtggatgagtttcccaccgatgggagatgtcagcgcaggaggaagaccgcaggaaggagatctgcgatatggtttttggcattgatatggtttggctgcgtcctcatctaaatcccatcttgaattgtaattcccacatgtctagggagagactggtgggaggagactggatcatggggg

SEQ ID NO: 459310 - DNA, 889 bp, Homo sapiens
tcgtaccaccgttacgccctcaccgctacgccctcaccgctaccctccccgctaggaaacctgaatgagtcagaagaggaggaggaagaggacgacaacaacgaaggtgatggtgatgaagagggagaaaatgaggaggaggaggaagatgcagaggctggttcagaaaaggaggaagaggcccggctggcagccctggaagagcagaggatggaggggaagaagcccagggtgatggcaggcaccttgaagctggaggataagcagcggctggcccaggaggaggagagtgaggccaagcgcctggccattatgatgatgaagaagcgggagaagtacctgtaccagaagatcatgtttggcaagaggcgaaaaatccgagaggccaacaagctggcggagaagcggaaagcccacgatgaggcggtgaggtctgagaagaaggccaagaaggcaaggccggagtgagtgcctgcggcccctcacagggctgaggccagcccctagcagctggatgtggcagaggcaggccagaggacctaagtgtgatggaccagagtcacttctcctcctcctttctccagccagccctgacccctcatgctctctggctgggccagtgggcagccctcgcttcccttggatggagctgccctgctggtgcctggtcagagaagaggcctctgtgcccagcctgattctctgctcccaggagccagtgacatgaggtgcagaggcccacccagccccctacctactgcccccattcatcctggctttccacagccccctcccacacagttggacccgtgattctcagggtgctgtgatggggtgagggtagggggagcatttgttattaaatgactggacttttgtgccaattgca

SEQ ID NO: 459311 - DNA, 918 bp, Homo sapiens
acacgtatatgtgccatatggtgttttctgccaggaaatactaagaaacagcctgatatgtccagcgccaggggccggccccaccatggtgggagaggacccaggaaacctgaatgagtcagaagaggaggaggaagaggacgacaacaacgaaggtgatggtgatgaagagggagaaaatgaggaggaggaggaagatgcagaggctggttcagaaaaggaggaagaggcccggctggcagccctggaagaagcccagggtgatggcaggcaccttgaagctggaggataagcagcggctggcccaggaggaggagagtgaggccaagcgcctggccattatgatgatgaagaagcgggagaagtacctgtaccagaagatcatgtttggcaagaggcgaaaaatccgagaggccaacaagctggcggagaagcggaaagcccacgatgaggcggtgaggtctgagaagaaggccaagaaggcaaggccggagtgagtgcctgcggcccctcacagggctgaggccagcccctagcagctggatgtggcagaggcaggccagaggacctaagtgtgatggaccagagtcacttctcctcctcctttctccagccagccctgacccctcatgctctctggctgggccagtgggcagccctcgcttcccttggatggagctgccctgctggtgcctggtcagagaagaggcctctgtgcccagcctgattctctgctcccaggagccagtgacatgaggtgcagaggcccacccagccccctacctactgcccccattcatcctggctttccacagccccctcccacacagttggacccgtgattctcagggtgctgtgatggggtgagggtagggggagcatttgttattaaatgactggacttttgtgccaattgca

SEQ ID NO: 459312 - DNA, 1192 bp, Homo sapiens
gggggaaggtctgtggtggcggggaacataaggccaaagaacagaggaaggaagggcagagcagccctcctggaggtagggaacaaagggaggaggagggctagtgggaccatgtgagacatcttgaggccattcacgttcctgcttaaagagcccgggaccagcgcagagggcctgatgcctgatctgtcaagtctgtccgaccgtgcctgtctgctgtccccccagctgttccagtggtggattggcaggaccgggtgcctacccggtactccttaccaaaggagcccctggtagtgcccacctagcccaggacaaggagtggaacgggagctgcagctgcagtggtcacgaaggcagcctggaggaggtggccatggaggatagccttcgttatcgtcagcctctgccgtataaccgcgaatgaaccaaagagaacccgaagccggtgggaactcagcgcagtctcaccctgcccctcgggaaccgcttctcagcagcggcagccgaagtctgacgacgcttagcaaccgttaccttgacaacgcaatcctatcgcgcaccatggagtgcggcgcccctctgcatcccagaaggcaccgcgctgtccctaagccttccgcccctctccgtcccaacatgcaacgaggctcacagtcaatgaatcgtcatcaggtatgaacgaggctcggccaccaactacatcacccggaacaaagcccggaagaagctccagctgagcttggctgactttaggcggctgtgcattctgaagggcatttatccccatgaacccaaacacaagaagaaggttaacaagggttctacagcagcccgaacgttttaccttatcaaagacatcaggtttctcctcctcctttctccagccagccctgacccctcatgctctctggctgggccagtgggcagccctcgcttcccttggatggagctgccctgctggtgcctggtcagagaagaggcctctgtgcccagcctgattctctgctcccaggagccagtgacatgaggtgcagaggcccacccagccccctacctactgcccccattcatcctggctttccacagccccctcccacacagttggacccgtgattctcagggtgctgtgatggggtgagggtagggggagcatttgttattaaatgactggacttttgtgccaattgca

SEQ ID NO: 459313 - DNA, 766 bp, Homo sapiens
gggggaaggtctgtggtggcggggaacataaggccaaagaacagaggaaggaagggcagagcagccctcctggaggtagggaacaaagggaggaggagggctagtgggaccatgtgagacatcttgaggccattcacgttcctgcttaaagagcccgggaccagcgcagagggcctgatgcctgatctgtcaagtctgtccgaccgtgcctgtctgctgtccccccagctgttccagtggtggattggcaggaccgggtgcctacccggtactccttaccaaaggagcccctggtagtgcccacctagcccaggacaaggagtggaacgggagctgcagctgcagtggtcacgaaggcagcctggaggaggtggccatggaggatagccttcgttatcgtcagcctctggtgagaagcagcagcatccttccagagagtcacttctgatccccaaggtagttagggtgtcgaagtaaaggagggagacacccccctgcctacctacctggactcagtgctagagggtgggggagtaggaataggaagacagcatatttcccatacatattagaaatactggtggctcatgcctgtaatcccagcactttgggaagccaaggcaggaggattgcttgagcccacaagtttgagaccagtctaggcaagatggtgagaccctgattctaaaaaacaaacaaaaccaaaaaatgccagggatggtggtgtgtgcctgtaagtctcagctaatcgagaggctacaagtgg

SEQ ID NO: 459314 - DNA, 765 bp, Homo sapiens
gggggaaggtctgtggtggcggggaacataaggccaaagaacagaggaaggaagggcagagcagccctcctggaggtagggaacaaagggaggaggagggctagtgggaccatgtgagacatcttgaggccattcacgttcctgcttaaagagcccgggaccagcgcagagggcctgatgcctgatctgtcaagtctgtccgaccgtgcctgtctgctgtccccccagctgttccagtggtggattggcaggaccgggtgcctacccggtactccttaccaaaggagcccctggtagtgcccacctagcccaggacaaggagtggaacgggagctgcagctgcagtggtcacgaaggcagcctggaggaggtggccatggaggatagccttcgttatcgtcagcctctgccgtataaccgcgaatgaaccaaagagaacccgaagccggtgggaactcagcgcagtctcaccctgcccctcgggaaccgcttctcagcagcggcagccgaagtctgacgacgcttagcaaccgttaccttgacaacgcaatcctatcgcgcaccatggagtgcggcgcccctctgcatcccagaaggcaccgcgctgtccctaagccttccgcccctctccgtcccaacatgcaacgaggctcacagtcaatgaatcgtcatcagggtgattacagaaaagcctgtatatccacgtttgttttaacacttaaagtgtttgtaaccattgtgagcgggaaagatctggaaagagtg

SEQ ID NO: 459315 - DNA, 526 bp, Homo sapiens
gctgaattgtcatcagagtttacataggaggcaacagagctcaggagtggggccttggagtttcctttgaaggcaggatccaggatctagaaggaagctggagtggacgttatctccagccctggccctccagtgggggtgggcagccctggtggtgcgaggcctggcccctttctcaacaggagatgtcagcgcaggaggaagaccgcaggaaggagctggaggcgcaggagaagcacaagaagctttttgagggcctgaagttcttcctgaaccgagaggtgccccgtgaggccctggccttcatcatcaggtagggaggctcaagggcccgctgacagcattggttcggccatgctctggtctgggtcctgccctggtgcccatcggtaacattgggatggtgtcagtttccacttcttatgaaacagtgtgtggaaagtgctcggcaccgcactgagcacataggaagtgctcagcagagggcggaactgccgtcattttattactagcttagcacagaagg

SEQ ID NO: 459316 - DNA, 2295 bp, Homo sapiens
agacagcgtggggtggggagggtcctcggggtccttggcagggcacgtgcgggaggaagtggagctgcctgtacgcgcggccctagtcggctcctcaacgtggagcgatgggaggccttgagaagaagaagtatgaacgaggctcggccaccaactacatcacccggaacaaagcccggaagaagctccagctgagcttggctgactttaggcggctgtgcattctgaagggcatttatccccatgaacccaaacacaagaagaaggttaacaagggttctacagcagcccgaacgttttaccttatcaaagacatcaggtttctcctccacgaacccattgtcaacaagttccgtgaatacaaggtgttcgtccggaagctccggaaggcttatgggaagagcgagtggaacactgtagagcgtttaaaggacaataagcccaactacaaactcgaccacatcatcaaggaacggtatcccacgttcatcgatgccctgcgggacctggacgatgccctctccatgtgcttcctgttttccaccttcccgcggactggcaagtgccacgtgcagaccattcagctgtgccgccggctcactgtggagttcatgcactacattatcgctgcccgtgccctgcgcaaggtcttcctgtccatcaaaggcatttactaccaggccgaggtactggggcagcccatcgtgtggatcactccctatgccttctcccatgaccacccgacagacgtggactacagggtcatggccaccttcaccgagttctacaccacgctgctgggctttgtcaacttccgcctttaccagttgctcaacctccactatcccccgaagctcgagggtcaggcccaagcagaggcaaaggccggtgagggcacctacgcgttggactccgagagttgtatggagaaactggcagccctcagtgccagcctggcccgcgtggtggtgcctgccacagaggaggaggccgaggtggatgagtttcccaccgatggggagatgtcagcgcaggaggaagaccgcaggaaggagctggaggcgcaggagaagcacaagaagctttttgagggcctgaagttcttcctgaaccgagaggtgccccgtgaggccctggccttcatcatcaggagttttggtggggaagtgtcctgggacaaatctttgtgcattggggccacctatgacgtcacagactcccgcatcacccatcagattgtcgaccggcctgggcagcagacctcagtcattggcaggtgctacgtgcagccccagtgggtgtttgactcagtgaacgccaggctccttctccccgtggcagagtacttctctggggtgcagctgcccccacacctttcaccctttgtgaccgagaaggaaggagattacgttccacctgagaagctgaagctgctggctctgcagcggggagaggacccaggaaacctgaatgagtcagaagaggaggaggaagaggacgacaacaacgaaggtgatggtgatgaagagggagaaaatgaggaggaggaggaagatgcagaggctggttcagaaaaggaggaagaggcccggctggcagccctggaagagcagaggatggaggggaagaagcccagggtgatggcaggcaccttgaagctggaggataagcagcggctggcccaggaggaggagagtgaggccaagcgcctggccattatgatgatgaagaagcgggagaagtacctgtaccagaagatcatgtttggcaagaggcgaaaaatccgagaggccaacaagctggcggagaagcggaaagcccacgatgaggcggtgaggtctgagaagaaggccaagaaggcaaggccggagtgagtgcctgcggcccctcacagggctgaggccagcccctagcagctggatgtggcagaggcaggccagaggacctaagtgtgatggaccagagtcacttctcctcctcctttctccagccagccctgacccctcatgctctctggctgggccagtgggcagccctcgcttcccttggatggagctgccctgctggtgcctggtcagagaagaggcctctgtgcccagcctgattctctgctcccaggagccagtgacatgaggtgcagaggcccacccagccccctacctactgcccccattcatcctggctttccacagccccctcccacacagttggacccgtgattctcagggtgctgtgatggggtgagggtagggggagcatttgttattaaatgactggacttttgtgccaattgca

SEQ ID NO: 459317 - DNA, 2255 bp, Homo sapiens
  misc_feature (24)..(24): n is a, c, g, or t
  misc_feature (44)..(44): n is a, c, g, or t
tcgacggcagtaacctcggggtanaggtagcgaggctgggtggnggtcggctcctcaacgtggagcgatgggaggccttgagaagaagaagtatgaacgaggctcggccaccaactacatcacccggaacaaagcccggaagaagctccagctgagcttggctgactttaggcggctgtgcattctgaagggcatttatccccatgaacccaaacacaagaagaaggttaacaagggttctacagcagcccgaacgttttaccttatcaaagacatcaggtttctcctccacgaacccattgtcaacaagttccgtgaatacaaggtgttcgtccggaagctccggaaggcttatgggaagagcgagtggaacactgtagagcgtttaaaggacaataagcccaactacaaactcgaccacatcatcaaggaacggtatcccacgttcatcgatgccctgcgggacctggacgatgccctctccatgtgcttcctgttttccaccttcccgcggactggcaagtgccacgtgcagaccattcagctgtgccgccggctcactgtggagttcatgcactacattatcgctgcccgtgccctgcgcaaggtcttcctgtccatcaaaggcatttactaccaggccgaggtactggggcagcccatcgtgtggatcactccctatgccttctcccatgaccacccgacagacgtggactacagggtcatggccaccttcaccgagttctacaccacgctgctgggctttgtcaacttccgcctttaccagttgctcaacctccactatcccccgaagctcgagggtcaggcccaagcagaggcaaaggccggtgagggcacctacgcgttggactccgagagttgtatggagaaactggcagccctcagtgccagcctggcccgcgtggtggtgcctgccacagaggaggaggccgaggtggatgagtttcccaccgatggggagatgtcagcgcaggaggaagaccgcaggaaggagctggaggcgcaggagaagcacaagaagctttttgagggcctgaagttcttcctgaaccgagaggtgccccgtgaggccctggccttcatcatcaggagttttggtggggaagtgtcctgggacaaatctttgtgcattggggccacctatgacgtcacagactcccgcatcacccatcagattgtcgaccggcctgggcagcagacctcagtcattggcaggtgctacgtgcagccccagtgggtgtttgactcagtgaacgccaggctccttctccccgtggcagagtacttctctggggtgcagctgcccccacacctttcaccctttgtgaccgagaaggaaggagattacgttccacctgagaagctgaagctgctggctctgcagcggggagaggacccaggaaacctgaatgagtcagaagaggaggaggaagaggacgacaacaacgaaggtgatggtgatgaagagggagaaaatgaggaggaggaggaagatgcagaggctggttcagaaaaggaggaagaggcccggctggcagccctggaagagcagaggatggaggggaagaagcccagggtgatggcaggcaccttgaagctggaggataagcagcggctggcccaggaggaggagagtgaggccaagcgcctggccattatgatgatgaagaagcgggagaagtacctgtaccagaagatcatgtttggcaagaggcgaaaaatccgagaggccaacaagctggcggagaagcggaaagcccacgatgaggcggtgaggtctgagaagaaggccaagaaggcaaggccggagtgagtgcctgcggcccctcacagggctgaggccagcccctagcagctggatgtggcagaggcaggccagaggacctaagtgtgatggaccagagtcacttctcctcctcctttctccagccagccctgacccctcatgctctctggctgggccagtgggcagccctcgcttcccttggatggagctgccctgctggtgcctggtcagagaagaggcctctgtgcccagcctgattctctgctcccaggagccagtgacatgaggtgcagaggcccacccagccccctacctactgcccccattcatcctggctttccacagccccctcccacacagttggacccgtgattctcagggtgctgtgatggggtgagggtagggggagcatttgttattaaatgactggacttttgtgccaattgca

SEQ ID NO: 459318 - DNA, 2840 bp, Homo sapiens
gggggaaggtctgtggtggcggggaacataaggccaaagaacagaggaaggaagggcagagcagccctcctggaggtagggaacaaagggaggaggagggctagtgggaccatgtgagacatcttgaggccattcacgttcctgcttaaagagcccgggaccagcgcagagggcctgatgcctgatctgtcaagtctgtccgaccgtgcctgtctgctgtccccccagctgttccagtggtggattggcaggaccgggtgcctacccggtactccttaccaaaggagcccctggtagtgcccacctagcccaggacaaggagtggaacgggagctgcagctgcagtggtcacgaaggcagcctggaggaggtggccatggaggatagccttcgttatcgtcagcctctgccgtataaccgcgaatgaaccaaagagaacccgaagccggtgggaactcagcgcagtctcaccctgcccctcgggaaccgcttctcagcagcggcagccgaagtctgacgacgcttagcaaccgttaccttgacaacgcaatcctatcgcgcaccatggagtgcggcgcccctctgcatcccagaaggcaccgcgctgtccctaagccttccgcccctctccgtcccaacatgcaacgaggctcacagtcaatgaatcgtcatcaggtatgaacgaggctcggccaccaactacatcacccggaacaaagcccggaagaagctccagctgagcttggctgactttaggcggctgtgcattctgaagggcatttatccccatgaacccaaacacaagaagaaggttaacaagggttctacagcagcccgaacgttttaccttatcaaagacatcaggtttctcctccacgaacccattgtcaacaagttccgtgaatacaaggtgttcgtccggaagctccggaaggcttatgggaagagcgagtggaacactgtagagcgtttaaaggacaataagcccaactacaaactcgaccacatcatcaaggaacggtatcccacgttcatcgatgccctgcgggacctggacgatgccctctccatgtgcttcctgttttccaccttcccgcggactggcaagtgccacgtgcagaccattcagctgtgccgccggctcactgtggagttcatgcactacattatcgctgcccgtgccctgcgcaaggtcttcctgtccatcaaaggcatttactaccaggccgaggtactggggcagcccatcgtgtggatcactccctatgccttctcccatgaccacccgacagacgtggactacagggtcatggccaccttcaccgagttctacaccacgctgctgggctttgtcaacttccgcctttaccagttgctcaacctccactatcccccgaagctcgagggtcaggcccaagcagaggcaaaggccggtgagggcacctacgcgttggactccgagagttgtatggagaaactggcagccctcagtgccagcctggcccgcgtggtggtgcctgccacagaggaggaggccgaggtggatgagtttcccaccgatggggagatgtcagcgcaggaggaagaccgcaggaaggagctggaggcgcaggagaagcacaagaagctttttgagggcctgaagttcttcctgaaccgagaggtgccccgtgaggccctggccttcatcatcaggagttttggtggggaagtgtcctgggacaaatctttgtgcattggggccacctatgacgtcacagactcccgcatcacccatcagattgtcgaccggcctgggcagcagacctcagtcattggcaggtgctacgtgcagccccagtgggtgtttgactcagtgaacgccaggctccttctccccgtggcagagtacttctctggggtgcagctgcccccacacctttcaccctttgtgaccgagaaggaaggagattacgttccacctgagaagctgaagctgctggctctgcagcggggagaggacccaggaaacctgaatgagtcagaagaggaggaggaagaggacgacaacaacgaaggtgatggtgatgaagagggagaaaatgaggaggaggaggaagatgcagaggctggttcagaaaaggaggaagaggcccggctggcagccctggaagagcagaggatggaggggaagaagcccagggtgatggcaggcaccttgaagctggaggataagcagcggctggcccaggaggaggagagtgaggccaagcgcctggccattatgatgatgaagaagcgggagaagtacctgtaccagaagatcatgtttggcaagaggcgaaaaatccgagaggccaacaagctggcggagaagcggaaagcccacgatgaggcggtgaggtctgagaagaaggccaagaaggcaaggccggagtgagtgcctgcggcccctcacagggctgaggccagcccctagcagctggatgtggcagaggcaggccagaggacctaagtgtgatggaccagagtcacttctcctcctcctttctccagccagccctgacccctcatgctctctggctgggccagtgggcagccctcgcttcccttggatggagctgccctgctggtgcctggtcagagaagaggcctctgtgcccagcctgattctctgctcccaggagccagtgacatgaggtgcagaggcccacccagccccctacctactgcccccattcatcctggctttccacagccccctcccacacagttggacccgtgattctcagggtgctgtgatggggtgagggtagggggagcatttgttattaaatgactggacttttgtgccaattgca

SEQ ID NO: 459319 - DNA, 2180 bp, Homo sapiens
agacagcgtggggtggggagggtcctcggggtccttggcagggcacgtgcgggaggaagtggagctgcctgtacgcgcggccctagtcggctcctcaacgtggagcgatgggaggccttgagaagaagaagtatgaacgaggctcggccaccaactacatcacccggaacaaagcccggaagaagctccagctgagcttggctgactttaggcggctgtgcattctgaagggcatttatccccatgaacccaaacacaagaagaaggttaacaagggttctacagcagcccgaacgttttaccttatcaaagacatcaggtttctcctccacgaacccattgtcaacaagttccgtgaatacaaggtgttcgtccggaagctccggaaggcttatgggaagagcgagtggaacactgtagagcgtttaaaggacaataagcccaactacaaactcgaccacatcatcaaggaacggtatcccacgttcatcgatgccctgcgggacctggacgatgccctctccatgtgcttcctgttttccaccttcccgcggactggcaagtgccacgtgcagaccattcagctgtgccgccggctcactgtggagttcatgcactacattatcgctgcccgtgccctgcgcaaggtcttcctgtccatcaaaggcatttactaccaggccgaggtactggggcagcccatcgtgtggatcactccctatgccttctcccatgaccacccgacagacgtggactacagggtcatggccaccttcaccgagttctacaccacgctgctgggctttgtcaacttccgcctttaccagttgctcaacctccactatcccccgaagctcgagggtcaggcccaagcagaggcaaaggccggtgagggcacctacgcgttggactccgagagttgtatggagaaactggcagccctcagtgccagcctggcccgcgtggtggtgcctgccacagaggaggaggccgaggtggatgagtttcccaccgatggggagatgtcagcgcaggaggaagaccgcaggaaggagctggaggcgcaggagaagcacaagaagctttttgagggcctgaagttcttcctgaaccgagaggtgccccgtgaggccctggccttcatcatcaggagttttggtggggaagtgtcctgggacaaatctttgtgcattggggccacctatgacgtcacagactcccgcatcacccatcagattgtcgaccggcctgggcagcagacctcagtcattggcaggtgctacgtgcagccccagtgggtgtttgactcagtgaacgccaggctccttctccccgtggcagagtacttctctggggtgcagctgcccccacacctttcaccctttgtgaccgagaaggaaggagattacgttccacctgagaagctgaagctgctggctctgcagcggggagaggacccaggaaacctgaatgagtcagaagaggaggaggaagaggacgacaacaacgaaggtgatggtgatgaagagggagaaaatgaggaggaggaggaagatgcagaggctggttcagaaaaggaggaagaggcccggctggcagccctggaagagcagaggatggaggggaagaagcccagggtgatggcaggcaccttgaagctggaggataagcagcggctggcccaggaggaggagagtgaggccaagcgcctggccattatgatgatgaagaagcgggagaagtacctgtaccagaagatcatgtttggcaagaggcgaaaaatccgagaggccaacaagctggcggagaagcggaaagcccacgatgaggcggtgaggtctgagaagaaggccaagaaggcaaggccggagtgagtgcctgcggacccctcatgctctctggctgggccagtgggcagccctcgcttcccttggatggagctgccctgctggtgcctggtcagagaagaggcctctgtgcccagcctgattctctgctcccaggagccagtgacatgaggtgcagaggcccacccagccccctacctactgcccccattcatcctggctttccacagccccctcccacacagttggacccgtgattctcagggtgctgtgatggggtgagggtagggggagcatttgttattaaatgactggacttttgtgccaattgca

SEQ ID NO: 459320 - DNA, 1234 bp, Homo sapiens
aataaggctaagtacgaggcgggctgtaaatcggccgaggagtcttctgaaccgagaggtgcccgtggaggccctggcttcatcatcaggagttttggtggggaagtgtcctgggacaaatctttgtgcattggggccacctatgacgtcacagactcccgcatcacccatcagattgtcgaccggcctgggcagcagacctcagtcattggcaggtgctacgtgcagccccagtgggtgtttgactcagtgaacgccaggctccttctccccgtggcagagtacttctctggggtgcagctgcccccacacctttcaccctttgtgaccgagaaggaaggagattacgttccacctgagaagctgaagctgctggctctgcagcggggagaggacccaggaaacctgaatgagtcagaagaggaggaggaagaggacgacaacaacgaaggtgatggtgatgaagagggagaaaatgaggaggaggaggaagatgcagaggctggttcagaaaaggaggaagaggcccggctggcagccctggaagagcagaggatggaggggaagaagcccagggtgatggcaggcaccttgaagctggaggataagcagcggctggcccaggaggaggagagtgaggccaagcgcctggccattatgatgatgaagaagcgggagaagtacctgtaccagaagatcatgtttggcaagaggcgaaaaatccgagaggccaacaagctggcggagaagcggaaagcccacgatgaggcggtgaggtctgagaagaaggccaagaaggcaaggccggagtgagtgcctgcggcccctcacagggctgaggccagcccctagcagctggatgtggcagaggcaggccagaggacctaagtgtgatggaccagagtcacttctcctcctcctttctccagccagccctgacccctcatgctctctggctgggccagtgggcagccctcgcttcccttggatggagctgccctgctggtgcctggtcagagaagaggcctctgtgcccagcctgattctctgctcccaggagccagtgacatgaggtgcagaggcccacccagccccctacctactgcccccattcatcctggctttccacagccccctcccacacagttggacccgtgattctcagggtgctgtgatggggtgagggtagggggagcatttgttattaaatgactggacttttgtgccaattgca

SEQ ID NO: 459321 - DNA, 1463 bp, Homo sapiens
tgtgtcatcccccttcgtggcaagggaacgtagagctatcgggggcagtccttgaggggtgccctgggcaggaggggctgcaagatttgcagggaggcagagttcccctcccagaatccaaaagccggtagggcggggggcaggcccctcgtttggcaactgagaagaagcggctttgggcggcaggatgctggtttatttactgtaggatctccagggccatcaaagccccctcgtgggatagggagactatttacacagccagggaggagggcagccaggaggcagagaccgggtcccgtatttccctctgcccgaatgaggaggggaggggcgtcctgggtcctgcagctgtagtcttggggttcagatggaaacttcatactcccgcatcacccatcagattgtcgaccggcctgggcagcagacctcagtcattggcaggtgctacgtgcagccccagtgggtgtttgactcagtgaacgccaggctccttctccccgtggcagagtacttctctggggtgcagctgcccccacacctttcaccctttgtgaccgagaaggaaggagattacgttccacctgagaagctgaagctgctggctctgcagcggggagaggacccaggaaacctgaatgagtcagaagaggaggaggaagaggacgacaacaacgaaggtgatggtgatgaagagggagaaaatgaggaggaggaggaagatgcagaggctggttcagaaaaggaggaagaggcccggctggcagccctggaagagcagaggatggaggggaagaagcccagggtgatggcaggcaccttgaagctggaggataagcagcggctggcccaggaggaggagagtgaggccaagcgcctggccattatgatgatgaagaagcgggagaagtacctgtaccagaagatcatgtttggcaagaggcgaaaaatccgagaggccaacaagctggcggagaagcggaaagcccacgatgaggcggtgaggtctgagaagaaggccaagaaggcaaggccggagtgagtgcctgcggcccctcacagggctgaggccagcccctagcagctggatgtggcagaggcaggccagaggacctaagtgtgatggaccagagtcacttctcctcctcctttctccagccagccctgacccctcatgctctctggctgggccagtgggcagccctcgcttcccttggatggagctgccctgctggtgcctggtcagagaagaggcctctgtgcccagcctgattctctgctcccaggagccagtgacatgaggtgcagaggcccacccagccccctacctactgcccccattcatcctggctttccacagccccctcccacacagttggacccgtgattctcagggtgctgtgatggggtgagggtagggggagcatttgttattaaatgactggacttttgtgccaattgca

SEQ ID NO: 459322 - DNA, 870 bp, Homo sapiens
gtgtcatcccccttcgtgtgtccatcccccttcgtgaatagatggtagacgatgggtaggtaggtggatggatagatggaggcatggatgagatggatggatgggtgaaaaatgaggaggaggaggaagatgcagaggctggttcagaaaaggaggaagaggcccggctggcagccctggaagagcagaggatggaggggaagaagcccagggtgatggcaggcaccttgaagctggaggataagcagcggctggcccaggaggaggagagtgaggccaagcgcctggccattatgatgatgaagaagcgggagaagtacctgtaccagaagatcatgtttggcaagaggcgaaaaatccgagaggccaacaagctggcggagaagcggaaagcccacgatgaggcggtgaggtctgagaagaaggccaagaaggcaaggccggagtgagtgcctgcggcccctcacagggctgaggccagcccctagcagctggatgtggcagaggcaggccagaggacctaagtgtgatggaccagagtcacttctcctcctcctttctccagccagccctgacccctcatgctctctggctgggccagtgggcagccctcgcttcccttggatggagctgccctgctggtgcctggtcagagaagaggcctctgtgcccagcctgattctctgctcccaggagccagtgacatgaggtgcagaggcccacccagccccctacctactgcccccattcatcctggctttccacagccccctcccacacagttggacccgtgattctcagggtgctgtgatggggtgagggtagggggagcatttgttattaaatgactggacttttgtgccaattgca

SEQ ID NO: 459323 - DNA, 468 bp, Homo sapiens
  misc_feature (24)..(24): n is a, c, g, or t
  misc_feature (44)..(44): n is a, c, g, or t
tcgacggcagtaacctcggggtanaggtagcgaggctgggtggnggtcggctcctcaacgtggagcgatgggaggccttgagaagaagaagtatgaacgaggctcggccaccaactacatcacccggaacaaagcccggaagaagctccagctgagcttggctgactttaggacccctcatgctctctggctgggccagtgggcagccctcgcttcccttggatggagctgccctgctggtgcctggtcagagaagaggcctctgtgcccagcctgattctctgctcccaggagccagtgacatgaggtgcagaggcccacccagccccctacctactgcccccattcatcctggctttccacagccccctcccacacagttggacccgtgattctcagggtgctgtgatggggtgagggtagggggagcatttgttattaaatgactggacttttgtgccaattgca

SEQ ID NO: 459324 - DNA, 391 bp, Homo sapiens
aaagcatgcaggtttaacgtgtctgagtgatagcacggggctgctggaagtttatagaagtgagcagaaagatgatctgagaactttaacttctgtattttcttatgctttccctgagtgcatttgtggaactcacagtggttgaggtcttcatggagccggtgatgctttagtaaaagaagtacaaactcaagatacctatgagagccaggtaggcaacaaatgagtgaagcaggcctagtgtaggacaatagggagtggcggagactgcagtaaattggagcatgttggccaaaaaaacagagctatctgaaaatcagattcagactaccagccaccttcccactgcagaccaaaattgtatatctaattgtgtttcagactgctaaat

SEQ ID NO: 459325 - DNA, 1047 bp, Homo sapiens
gcggccgccaccaccacctcagctgccctcgcgggcagcacggcgcggcaaaagcgcacgtcgcctagcgatggcgcggggcggggacacgggctgtaccggcccgtcggagacttccgcttccggggccgccgccatcgctctcccgggcttagaaggcccggctactgacgcgcagtgccagaccttacccctcacggtccttaagtctcggtcgccctcgcctcgcagcctgccacccgcgctcagctgcccgcctcctcagccagccatgctggagcatctgagctcgctgcccacgcagatggattacaagggccagaagctagctgaacagatgtttcagggaattattcttttttctgcaatagttggatttatctacgggtacgtggctgaacagttcgggtggactgtctatatagttatggccggatttgctttttcatgtttgctgacacttcctccatggcccatctatcgccggcatcctctcaagtggttacctgttcaagaatcaagcacagacgacaagaaaccaggggaaagaaaaattaagaggcatgctaaaaataattgaggttttcatgattcagcacctgcttttgtttctgtgagatgagctaaattgctttcataccccagataagagctaaaaccacctaatgctcttatggcacagctgtgtatagatttagttctctttatacttcatttctagcccagttgggttttgatttatataagtagtttagaccttctcttcataatcttgctctgagatggggaacagaacacacaagtatgaagtttctttcaggtgtaaataatgaaaaataaatgcctcataaatgatagtacaatgtaactatcaaagttttataattcattatgagttaaccattttaatgtttccaattaaacctcatagtgcaaaaaaaaaaaacaaaaaaaaaaaaaaaaaaaaaaaaaaaaaaaaaaaaaaaaaaaaaaaaaaaaaaaaaaaaaaaaaaaaaaaaaaaaaaaaaaaaaaaaaagggggggggg

SEQ ID NO: 459326 - DNA, 958 bp, Homo sapiens
gcggccgccaccaccacctcagctgccctcgcgggcagcacggcgcggcaaaagcgcacgtcgcctagcgatggcgcggggcggggacacgggctgtaccggcccgtcggagacttccgcttccggggccgccgccatcgctctcccgggcttagaaggcccggctactgacgcgcagtgccagaccttacccctcacggtccttaagtctcggtcgccctcgcctcgcagcctgccacccgcgctcagctgcccgcctcctcagccagccatgctggagcatctgagctcgctgcccacgcagatggattacaagggccagaagctagctgaacagatgtttcagggaattattcttttttctgcaatagttggatttatctacgggtacgtggctgaacagttcgggtggactgtctatatagttatggccggatttgctttttcatgtttggtaagaaatttgtgggtattagtggcagcttgggttttgtgagtcgggttggtttggttagacctactcagtagtgagacccaaagccaacgtttccctcatccttccaaacagcgtttccctttgctatcattggaaaagtagaatgccaaaatagtgtcagatggtgcgaactatataaaaggacacagcttatttcctttggcggctactctggctaataatcttaaggtcaaagccagcaggagttttcatggtgctcacgttgtcccttcaccttttatttatttatttatttaaattttttgagacggagtttcactcttgttgcccaggctgcagtgcactggggcgatttcggctcactgcaccttctgcctcccgggtttaatagattttcctgcctcagcctcccgagtagctgtgactacaggagcccaccaccacacccagctaatttttgtatttttagtaaagacagggcttcactgtgtggccaggctg

SEQ ID NO: 459327 - DNA, 366 bp, Homo sapiens
gctcatctcacagaaacaaaagcaggtgctaaattgctcttatctggggtatgaaagcacctaatgctcttatggcacagctgtgtatagatttagttctctttatacttcatttctagcccagttgggttttgatttatataagtagtttagaccttctcttcataatcttgctctgagatggggaacagaacacacaagtatgaagtttctttcaggtgtaaataatgaaaaataaatgcctcataaatgataaaaaaaaaaacaaaaaaaaaaaaaaaaaaaaaaaaaaaaaaaaaaaaaaaaaaaaaaaaaaaaaaaaaaaaaaaaaaaaaaaaaaaaaaaaaaaaaaaaaagggggggggg

SEQ ID NO: 459328 - DNA, 1297 bp, Homo sapiens
gcggccgccaccaccacctcagctgccctcgcgggcagcacggcgcggcaaaagcgcacgtcgcctagcgatggcgcggggcggggacacgggctgtaccggcccgtcggagacttccgcttccggggccgccgccatcgctctcccgggcttagaaggcccggctactgacgcgcagtgccagaccttacccctcacggtccttaagtctcggtcgccctcgcctcgcagcctgccacccgcgctcagctgcccgcctcctcagccagccatgctggagcatctgagctcgctgcccacgcagatggtgagggcgcaacccggggacctctgcacgccgttcttgtgcctggcagcttcgaagcccatgttggagcaccgacccggtgctgcgctgttccgggcccggatggttaccgtccaccctctttcccgaattgcctcctgggtccccttctcttctactccgcgagaatctcctgtccattctccgtgagggtgtttcagttcctcccgggaagcccagaatttaatatcttgcccaggcccttaggagagcgggagaccctgatgttggggttaccctgtgccagagttgtgaggtcagggcaggaattgtatgttctcggcggtggaaccaattctttttttcctctgcttcaccccaggattacaagggccagaagctagctgaacagatgtttcagggaattattcttttttctgcaatagttggatttatctacgggtacgtggctgaacagttcgggtggactgtctatatagttatggccggatttgctttttcatgtttgctgacacttcctccatggcccatctatcgccggcatcctctcaagtggttacctgttcaagaatcaagcacagacgacaagaaaccaggggaaagaaaaattaagaggcatgctaaaaataattgaggttttcatgattcagcacctgcttttgtttctgtgagatgagctaaattgctttcataccccagataagagctaaaaccacctaatgctcttatggcacagctgtgtatagatttagttctctttatacttcatttctagcccagttgggttttgatttatataagtagtttagaccttctcttcataatcttgctctgagatggggaacagaacacacaagtatgaagtttctttcaggtgtaaataatgaaaaataaatgcctcataaatgatagtacaatgtaactatcaaagttttataattcattatgagttaaccattttaatgtttccaattaaacctcatagtgcaa

SEQ ID NO: 459329 - DNA, 1386 bp, Homo sapiens
gcggccgccaccaccacctcagctgccctcgcgggcagcacggcgcggcaaaagcgcacgtcgcctagcgatggcgcggggcggggacacgggctgtaccggcccgtcggagacttccgcttccggggccgccgccatcgctctcccgggcttagaaggcccggctactgacgcgcagtgccagaccttacccctcacggtccttaagtctcggtcgccctcgcctcgcagcctgccacccgcgctcagctgcccgcctcctcagccagccatgctggagcatctgagctcgctgcccacgcagatggtgagggcgcaacccggggacctctgcacgccgttcttgtgcctggcagcttcgaagcccatgttggagcaccgacccggtgctgcgctgttccgggcccggatggttaccgtccaccctctttcccgaattgcctcctgggtccccttctcttctactccgcgagaatctcctgtccattctccgtgagggtgtttcagttcctcccgggaagcccagaatttaatatcttgcccaggcccttaggagagcgggagaccctgatgttggggttaccctgtgccagagttgtgaggtcagggcaggaattgtatgttctcggcggtggaaccaattctttttttcctctgcttcaccccaggattacaagggccagaagctagctgaacagatgtttcagggaattattcttttttctgcagtaagtattggttttacatttaatctccgcccccgcctccctcccaaccctcagtttgagtgtgtttaatatacttcatttgtctctagatagttggatttatctacgggtacgtggctgaacagttcgggtggactgtctatatagttatggccggatttgctttttcatgtttgctgacacttcctccatggcccatctatcgccggcatcctctcaagtggttacctgttcaagaatcaagcacagacgacaagaaaccaggggaaagaaaaattaagaggcatgctaaaaataattgaggttttcatgattcagcacctgcttttgtttctgtgagatgagctaaattgctttcataccccagataagagctaaaaccacctaatgctcttatggcacagctgtgtatagatttagttctctttatacttcatttctagcccagttgggttttgatttatataagtagtttagaccttctcttcataatcttgctctgagatggggaacagaacacacaagtatgaagtttctttcaggtgtaaataatgaaaaataaatgcctcataaatgatagtacaatgtaactatcaaagttttataattcattatgagttaaccattttaatgtttccaattaaacctcatagtgcaa

SEQ ID NO: 459330 - DNA, 849 bp, Homo sapiens
gcggccgccaccaccacctcagctgccctcgcgggcagcacggcgcggcaaaagcgcacgtcgcctagcgatggcgcggggcggggacacgggctgtaccggcccgtcggagacttccgcttccggggccgccgccatcgctctcccgggcttagaaggcccggctactgacgcgcagtgccagaccttacccctcacggtccttaagtctcggtcgccctcgcctcgcagcctgccacccgcgctcagctgcccgcctcctcagccagccatgctggagcatctgagctcgctgcccacgcagatggattacaagggccagaagctagctgaacagatgtttcagggaattattcttttttctgcactgacacttcctccatggcccatctatcgccggcatcctctcaagtggttacctgttcaagaatcaagcacagacgacaagaaaccaggggaaagaaaaattaagaggcatgctaaaaataattgaggttttcatgattcagcacctgcttttgtttctgtgagatgagctaaattgctttcataccccagataagagctaaaaccacctaatgctcttatggcacagctgtgtatagatttagttctctttatacttcatttctagcccagttgggttttgatttatataagtagtttagaccttctcttcataatcttgctctgagatggggaacagaacacacaagtatgaagtttctttcaggtgtaaataatgaaaaataaatgcctcataaatgatagtacaatgtaactatcaaagttttataattcattatgagttaaccattttaatgtttccaattaaacctcatagtgcaa

SEQ ID NO: 459331 - DNA, 567 bp, Homo sapiens
gcggccgccaccaccacctcagctgccctcgcgggcagcacggcgcggcaaaagcgcacgtcgcctagcgatggcgcggggcggggacacgggctgtaccggcccgtcggagacttccgcttccggggccgccgccatcgctctcccgggcttagaaggcccggctactgacgcgcagtgccagaccttacccctcacggtccttaagtctcggtcgccctcgcctcgcagcctgccacccgcgctcagctgcccgcctcctcagccagccatgctggagcatctgagctcgctgcccacgcagatggattacaagggccagaagctagctgaacagatgtttcagggaattattcttttttctgcaatagttggatttatctacgggtacgtggctgaacagttcgggtggactgtctatatagttatggccggatttgctttttcatgtttgctgacacttcctccatggcccatctatcgccggcatcctctcaagtggttacctgttcaagaatcaagcacagacgacaagaaaccaggcccaggcccgagagggatcctcta

SEQ ID NO: 459332 - DNA, 936 bp, Homo sapiens
gcggccgccaccaccacctcagctgccctcgcgggcagcacggcgcggcaaaagcgcacgtcgcctagcgatggcgcggggcggggacacgggctgtaccggcccgtcggagacttccgcttccggggccgccgccatcgctctcccgggcttagaaggcccggctactgacgcgcagtgccagaccttacccctcacggtccttaagtctcggtcgccctcgcctcgcagcctgccacccgcgctcagctgcccgcctcctcagccagccatgctggagcatctgagctcgctgcccacgcagatggattacaagggccagaagctagctgaacagatgtttcagggaattattcttttttctgcaatagttggatttatctacgggtacgtggctgaacagttcgggtggactgtctatatagttatggccggatttgctttttcatgtttgctgacacttcctccatggcccatctatcgccggcatcctctcaagtggttacctgttcaagaatcaagcacagacgacaagaaaccaggggaaagaaaaattaagaggcatgctaaaaataattgaggttttcatgattcagcacctgcttttgtttctgtgagatgagctaaattgctttcataccccagataagagctaaaaccacctaatgctcttatggcacagctgtgtatagatttagttctctttatacttcatttctagcccagttgggttttgatttatataagtagtttagaccttctcttcataatcttgctctgagatggggaacagaacacacaagtatgaagtttctttcaggtgtaaataatgaaaaataaatgcctcataaatgatagtacaatgtaactatcaaagttttataattcattatgagttaaccattttaatgtttccaattaaacctcatagtgcaa

SEQ ID NO: 459333 - DNA, 873 bp, Homo sapiens
gcggccgccaccaccacctcagctgccctcgcgggcagcacggcgcggcaaaagcgcacgtcgcctagcgatggcgcggggcggggacacgggctgtaccggcccgtcggagacttccgcttccggggccgccgccatcgctctcccgggcttagaaggcccggctactgacgcgcagtgccagaccttacccctcacggtccttaagtctcggtcgccctcgcctcgcagcctgccacccgcgctcagctgcccgcctcctcagccagccatgctggagcatctgagctcgctgcccacgcagatggattacaagggccagaagctagctgaacagatgtttcagggaattattcttttttctgcagtaagtattggttttacatttaatctgacacttcctccatggcccatctatcgccggcatcctctcaagtggttacctgttcaagaatcaagcacagacgacaagaaaccaggggaaagaaaaattaagaggcatgctaaaaataattgaggttttcatgattcagcacctgcttttgtttctgtgagatgagctaaattgctttcataccccagataagagctaaaaccacctaatgctcttatggcacagctgtgtatagatttagttctctttatacttcatttctagcccagttgggttttgatttatataagtagtttagaccttctcttcataatcttgctctgagatggggaacagaacacacaagtatgaagtttctttcaggtgtaaataatgaaaaataaatgcctcataaatgatagtacaatgtaactatcaaagttttataattcattatgagttaaccattttaatgtttccaattaaacctcatagtgcaa

SEQ ID NO: 459334 - DNA, 2992 bp, Homo sapiens
gcggccgccaccaccacctcagctgccctcgcgggcagcacggcgcggcaaaagcgcacgtcgcctagcgatggcgcggggcggggacacgggctgtaccggcccgtcggagacttccgcttccggggccgccgccatcgctctcccgggcttagaaggcccggctactgacgcgcagtgccagaccttacccctcacggtccttaagtctcggtcgccctcgcctcgcagcctgccacccgcgctcagctgcccgcctcctcagccagccatgctggagcatctgagctcgctgcccacgcagatggattacaagggccagaagctagctgaacagatgtttcagggaattattcttttttctgcaatagttggatttatctacgggtacgtggctgaacagttcgggtggactgtctatatagttatggccggatttgctttttcatgtttgctgacacttcctccatggcccatctatcgccggcatcctctcaagtggttacctgttcaagaatcaagcacagacgacaagaaaccaggggaaagaaaaattaagaggcatgctaaaaataattgaggttttcatgattcagcacctgcttttgtttctgtgagatgagctaaattgctttcataccccagataagagctaaaaccacctaatgctcttatggcacagctgtgtatagatttagttctctttatacttcatttctagcccagttgggttttgatttatataagtagtttagaccttctcttcataatcttgctctgagatggggaacagaacacacaagtatgaagtttctttcaggtgtaaataatgaaaaataaatgcctcataaatgatagtacaatgtaactatcaaagttttataattcattatgagttaaccattttaatgtttccaattaaacctcatagtgcaaaagttctttgtctaaagggtcttctgttgattattctgcaaggaagataattaataaaagcctaagttagaagttcgtgcttctggccaggtgcagtggctctcacctataatcccagcacttgaggaggctaaggcaggaggatgacttgagcccaggagtttgagacatttcatggtatgtaattaatagttgtcattagaacattagttccatgagaacggggactttgttttgctcactgctgtctacccagtacatagaagagtacacgatgcattgttaagtacttaagatttattgaatgagaactgcattgtacaatatggtgccactagacacgtctatttaatttaaattaaaatataaaactctaaaactagccatgattcaaaggttcaatagctatatgtgactagtggctaccatataaaacatttccatcacaaagttccatttatcagatcttatatagaaccttgaataaaatttaatagacaagtgattttgtatttaacatttcacctttattgaatgcctataaggccatttgaataacggatcatgtacaaagcaacaggaaaaaaaaaactgcaagcagtaaaggttgtgcaggtgatattcagtaacactgcagtgtagccagagcaaggacataaaacttccttagctttgtaagtctgtggaaatcaaaacttctaaaagagaaaaccgaaatcagaattactgacactttaggccaggcatggtgcctcaagcctgtaatcccagcatttagggaggccaaggcatgagccaccacgcccagccaaatgtaactttaaacaagacaaaaagtttagcttgaggacaatttaatactaactagaaagacaaagctgaatacatgtaaacatgactttatctttatgaacagccattatgaagacaactcccgctataggtacatcagcatatttctctatatatgcagaaaggaatacactatgaaaacagacaagatatgaattaccaagataaactatctcagatataaaaaggaggagcaaggggtcaagctgaagaggtcaagggaaaaaggctgctctacaatgttagagcacacatgattttctaaaaataaaaacacaaaaatggaagaaataatgcattggtgaagttcaaccttttcaaccctttgccttctatggatcatccttgatgataggaaagtataagctaacatgacaaaggcaggtgtggcagagactggagtgctcactgaaatcatgagctactctacgttttccagcctctccgtagaatcacatgcctggggtatggctgtcagggatgtaagcctgaaaacaccctaatgaatcctgaggctctcttttctcacttcatcatggcatggaagccccgtgtagcaatcagtgtagctacataatagaaacagcccatgaccaggagtcactactcagaaaagagtgatgccaacaggagagctacatcaaatctagcatgagcaagaaataactctctgtagtgttaagccactgtgatttgcgggttttgtctgttgcatcaactagaaccaattttcatggagagggtgctttgcaacatataaagtgctgtggctttgtaaggttctaatattagagggaactgatgccttataaagtaaaaccgttcttcagagcagaatacctctgaaaataagaatatatatgtttttatataaactgattcacgcaaagaagagaaaaacctttgaaaacaaaggggaacaattaagatataatctgcttataataaaataccgaggaaagagctgcagaattgttaggtattcagttctaagaaaacaactgttatgactcctgttattgtttatatagtttgaaaacagacttcccttgtgattagatatttcacttatctttaagcaagtctcgcagcttgaataagcttgaattattgaaggaattttaaataaatatgatggccccctaaatccaggtgtcaatcttagcattattaatggggaaacaaccagatatgttagcaactg

SEQ ID NO: 459335 - DNA, 2479 bp, Homo sapiens
gcggccgccaccaccacctcagctgccctcgcgggcagcacggcgcggcaaaagcgcacgtcgcctagcgatggcgcggggcggggacacgggctgtaccggcccgtcggagacttccgcttccggggccgccgccatcgctctcccgggcttagaaggcccggctactgacgcgcagtgccagaccttacccctcacggtccttaagtctcggtcgccctcgcctcgcagcctgccacccgcgctcagctgcccgcctcctcagccagccatgctggagcatctgagctcgctgcccacgcagatggattacaagggccagaagctagctgaacagatgtttcagggaattattcttttttctgcaatagttggatttatctacgggtacgtggctgaacagttcgggtggactgtctatatagttatggccggatttgctttttcatgtttgctgacacttcctccatggcccatctatcgccggcatcctctcaagtggttacctgttcaagaatcaagcacagacgacaagaaaccaggggaaagaaaaattaagaggcatgctaaaaataattgaggttttcatgattcagcacctgcttttgtttctgtgagatgagctaaattgctttcataccccagataagagctaaaaccacctaatgctcttatggcacagctgtgtatagatttagttctctttatacttcatttctagcccagttgggttttgatttatataagtagtttagaccttctcttcataatcttgctctgagatggggaacagaacacacaagtatgaagtttctttcaggtgtaaataatgaaaaataaatgcctcataaatgatagtacaatgtaactatcaaagttttataattcattatgagttaaccattttaatgtttccaattaaacctcatagtgcaaaagttctttgtctaaagggtcttctgttgattattctgcaaggaagataattaataaaagcctaagttagaagttcgtgcttctggccaggtgcagtggctctcacctataatcccagcacttgaggaggctaaggcaggaggatgacttgagcccaggagtttgagacatttcatggtatgtaattaatagttgtcattagaacattagttccatgagaacggggactttgttttgctcactgctgtctacccagtacatagaagagtacacgatgcattgttaagtacttaagatttattgaatgagaactgcattgtacaatatggtgccactagacacgtctatttaatttaaattaaaatataaaactctaaaactagccatgattcaaaggttcaatagctatatgtgactagtggctaccatataaaacatttccatcacaaagttccatttatcagatcttatatagaaccttgaataaaatttaatagacaagtgattttgtatttaacatttcacctttattgaatgcctataaggccatttgaataacggatcatgtacaaagcaacaggaaaaaaaaaactgcaagcagtaaaggttgtgcaggtgatattcagtaacactgcagtgtagccagagcaaggacataaaacttccttagctttgtaagtctgtggaaatcaaaacttctaaaagagaaaaccgaaatcagaattactgacactttaggccaggcatggtgcctcaagcctgtaatcccagcatttagggaggccaaggcaggcagatcacctgaggtcaggagttcaagaccagcctggccaacatggtgaaactccatctctactaaaaataacgaaaatcagccaggcatggtggtgtgtgcctgtaatcccagctactcgggaggctgagggaggggaacttgaacccaggaggcgtaggctgcagtgagccaagatcgcaccactgtactccagcctgggcaacaagaagactccatctcaaaaaaaaaaaaaaaagaatgattgacattttagaaccaatgccaaaagagtaacacatcaaagtctctgaactgtggccaaaggtatattcggaagaaaattcacagtcttaaagatgagtttttaaattaatttaggaagatgaattaagcactcaagtaaaaacgataaaagtgggaagaaaaaatgtttaaacaaaataaaaatatacagtatggtaattaataagaaagtatgggggaagtcaggtgtggtggttcatgcctataatcccagcactttcagaggccgatgcaggaggactgcttgaatgcagtttgagaccagcctgggcaacacagacttcctctccacaaaaaattttaaaaattagccaggtgtggtggtgcatgcctgtggtcctagctacttgaggggctgaggtgggaggatcacttaagcccaggaggtcaaggctgcagtgagctatgatcacctcactgcactccaggctgggtgacagagcaagaccctgtctcaaaaaaaaa

SEQ ID NO: 459336 - DNA, 2938 bp, Homo sapiens
gcggccgccaccaccacctcagctgccctcgcgggcagcacggcgcggcaaaagcgcacgtcgcctagcgatggcgcggggcggggacacgggctgtaccggcccgtcggagacttccgcttccggggccgccgccatcgctctcccgggcttagaaggcccggctactgacgcgcagtgccagaccttacccctcacggtccttaagtctcggtcgccctcgcctcgcagcctgccacccgcgctcagctgcccgcctcctcagccagccatgctggagcatctgagctcgctgcccacgcagatggattacaagggccagaagctagctgaacagatgtttcagggaattattcttttttctgcaatagttggatttatctacgggtacgtggctgaacagttcgggtggactgtctatatagttatggccggatttgctttttcatgtttgctgacacttcctccatggcccatctatcgccggcatcctctcaagtggttacctgttcaagaatcaagcacagacgacaagaaaccaggggaaagaaaaattaagaggcatgctactaaattgctttcataccccagataagagctaaaaccacctaatgctcttatggcacagctgtgtatagatttagttctctttatacttcatttctagcccagttgggttttgatttatataagtagtttagaccttctcttcataatcttgctctgagatggggaacagaacacacaagtatgaagtttctttcaggtgtaaataatgaaaaataaatgcctcataaatgatagtacaatgtaactatcaaagttttataattcattatgagttaaccattttaatgtttccaattaaacctcatagtgcaaaagttctttgtctaaagggtcttctgttgattattctgcaaggaagataattaataaaagcctaagttagaagttcgtgcttctggccaggtgcagtggctctcacctataatcccagcacttgaggaggctaaggcaggaggatgacttgagcccaggagtttgagacatttcatggtatgtaattaatagttgtcattagaacattagttccatgagaacggggactttgttttgctcactgctgtctacccagtacatagaagagtacacgatgcattgttaagtacttaagatttattgaatgagaactgcattgtacaatatggtgccactagacacgtctatttaatttaaattaaaatataaaactctaaaactagccatgattcaaaggttcaatagctatatgtgactagtggctaccatataaaacatttccatcacaaagttccatttatcagatcttatatagaaccttgaataaaatttaatagacaagtgattttgtatttaacatttcacctttattgaatgcctataaggccatttgaataacggatcatgtacaaagcaacaggaaaaaaaaaactgcaagcagtaaaggttgtgcaggtgatattcagtaacactgcagtgtagccagagcaaggacataaaacttccttagctttgtaagtctgtggaaatcaaaacttctaaaagagaaaaccgaaatcagaattactgacactttaggccaggcatggtgcctcaagcctgtaatcccagcatttagggaggccaaggcatgagccaccacgcccagccaaatgtaactttaaacaagacaaaaagtttagcttgaggacaatttaatactaactagaaagacaaagctgaatacatgtaaacatgactttatctttatgaacagccattatgaagacaactcccgctataggtacatcagcatatttctctatatatgcagaaaggaatacactatgaaaacagacaagatatgaattaccaagataaactatctcagatataaaaaggaggagcaaggggtcaagctgaagaggtcaagggaaaaaggctgctctacaatgttagagcacacatgattttctaaaaataaaaacacaaaaatggaagaaataatgcattggtgaagttcaaccttttcaaccctttgccttctatggatcatccttgatgataggaaagtataagctaacatgacaaaggcaggtgtggcagagactggagtgctcactgaaatcatgagctactctacgttttccagcctctccgtagaatcacatgcctggggtatggctgtcagggatgtaagcctgaaaacaccctaatgaatcctgaggctctcttttctcacttcatcatggcatggaagccccgtgtagcaatcagtgtagctacataatagaaacagcccatgaccaggagtcactactcagaaaagagtgatgccaacaggagagctacatcaaatctagcatgagcaagaaataactctctgtagtgttaagccactgtgatttgcgggttttgtctgttgcatcaactagaaccaattttcatggagagggtgctttgcaacatataaagtgctgtggctttgtaaggttctaatattagagggaactgatgccttataaagtaaaaccgttcttcagagcagaatacctctgaaaataagaatatatatgtttttatataaactgattcacgcaaagaagagaaaaacctttgaaaacaaaggggaacaattaagatataatctgcttataataaaataccgaggaaagagctgcagaattgttaggtattcagttctaagaaaacaactgttatgactcctgttattgtttatatagtttgaaaacagacttcccttgtgattagatatttcacttatctttaagcaagtctcgcagcttgaataagcttgaattattgaaggaattttaaataaatatgatggccccctaaatccaggtgtcaatcttagcattattaatggggaaacaaccagatatgttagcaactg

SEQ ID NO: 459337 - DNA, 494 bp, Homo sapiens
gtggaagccagtcagaagttttatgaaaacagcagcagcttgagacagcccatgctcacaagaggggacctgtcagttaagccctttcccctgaaagaagaatgacattaaaccaggccttgtggtgcacgcctggtgcatgcctgtagtcccagctacgtgggaggccgaggcaagaggatcgcttgagccccggaggctgagcttagagtttgggaaaatcacttcataacctttcacaagatctgaaagaaataagcttcacattctttccacactatgtttactttctcaactttacaagttcttttttgttgtgtttgtgtgtgatgtttgttttatatttgaaggaatatctttatcatttgttctcttatttaggatgaataaatttaaacatggctgtcattcagaaacagaaaagatttatagaaaaatacagagacattgttcttttctctgtaaggtctgtaagctgctcacagacatgcctg

SEQ ID NO: 459338 - DNA, 3300 bp, Homo sapiens
cggagcggagtcccagccggagccccagccggagcccgatccctagccctgcggccgcgcctccctcgccgtccccgcctggagcccggcgccgccgccgccctgccgcccccgccagccgcgccgtgacgcgggcatgagcctgctccgcggcgccgctgagcaggcgctcctggcccgggcctcggcgcccaggcaggcgcggggcgaaggagctgctagaacaatgctgaggcgggtgaggtgaggagcagcccctcgcggcagccccgacagagtgtctggaacaggtgattggaggagccggagacccaggcacctgggcatccttcccctcgcctctgccaggccccgcgcccctaaaaggtgggaaaaccatggcgaccaatttcagtgacatcgtcaagcaaggctacgtgaagatgaagagcaggaagctcgggatctaccggaggtgctggctggtgttccggaaatcctccagcaaggggccccagcggctggagaagtatccagatgagaagtcggtgtgcctccggggctgccccaaggtgactgagatcagcaacgtcaagtgtgttacgcggctccccaaggagaccaagcggcaggcggtggccatcatattcactgatgactcggcacgtaccttcacctgcgactcagagctagaggcagaggagtggtacaagacactatctgtggagtgtctggggtcccgcctcaacgacatcagtctgggagaacctgacctcctggccccaggggtgcagtgtgaacagacagatcgcttcaatgtcttcctgctgccctgccccaacctggacgtgtatggcgagtgcaagctgcagatcacccacgagaacatctacctctgggacatccacaacccccgtgtgaagctcgtctcgtggcccctctgctcactgcgccgctatggccgggatgccacacgctttaccttcgaggctggccggatgtgtgatgctggggaaggactctataccttccagacacaagagggggagcagatttaccagcgcgtccacagtgccaccctggccatcgcagagcagcacaagcgggtcctgctggaaatggagaagaacgtgaggctgctgaacaagggcacggaacattactcgtatccctgcacacccacgaccatgctgccgcgcagtgcctactggcaccacatcactggttcccagaacatcgccgaagcctccagctatgctggtgaggggtatggggcagcccaggccagctcggaaacagacctcctcaacagattcatcctgctaaagccaaagcccagccagggggacagcagtgaggccaagaccccatcccagtgaccacagtgctggcgagcaccgatgactgctgggggctgcctgctgcggggctggctgcagtgtaccgtggacagcctcagggggctgtcggccaagagcctggagaaagggagcaagctgccccctccttgcccccaaggatgaggctggactgaggcaaagggctggccacaccacctgagcatgtgtgaggggttggagctaccgtgggactatatactgttaatgattttaatatatatggcttatgacatactctgtatcaatgagatcccctcaccctcaccccatccttccccaccaatacacacaaattttttaatcccatgaccaggccacggtcaaggctgtttttgagtatgagtgcagtcgtgtccatcctccatggcacagccctcctgctgccaggacctgcttgaactaccagggccacaggagggggataatcagagcttgaggctggcactctgactgctggcttttcccaaacagcccaagggccggaacagcaggtggcttctcagttcctctgggcctggagtgacacaggaaggatctgcacttcctctgtgctgcttgccagccttgcagttggagttttaagcagaggtgacatctggttgacgcctcaggtgaaaatctggttttaaaatgtaacttctgcacaggctccttcctgctttgtaggctgggaagatgcccctggggtaggggtgctgattacctcagccatgtggaggaaggctggagcttgttcctgccccaggaataggccaggagggaaggccgcagcaggactgccgtggggagcacccctgctgcccccctctcactgaccaggggtggacaatgcccaagcagagggagcccccttgccctgtttggccaccctctggccagccaaaagcactctgaaaccaagaccttcccatttcctcctccccacatggtgctgaggctccctgctgcaatgcaattaaagcaattgattttctagtgctggtatttgttgactaccatgcagaagggctatctttctattcacgtcaaacttttggttgtgtggggttttttgttgttttttgggttttgttttttaatactttagggtcctgatttgtgggaacagaccttcttgtaaataaccactatttgagttgtggcaggaggatgataaagcacgcggcccctcccaaaggagcccttgagctagggaggtggtgcagtcagcctcgctctcaacgtgacccggggaatgaccacccagagggatgagctagcctgtagaggggaactggggtccaaaggtctttggggagggaggcagagctggctggctcagctaagtggcacgatgacgcatgaaggagattatgttgtgctctttattgccaaaaataaacacttttaaaaagacaacttctgttaatcaataaatatcctttcctttctgtactggatctctggttttctccaggctgcctaattaactgctttgtgcatgttcctatctggagacagtgctgaggggttagggccagagccttcattaaggagaaatgaaatactcctcctgtgtatgtgggaggggcccttgctcctgcggctgcttccacccccacccccacccccacccccacccccaccaaactaaatgatcaggtcattggaggtgaaggggttcatgactgctggacagagaatgaaatatcatgtttatttggtggggaggggacagccagggtctaatgctattccaaaaggttacttctcaaattagggacacctgggaatttgaagcgctagcaggccagccctggggcaagaactggaagggtttataggccccctgaataaaggctatggcacttgatcctcaacaccagacatctaaggtacaactgaaaatgactcattttggacagaaagggtttagagtaaa

SEQ ID NO: 459339 - DNA, 3249 bp, Homo sapiens
agggaaggaagaagggcgggaggaaggagggagggaagagggagagaggaggagtgtgggaagaggaaggaaaaaagagagcgagacagcgagaggaagagaaagatgtcactgtctctaatctccctgtcatttttatttccagcaggcgcggggcgaaggagctgctagaacaatgctgaggcgggtgaggtgaggagcagcccctcgcggcagccccgacagagtgtctggaacaggtgattggaggagccggagacccaggcacctgggcatccttcccctcgcctctgccaggccccgcgcccctaaaaggtgggaaaaccatggcgaccaatttcagtgacatcgtcaagcaaggctacgtgaagatgaagagcaggaagctcgggatctaccggaggtgctggctggtgttccggaaatcctccagcaaggggccccagcggctggagaagtatccagatgagaagtcggtgtgcctccggggctgccccaaggtgactgagatcagcaacgtcaagtgtgttacgcggctccccaaggagaccaagcggcaggcggtggccatcatattcactgatgactcggcacgtaccttcacctgcgactcagagctagaggcagaggagtggtacaagacactatctgtggagtgtctggggtcccgcctcaacgacatcagtctgggagaacctgacctcctggccccaggggtgcagtgtgaacagacagatcgcttcaatgtcttcctgctgccctgccccaacctggacgtgtatggcgagtgcaagctgcagatcacccacgagaacatctacctctgggacatccacaacccccgtgtgaagctcgtctcgtggcccctctgctcactgcgccgctatggccgggatgccacacgctttaccttcgaggctggccggatgtgtgatgctggggaaggactctataccttccagacacaagagggggagcagatttaccagcgcgtccacagtgccaccctggccatcgcagagcagcacaagcgggtcctgctggaaatggagaagaacgtgaggctgctgaacaagggcacggaacattactcgtatccctgcacacccacgaccatgctgccgcgcagtgcctactggcaccacatcactggttcccagaacatcgccgaagcctccagctatgctggtgaggggtatggggcagcccaggccagctcggaaacagacctcctcaacagattcatcctgctaaagccaaagcccagccagggggacagcagtgaggccaagaccccatcccagtgaccacagtgctggcgagcaccgatgactgctgggggctgcctgctgcggggctggctgcagtgtaccgtggacagcctcagggggctgtcggccaagagcctggagaaagggagcaagctgccccctccttgcccccaaggatgaggctggactgaggcaaagggctggccacaccacctgagcatgtgtgaggggttggagctaccgtgggactatatactgttaatgattttaatatatatggcttatgacatactctgtatcaatgagatcccctcaccctcaccccatccttccccaccaatacacacaaattttttaatcccatgaccaggccacggtcaaggctgtttttgagtatgagtgcagtcgtgtccatcctccatggcacagccctcctgctgccaggacctgcttgaactaccagggccacaggagggggataatcagagcttgaggctggcactctgactgctggcttttcccaaacagcccaagggccggaacagcaggtggcttctcagttcctctgggcctggagtgacacaggaaggatctgcacttcctctgtgctgcttgccagccttgcagttggagttttaagcagaggtgacatctggttgacgcctcaggtgaaaatctggttttaaaatgtaacttctgcacaggctccttcctgctttgtaggctgggaagatgcccctggggtaggggtgctgattacctcagccatgtggaggaaggctggagcttgttcctgccccaggaataggccaggagggaaggccgcagcaggactgccgtggggagcacccctgctgcccccctctcactgaccaggggtggacaatgcccaagcagagggagcccccttgccctgtttggccaccctctggccagccaaaagcactctgaaaccaagaccttcccatttcctcctccccacatggtgctgaggctccctgctgcaatgcaattaaagcaattgattttctagtgctggtatttgttgactaccatgcagaagggctatctttctattcacgtcaaacttttggttgtgtggggttttttgttgttttttgggttttgttttttaatactttagggtcctgatttgtgggaacagaccttcttgtaaataaccactatttgagttgtggcaggaggatgataaagcacgcggcccctcccaaaggagcccttgagctagggaggtggtgcagtcagcctcgctctcaacgtgacccggggaatgaccacccagagggatgagctagcctgtagaggggaactggggtccaaaggtctttggggagggaggcagagctggctggctcagctaagtggcacgatgacgcatgaaggagattatgttgtgctctttattgccaaaaataaacacttttaaaaagacaacttctgttaatcaataaatatcctttcctttctgtactggatctctggttttctccaggctgcctaattaactgctttgtgcatgttcctatctggagacagtgctgaggggttagggccagagccttcattaaggagaaatgaaatactcctcctgtgtatgtgggaggggcccttgctcctgcggctgcttccacccccacccccacccccacccccacccccaccaaactaaatgatcaggtcattggaggtgaaggggttcatgactgctggacagagaatgaaatatcatgtttatttggtggggaggggacagccagggtctaatgctattccaaaaggttacttctcaaattagggacacctgggaatttgaagcgctagcaggccagccctggggcaagaactggaagggtttataggccccctgaataaaggctatggcacttgatcctcaacaccagacatctaaggtacaactgaaaatgactcattttggacagaaagggtttagagtaaa

SEQ ID NO: 459340 - DNA, 3494 bp, Homo sapiens
aagctctgtgcccacttgggacacaggtgcctcatgaattcatttcctcatttaaagtaggtagatttattctcatttttttccaatggggaaattaaggcacagggtcttaagcggcttgcccaggaccacacagccagctggattcacactccgggctgtgctatgtctgagctatgttggatgaacctgggggtccagtggcttcctgtaggcgtgttctgactgggggcttccacactgtagacccacagccagtggtcagcctgctaatcatcttggagaggaactcctgagctggtccttgctctgaggagaaggcagccccagaggcaggcggtgaagacagagctgagaaaattgacccatctctggctgccagagcccaggcaggcgcggggcgaaggagctgctagaacaatgctgaggcgggtgaggtgaggagcagcccctcgcggcagccccgacagagtgtctggaacaggtgattggaggagccggagacccaggcacctgggcatccttcccctcgcctctgccaggccccgcgcccctaaaaggtgggaaaaccatggcgaccaatttcagtgacatcgtcaagcaaggctacgtgaagatgaagagcaggaagctcgggatctaccggaggtgctggctggtgttccggaaatcctccagcaaggggccccagcggctggagaagtatccagatgagaagtcggtgtgcctccggggctgccccaaggtgactgagatcagcaacgtcaagtgtgttacgcggctccccaaggagaccaagcggcaggcggtggccatcatattcactgatgactcggcacgtaccttcacctgcgactcagagctagaggcagaggagtggtacaagacactatctgtggagtgtctggggtcccgcctcaacgacatcagtctgggagaacctgacctcctggccccaggggtgcagtgtgaacagacagatcgcttcaatgtcttcctgctgccctgccccaacctggacgtgtatggcgagtgcaagctgcagatcacccacgagaacatctacctctgggacatccacaacccccgtgtgaagctcgtctcgtggcccctctgctcactgcgccgctatggccgggatgccacacgctttaccttcgaggctggccggatgtgtgatgctggggaaggactctataccttccagacacaagagggggagcagatttaccagcgcgtccacagtgccaccctggccatcgcagagcagcacaagcgggtcctgctggaaatggagaagaacgtgaggctgctgaacaagggcacggaacattactcgtatccctgcacacccacgaccatgctgccgcgcagtgcctactggcaccacatcactggttcccagaacatcgccgaagcctccagctatgctggtgaggggtatggggcagcccaggccagctcggaaacagacctcctcaacagattcatcctgctaaagccaaagcccagccagggggacagcagtgaggccaagaccccatcccagtgaccacagtgctggcgagcaccgatgactgctgggggctgcctgctgcggggctggctgcagtgtaccgtggacagcctcagggggctgtcggccaagagcctggagaaagggagcaagctgccccctccttgcccccaaggatgaggctggactgaggcaaagggctggccacaccacctgagcatgtgtgaggggttggagctaccgtgggactatatactgttaatgattttaatatatatggcttatgacatactctgtatcaatgagatcccctcaccctcaccccatccttccccaccaatacacacaaattttttaatcccatgaccaggccacggtcaaggctgtttttgagtatgagtgcagtcgtgtccatcctccatggcacagccctcctgctgccaggacctgcttgaactaccagggccacaggagggggataatcagagcttgaggctggcactctgactgctggcttttcccaaacagcccaagggccggaacagcaggtggcttctcagttcctctgggcctggagtgacacaggaaggatctgcacttcctctgtgctgcttgccagccttgcagttggagttttaagcagaggtgacatctggttgacgcctcaggtgaaaatctggttttaaaatgtaacttctgcacaggctccttcctgctttgtaggctgggaagatgcccctggggtaggggtgctgattacctcagccatgtggaggaaggctggagcttgttcctgccccaggaataggccaggagggaaggccgcagcaggactgccgtggggagcacccctgctgcccccctctcactgaccaggggtggacaatgcccaagcagagggagcccccttgccctgtttggccaccctctggccagccaaaagcactctgaaaccaagaccttcccatttcctcctccccacatggtgctgaggctccctgctgcaatgcaattaaagcaattgattttctagtgctggtatttgttgactaccatgcagaagggctatctttctattcacgtcaaacttttggttgtgtggggttttttgttgttttttgggttttgttttttaatactttagggtcctgatttgtgggaacagaccttcttgtaaataaccactatttgagttgtggcaggaggatgataaagcacgcggcccctcccaaaggagcccttgagctagggaggtggtgcagtcagcctcgctctcaacgtgacccggggaatgaccacccagagggatgagctagcctgtagaggggaactggggtccaaaggtctttggggagggaggcagagctggctggctcagctaagtggcacgatgacgcatgaaggagattatgttgtgctctttattgccaaaaataaacacttttaaaaagacaacttctgttaatcaataaatatcctttcctttctgtactggatctctggttttctccaggctgcctaattaactgctttgtgcatgttcctatctggagacagtgctgaggggttagggccagagccttcattaaggagaaatgaaatactcctcctgtgtatgtgggaggggcccttgctcctgcggctgcttccacccccacccccacccccacccccacccccaccaaactaaatgatcaggtcattggaggtgaaggggttcatgactgctggacagagaatgaaatatcatgtttatttggtggggaggggacagccagggtctaatgctattccaaaaggttacttctcaaattagggacacctgggaatttgaagcgctagcaggccagccctggggcaagaactggaagggtttataggccccctgaataaaggctatggcacttgatcctcaacaccagacatctaaggtacaactgaaaatgactcattttggacagaaagggtttagagtaaa

SEQ ID NO: 459341 - DNA, 3156 bp, Homo sapiens
agggaaggaagaagggcgggaggaaggagggagggaagagggagagaggaggagtgtgggaagaggaaggaaaaaagagagcgagacagcgagaggaagagaaagatgtcactgtctctaatctccctgtcatttttatttccagcaggcgcggggcgaaggagctgctagaacaatgctgaggcgggtgaggtgaggagcagcccctcgcggcagccccgacagagtgtctggaacaggtgattggaggagccggagacccaggcacctgggcatccttcccctcgcctctgccaggccccgcgcccctaaaaggtgggaaaaccatggcgaccaatttcagtgacatcgtcaagcaaggctacgtgaagatgaagagcaggaagctcgggatctaccggaggtgctggctggtgttccggaaatcctccagcaaggggccccagcggctggagaagtatccagatgagaagtcggtgtgcctccggggctgccccaaggtgactgagatcagcaacgtcaagtgtgttacgcggctccccaaggagaccaagcggcaggcggtggccatcatattcactgatgactcggcacgtaccttcacctgcgactcagagctagaggcagaggagtggtacaagacactatctgtggagtgtctggggtcccgcctcaacgacatcagtctgggagaacctgacctcctggccccaggggtgcagtgtgaacagacagatcgcttcaatgtcttcctgctgccctgccccaacctggacgtgtatggcgagtgcaagctgcagatcacccacgagaacatctacctctgggacatccacaacccccgtgtgaagctcgtctcgtggcccctctgctcactgcgccgctatggccgggatgccacacgctttaccttcgaggctggccggatgtgtgatgctggggaaggactctataccttccagacacaagagggggagcagatttaccagcgcgtccacagtgccaccctggccatcgcagagcagcacaagcgggtcctgctggaaatggagaagaacgtgaggctgctgaacaagggcacggaacattactcgtatccctgcacacccacgaccatgctgccgcgcagtgcctactggcaccacatcactggttcccagaacatcgccgaagcctccagctatgctggtgaggggtatggggcagcccaggccagctcggaaacagacctcctcaacagattcatcctgctaaagccaaagcccagccagggggacagcagtgaggccaagaccccatcccagtgaccacagtgctggcgagcaccgatgactgctgggggctgcctgctgcggggctggctgcagtgtaccgtggacagcctcagggggctgtcggccaagagcctggagaaagggagcaagctgccccctccttgcccccaaggatgaggctggactgaggcaaagggctggccacaccacctgagcatgtgtgaggggttggagctaccgtgggactatatactgttaatgattttaatatatatggcttatgacatactctgtatcaatgagatcccctcaccctcaccccatccttccccaccaatacacacaaattttttaatcccatgaccaggccacggtcaaggctgtttttgagtatgagtgcagtcgtgtccatcctccatggcacagccctcctgctgccaggacctgcttgaactaccagggccacaggagggggataatcagagcttgaggctggcactctgactgctggcttttcccaaacagcccaagggccggaacagcaggtggcttctcagttcctctgggcctggagtgacacaggaaggatctgcacttcctctgtgctgcttgccagccttgcagttggagttttaagcagaggtgacatctggttgacgcctcaggtgaaaatctggttttaaaatgtaacttctgcacaggctccttcctgctttgtaggctgggaagatgcccctggggtaggggtgctgattacctcagccatgtggaggaaggctggagcttgttcctgccccaggaataggccaggagggaaggccgcagcaggactgccgtggggagcacccctgctgcccccctctcactgaccaggggtggacaatgcccaagcagagggagcccccttgccctgtttggccaccctctggccagccaatgctggtatttgttgactaccatgcagaagggctatctttctattcacgtcaaacttttggttgtgtggggttttttgttgttttttgggttttgttttttaatactttagggtcctgatttgtgggaacagaccttcttgtaaataaccactatttgagttgtggcaggaggatgataaagcacgcggcccctcccaaaggagcccttgagctagggaggtggtgcagtcagcctcgctctcaacgtgacccggggaatgaccacccagagggatgagctagcctgtagaggggaactggggtccaaaggtctttggggagggaggcagagctggctggctcagctaagtggcacgatgacgcatgaaggagattatgttgtgctctttattgccaaaaataaacacttttaaaaagacaacttctgttaatcaataaatatcctttcctttctgtactggatctctggttttctccaggctgcctaattaactgctttgtgcatgttcctatctggagacagtgctgaggggttagggccagagccttcattaaggagaaatgaaatactcctcctgtgtatgtgggaggggcccttgctcctgcggctgcttccacccccacccccacccccacccccacccccaccaaactaaatgatcaggtcattggaggtgaaggggttcatgactgctggacagagaatgaaatatcatgtttatttggtggggaggggacagccagggtctaatgctattccaaaaggttacttctcaaattagggacacctgggaatttgaagcgctagcaggccagccctggggcaagaactggaagggtttataggccccctgaataaaggctatggcacttgatcctcaacaccagacatctaaggtacaactgaaaatgactcattttggacagaaagggtttagagtaaa

SEQ ID NO: 459342 - DNA, 2846 bp, Homo sapiens
agggaaggaagaagggcgggaggaaggagggagggaagagggagagaggaggagtgtgggaagaggaaggaaaaaagagagcgagacagcgagaggaagagaaagatgtcactgtctctaatctccctgtcatttttatttccagcaggcgcggggcgaaggagctgctagaacaatgctgaggcgggtgaggtgaggagcagcccctcgcggcagccccgacagagtgtctggaacaggtgattggaggagccggagacccaggcacctgggcatccttcccctcgcctctgccaggccccgcgcccctaaaaggtgggaaaaccatggcgaccaatttcagtgacatcgtcaagcaaggctacgtgaagatgaagagcaggaagctcgggatctaccggaggtgctggctggtgttccggaaatcctccagcaaggggccccagcggctggagaagtatccagatgagaagtcggtgtgcctccggggctgccccaaggtgactgagatcagcaacgtcaagtgtgttacgcggctccccaaggagaccaagcggcaggcggtggccatcatattcactgatgactcggcacgtaccttcacctgcgactcagagctagaggcagaggagtggtacaagacactatctgtggagtgtctggggtcccgcctcaacgacatcagtctgggagaacctgacctcctggccccaggggtgcagtgtgaacagacagatcgcttcaatgtcttcctgctgccctgccccaacctggacgtgtatggcgagtgcaagctgcagatcacccacgagaacatctacctctgggacatccacaacccccgtgtgaagctcgtctcgtggcccctctgctcactgcgccgctatggccgggatgccacacgctttaccttcgaggctggccggatgtgtgatgctggggaaggactctataccttccagacacaagagggggagcagatttaccagcgcgtccacagtgccaccctggccatcgcagagcagcacaagcgggtcctgctggaaatggagaagaacgtgaggctgctgaacaagggcacggaacattactcgtatccctgcacacccacgaccatgctgccgcgcagtgcctactggcaccacatcactggttcccagaacatcgccgaagcctccagctatgctggtgaggggtatggggcagcccaggccagctcggaaacagacctcctcaacagattcatcctgctaaagccaaagcccagccagggggacagcagtgaggccaagaccccatcccagtgaccacagtgctggcgagcaccgatgactgctgggggctgcctgctgcggggctggctgcagtgtaccgtggacagcctcagggggctgtcggccaagagcctggagaaagggagcaagctgccccctccttgcccccaaggatgaggctggactgaggcaaagggctggccacaccacctgagcatgtgtgaggggttggagctaccgtgggactatatactgttaatgattttaatatatatggcttatgacatactctgtatcaatgagatcccctcaccctcaccccatccttccccaccaatacacacaaattttttaatcccatgaccaggccacggtcaaggctgtttttgagtatgagtgcagtcgtgtccatcctccatggcacagccctcctgctgccaggacctgcttgaactaccagggccacaggagggggataatcagagcttgaggctggcactctgactgctggcttttcccaaacagcccaagggccggaacagcaggtggcttctcagttcctctgggcctggagtgacacaggaaggatctgcacttcctctgtgctgcttgccagccttgcagttggagttttaagcagaggtgacatctggttgacgcctcaggtgaaaatctggttttaaaatgtaacttctgcacaggctccttcctgctttgtaggctgggaagatgcccctggggtaggggtgctgattacctcagccatgtggaggaaggctggagcttgttcctgccccaggaataggccaggagggaaggccgcagcaggactgccgtggggagcacccctgctgcccccctctcactgaccaggggtggacaatgcccaagcagagggagcccccttgccctgtttggccaccctctggccagccaagtctttggggagggaggcagagctggctggctcagctaagtggcacgatgacgcatgaaggagattatgttgtgctctttattgccaaaaataaacacttttaaaaagacaacttctgttaatcaataaatatcctttcctttctgtactggatctctggttttctccaggctgcctaattaactgctttgtgcatgttcctatctggagacagtgctgaggggttagggccagagccttcattaaggagaaatgaaatactcctcctgtgtatgtgggaggggcccttgctcctgcggctgcttccacccccacccccacccccacccccacccccaccaaactaaatgatcaggtcattggaggtgaaggggttcatgactgctggacagagaatgaaatatcatgtttatttggtggggaggggacagccagggtctaatgctattccaaaaggttacttctcaaattagggacacctgggaatttgaagcgctagcaggccagccctggggcaagaactggaagggtttataggccccctgaataaaggctatggcacttgatcctcaacaccagacatctaaggtacaactgaaaatgactcattttggacagaaagggtttagagtaaa

SEQ ID NO: 459343 - DNA, 1820 bp, Homo sapiens
agggaaggaagaagggcgggaggaaggagggagggaagagggagagaggaggagtgtgggaagaggaaggaaaaaagagagcgagacagcgagaggaagagaaagatgtcactgtctctaatctccctgtcatttttatttccagcaggcgcggggcgaaggagctgctagaacaatgctgaggcgggtgaggtgaggagcagcccctcgcggcagccccgacagagtgtctggaacaggtgattggaggagccggagacccaggcacctgggcatccttcccctcgcctctgccaggccccgcgcccctaaaaggtgggaaaaccatggcgaccaatttcagtgacatcgtcaagcaaggctacgtgaagatgaagagcaggaagctcgggatctaccggaggtgctggctggtgttccggaaatcctccagcaaggggccccagcggctggagaagtatccagatgagaagtcggtgtgcctccggggctgccccaaggtgactgagatcagcaacgtcaagtgtgttacgcggctccccaaggagaccaagcggcaggcggtggccatcatattcactgatgactcggcacgtaccttcacctgcgactcagagctagaggcagaggagtggtacaagacactatctgtggagtgtctggggtcccgcctcaacgacatcagtctgggagaacctgacctcctggccccaggggtgcagtgtgaacagacagatcgcttcaatgtcttcctgctgccctgccccaacctggacgtgtatggcgagtgcaagctgcagatcacccacgagaacatctacctctgggacatccacaacccccgtgtgaagctcgtctcgtggcccctctgctcactgcgccgctatggccgggatgccacacgctttaccttcgaggctggccggatgtgtgatgctggggaaggactctataccttccagacacaagagggggagcagatttaccagcgcgtccacagtgccaccctggccatcgcagagcagcacaagcgggtcctgctggaaatggagaagaacgtgaggctgctgaacaagggcacggaacattactcgtatccctgcacacccacgaccatgctgccgcgcagtgcctactggcaccacatcactggttcccagaacatcgccgaagcctccagctatgctggtgaggggtatggggcagcccaggccagctcggaaacagacctcctcaacagattcatcctgctaaagccaaagcccagccagggggacagcagtgaggccaagaccccatcccagtgaccacagtgctggcgagcaccgatgactgctgggggctgcctgctgcggggctggctgcagtgtaccgtggacagcctcagggggctgtcggccaagagcctggagaaagggagcaagctgccccctccttgcccccaaggatgaggctggactgaggcaaagggctggccacaccacctgagcatgtgtgaggggttggagctaccgtgggactatatactgttaatgattttaatatatatggcttatgacatactctgtatcaatgagatcccctcaccctcaccccatccttccccaccaatacacacaaattttttaatcccatgaccaggccacggtcaaggcattgagataatgcagcgtcatctcatgcagcctcggtgcagacggtgactcaggcagaggggataaggtgggggcttatggcgtcgacgcagggcgcggtttaactggaagggtacctggacaatgttagagtgccgaggtgccctgtgtgtgttgtgccccctc

SEQ ID NO: 459344 - DNA, 2678 bp, Homo sapiens
catacgaagagcaagcatgtgcatgttgtgtcacacaatgcaccacctcattcattgctgtgaatgcttgatcaagtgaggatcacctgcacttctaaactgacacaatcaatgtctgggagaacctgacctcctggccccaggggtgcagtgtgaacagacagatcgcttcaatgtcttcctgctgccctgccccaacctggacgtgtatggcgagtgcaagctgcagatcacccacgagaacatctacctctgggacatccacaacccccgtgtgaagctcgtctcgtggcccctctgctcactgcgccgctatggccgggatgccacacgctttaccttcgaggctggccggatgtgtgatgctggggaaggactctataccttccagacacaagagggggagcagatttaccagcgcgtccacagtgccaccctggccatcgcagagcagcacaagcgggtcctgctggaaatggagaagaacgtgaggctgctgaacaagggcacggaacattactcgtatccctgcacacccacgaccatgctgccgcgcagtgcctactggcaccacatcactggttcccagaacatcgccgaagcctccagctatgctggtgaggggtatggggcagcccaggccagctcggaaacagacctcctcaacagattcatcctgctaaagccaaagcccagccagggggacagcagtgaggccaagaccccatcccagtgaccacagtgctggcgagcaccgatgactgctgggggctgcctgctgcggggctggctgcagtgtaccgtggacagcctcagggggctgtcggccaagagcctggagaaagggagcaagctgccccctccttgcccccaaggatgaggctggactgaggcaaagggctggccacaccacctgagcatgtgtgaggggttggagctaccgtgggactatatactgttaatgattttaatatatatggcttatgacatactctgtatcaatgagatcccctcaccctcaccccatccttccccaccaatacacacaaattttttaatcccatgaccaggccacggtcaaggctgtttttgagtatgagtgcagtcgtgtccatcctccatggcacagccctcctgctgccaggacctgcttgaactaccagggccacaggagggggataatcagagcttgaggctggcactctgactgctggcttttcccaaacagcccaagggccggaacagcaggtggcttctcagttcctctgggcctggagtgacacaggaaggatctgcacttcctctgtgctgcttgccagccttgcagttggagttttaagcagaggtgacatctggttgacgcctcaggtgaaaatctggttttaaaatgtaacttctgcacaggctccttcctgctttgtaggctgggaagatgcccctggggtaggggtgctgattacctcagccatgtggaggaaggctggagcttgttcctgccccaggaataggccaggagggaaggccgcagcaggactgccgtggggagcacccctgctgcccccctctcactgaccaggggtggacaatgcccaagcagagggagcccccttgccctgtttggccaccctctggccagccaaaagcactctgaaaccaagaccttcccatttcctcctccccacatggtgctgaggctccctgctgcaatgcaattaaagcaattgattttctagtgctggtatttgttgactaccatgcagaagggctatctttctattcacgtcaaacttttggttgtgtggggttttttgttgttttttgggttttgttttttaatactttagggtcctgatttgtgggaacagaccttcttgtaaataaccactatttgagttgtggcaggaggatgataaagcacgcggcccctcccaaaggagcccttgagctagggaggtggtgcagtcagcctcgctctcaacgtgacccggggaatgaccacccagagggatgagctagcctgtagaggggaactggggtccaaaggtctttggggagggaggcagagctggctggctcagctaagtggcacgatgacgcatgaaggagattatgttgtgctctttattgccaaaaataaacacttttaaaaagacaacttctgttaatcaataaatatcctttcctttctgtactggatctctggttttctccaggctgcctaattaactgctttgtgcatgttcctatctggagacagtgctgaggggttagggccagagccttcattaaggagaaatgaaatactcctcctgtgtatgtgggaggggcccttgctcctgcggctgcttccacccccacccccacccccacccccacccccaccaaactaaatgatcaggtcattggaggtgaaggggttcatgactgctggacagagaatgaaatatcatgtttatttggtggggaggggacagccagggtctaatgctattccaaaaggttacttctcaaattagggacacctgggaatttgaagcgctagcaggccagccctggggcaagaactggaagggtttataggccccctgaataaaggctatggcacttgatcctcaacaccagacatctaaggtacaactgaaaatgactcattttggacagaaagggtttagagtaaa

SEQ ID NO: 459345 - DNA, 1897 bp, Homo sapiens
agggaaggaagaagggcgggaggaaggagggagggaagagggagagaggaggagtgtgggaagaggaaggaaaaaagagagcgagacagcgagaggaagagaaagatgtcactgtctctaatctccctgtcatttttatttccagcaggcgcggggcgaaggagctgctagaacaatgctgaggcgggtgaggtgaggagcagcccctcgcggcagccccgacagagtgtctggaacaggtgattggaggagccggagacccaggcacctgggcatccttcccctcgcctctgccaggccccgcgcccctaaaaggtgggaaaaccatggcgaccaatttcagtgacatcgtcaagcaaggctacgtgaagatgaagagcaggaagctcgggatctaccggaggtgctggctggtgttccggaaatcctccagcaaggggccccagcggctggagaagtatccagatgagaagtcggtgtgcctccggggctgccccaaggtgactgagatcagcaacgtcaagtgtgttacgcggctccccaaggagaccaagcggcaggcggtggccatcatattcactgatgactcggcacgtaccttcacctgcgactcagagctagaggcagaggagtggtacaagacactatctgtggagtgtctggggtcccgcctcaacgacatcagtctgggagaacctgacctcctggccccaggggtgcagtgtgaacagacagatcgcttcaatgtcttcctgctgccctgccccaacctggacgtgtatggcgagtgcaagctgcagatcacccacgagaacatctacctctgggacatccacaacccccgtgtgaagctcgtctcgtggcccctctgctcactgcgccgctatggccgggatgccacacgctttaccttcgaggctggccggatgtgtgatgctggggaaggactctataccttccagacacaagagggggagcagatttaccagcgcgtccacagtgccaccctggccatcgcagagcagcacaagcgggtcctgctggaaatggagaagaacgtgaggctgctgaacaagggcacggaacattactcgtatccctgcacacccacgaccatgctgccgcgcagtgcctactggcaccacatcactggttcccagaacatcgccgaagcctccagctatgctggtgaggggtatggggcagcccaggccagctcggaaacagacctcctcaacagattcatcctgctaaagccaaaggtctttggggagggaggcagagctggctggctcagctaagtggcacgatgacgcatgaaggagattatgttgtgctctttattgccaaaaataaacacttttaaaaagacaacttctgttaatcaataaatatcctttcctttctgtactggatctctggttttctccaggctgcctaattaactgctttgtgcatgttcctatctggagacagtgctgaggggttagggccagagccttcattaaggagaaatgaaatactcctcctgtgtatgtgggaggggcccttgctcctgcggctgcttccacccccacccccacccccacccccacccccaccaaactaaatgatcaggtcattggaggtgaaggggttcatgactgctggacagagaatgaaatatcatgtttatttggtggggaggggacagccagggtctaatgctattccaaaaggttacttctcaaattagggacacctgggaatttgaagcgctagcaggccagccctggggcaagaactggaagggtttataggccccctgaataaaggctatggcacttgatcctcaacaccagacatctaaggtacaactgaaaatgactcattttggacagaaagggtttagagtaaa

SEQ ID NO: 459346 - DNA, 1642 bp, Homo sapiens
  misc_feature (43)..(43): n is a, c, g, or t
ccggggggggaggaaaaaaccaataggctaggtacgaggctgngtggttgtttttgagtatgagtgcagtcgtgtccatcctccatggcacagccctcctgctgccaggacctgcttgaactaccagggccacaggagggggataatcagagcttgaggctggcactctgactgctggcttttcccaaacagcccaagggccggaacagcaggtggcttctcagttcctctgggcctggagtgacacaggaaggatctgcacttcctctgtgctgcttgccagccttgcagttggagttttaagcagaggtgacatctggttgacgcctcaggtgaaaatctggttttaaaatgtaacttctgcacaggctccttcctgctttgtaggctgggaagatgcccctggggtaggggtgctgattacctcagccatgtggaggaaggctggagcttgttcctgccccaggaataggccaggagggaaggccgcagcaggactgccgtggggagcacccctgctgcccccctctcactgaccaggggtggacaatgcccaagcagagggagcccccttgccctgtttggccaccctctggccagccaaaagcactctgaaaccaagaccttcccatttcctcctccccacatggtgctgaggctccctgctgcaatgcaattaaagcaattgattttctagtgctggtatttgttgactaccatgcagaagggctatctttctattcacgtcaaacttttggttgtgtggggttttttgttgttttttgggttttgttttttaatactttagggtcctgatttgtgggaacagaccttcttgtaaataaccactatttgagttgtggcaggaggatgataaagcacgcggcccctcccaaaggagcccttgagctagggaggtggtgcagtcagcctcgctctcaacgtgacccggggaatgaccacccagagggatgagctagcctgtagaggggaactggggtccaaaggtctttggggagggaggcagagctggctggctcagctaagtggcacgatgacgcatgaaggagattatgttgtgctctttattgccaaaaataaacacttttaaaaagacaacttctgttaatcaataaatatcctttcctttctgtactggatctctggttttctccaggctgcctaattaactgctttgtgcatgttcctatctggagacagtgctgaggggttagggccagagccttcattaaggagaaatgaaatactcctcctgtgtatgtgggaggggcccttgctcctgcggctgcttccacccccacccccacccccacccccacccccaccaaactaaatgatcaggtcattggaggtgaaggggttcatgactgctggacagagaatgaaatatcatgtttatttggtggggaggggacagccagggtctaatgctattccaaaaggttacttctcaaattagggacacctgggaatttgaagcgctagcaggccagccctggggcaagaactggaagggtttataggccccctgaataaaggctatggcacttgatcctcaacaccagacatctaaggtacaactgaaaatgactcattttggacagaaagggtttagagtaaa

SEQ ID NO: 459347 - DNA, 1317 bp, Homo sapiens
  misc_feature (79)..(79): n is a, c, g, or t
gggggggggggggggtttttttgggccccctttttggggaaaaatatttttaaaacccccccctttccccaaaaggggncccccaaaatttgggttggtagaaggggaaaaagggggcgctggagcttgttcctgccccaggaataggccaggagggaaggccgcagcaggactgccgtggggagcacccctgctgcccccctctcactgaccaggggtggacaatgcccaagcagagggagcccccttgccctgtttggccaccctctggccagccaaaagcactctgaaaccaagaccttcccatttcctcctccccacatggtgctgaggctccctgctgcaatgcaattaaagcaattgattttctagtgctggtatttgttgactaccatgcagaagggctatctttctattcacgtcaaacttttggttgtgtggggttttttgttgttttttgggttttgttttttaatactttagggtcctgatttgtgggaacagaccttcttgtaaataaccactatttgagttgtggcaggaggatgataaagcacgcggcccctcccaaaggagcccttgagctagggaggtggtgcagtcagcctcgctctcaacgtgacccggggaatgaccacccagagggatgagctagcctgtagaggggaactggggtccaaaggtctttggggagggaggcagagctggctggctcagctaagtggcacgatgacgcatgaaggagattatgttgtgctctttattgccaaaaataaacacttttaaaaagacaacttctgttaatcaataaatatcctttcctttctgtactggatctctggttttctccaggctgcctaattaactgctttgtgcatgttcctatctggagacagtgctgaggggttagggccagagccttcattaaggagaaatgaaatactcctcctgtgtatgtgggaggggcccttgctcctgcggctgcttccacccccacccccacccccacccccacccccaccaaactaaatgatcaggtcattggaggtgaaggggttcatgactgctggacagagaatgaaatatcatgtttatttggtggggaggggacagccagggtctaatgctattccaaaaggttacttctcaaattagggacacctgggaatttgaagcgctagcaggccagccctggggcaagaactggaagggtttataggccccctgaataaaggctatggcacttgatcctcaacaccagacatctaaggtacaactgaaaatgactcattttggacagaaagggtttagagtaaa

SEQ ID NO: 459348 - DNA, 3207 bp, Homo sapiens
cggagcggagtcccagccggagccccagccggagcccgatccctagccctgcggccgcgcctccctcgccgtccccgcctggagcccggcgccgccgccgccgcaggcgcggggcgaaggagctgctagaacaatgctgaggcgggtgaggtgaggagcagcccctcgcggcagccccgacagagtgtctggaacaggtgattggaggagccggagacccaggcacctgggcatccttcccctcgcctctgccaggccccgcgcccctaaaaggtgggaaaaccatggcgaccaatttcagtgacatcgtcaagcaaggctacgtgaagatgaagagcaggaagctcgggatctaccggaggtgctggctggtgttccggaaatcctccagcaaggggccccagcggctggagaagtatccagatgagaagtcggtgtgcctccggggctgccccaaggtgactgagatcagcaacgtcaagtgtgttacgcggctccccaaggagaccaagcggcaggcggtggccatcatattcactgatgactcggcacgtaccttcacctgcgactcagagctagaggcagaggagtggtacaagacactatctgtggagtgtctggggtcccgcctcaacgacatcagtctgggagaacctgacctcctggccccaggggtgcagtgtgaacagacagatcgcttcaatgtcttcctgctgccctgccccaacctggacgtgtatggcgagtgcaagctgcagatcacccacgagaacatctacctctgggacatccacaacccccgtgtgaagctcgtctcgtggcccctctgctcactgcgccgctatggccgggatgccacacgctttaccttcgaggctggccggatgtgtgatgctggggaaggactctataccttccagacacaagagggggagcagatttaccagcgcgtccacagtgccaccctggccatcgcagagcagcacaagcgggtcctgctggaaatggagaagaacgtgaggctgctgaacaagggcacggaacattactcgtatccctgcacacccacgaccatgctgccgcgcagtgcctactggcaccacatcactggttcccagaacatcgccgaagcctccagctatgctggtgaggggtatggggcagcccaggccagctcggaaacagacctcctcaacagattcatcctgctaaagccaaagcccagccagggggacagcagtgaggccaagaccccatcccagtgaccacagtgctggcgagcaccgatgactgctgggggctgcctgctgcggggctggctgcagtgtaccgtggacagcctcagggggctgtcggccaagagcctggagaaagggagcaagctgccccctccttgcccccaaggatgaggctggactgaggcaaagggctggccacaccacctgagcatgtgtgaggggttggagctaccgtgggactatatactgttaatgattttaatatatatggcttatgacatactctgtatcaatgagatcccctcaccctcaccccatccttccccaccaatacacacaaattttttaatcccatgaccaggccacggtcaaggctgtttttgagtatgagtgcagtcgtgtccatcctccatggcacagccctcctgctgccaggacctgcttgaactaccagggccacaggagggggataatcagagcttgaggctggcactctgactgctggcttttcccaaacagcccaagggccggaacagcaggtggcttctcagttcctctgggcctggagtgacacaggaaggatctgcacttcctctgtgctgcttgccagccttgcagttggagttttaagcagaggtgacatctggttgacgcctcaggtgaaaatctggttttaaaatgtaacttctgcacaggctccttcctgctttgtaggctgggaagatgcccctggggtaggggtgctgattacctcagccatgtggaggaaggctggagcttgttcctgccccaggaataggccaggagggaaggccgcagcaggactgccgtggggagcacccctgctgcccccctctcactgaccaggggtggacaatgcccaagcagagggagcccccttgccctgtttggccaccctctggccagccaaaagcactctgaaaccaagaccttcccatttcctcctccccacatggtgctgaggctccctgctgcaatgcaattaaagcaattgattttctagtgctggtatttgttgactaccatgcagaagggctatctttctattcacgtcaaacttttggttgtgtggggttttttgttgttttttgggttttgttttttaatactttagggtcctgatttgtgggaacagaccttcttgtaaataaccactatttgagttgtggcaggaggatgataaagcacgcggcccctcccaaaggagcccttgagctagggaggtggtgcagtcagcctcgctctcaacgtgacccggggaatgaccacccagagggatgagctagcctgtagaggggaactggggtccaaaggtctttggggagggaggcagagctggctggctcagctaagtggcacgatgacgcatgaaggagattatgttgtgctctttattgccaaaaataaacacttttaaaaagacaacttctgttaatcaataaatatcctttcctttctgtactggatctctggttttctccaggctgcctaattaactgctttgtgcatgttcctatctggagacagtgctgaggggttagggccagagccttcattaaggagaaatgaaatactcctcctgtgtatgtgggaggggcccttgctcctgcggctgcttccacccccacccccacccccacccccacccccaccaaactaaatgatcaggtcattggaggtgaaggggttcatgactgctggacagagaatgaaatatcatgtttatttggtggggaggggacagccagggtctaatgctattccaaaaggttacttctcaaattagggacacctgggaatttgaagcgctagcaggccagccctggggcaagaactggaagggtttataggccccctgaataaaggctatggcacttgatcctcaacaccagacatctaaggtacaactgaaaatgactcattttggacagaaagggtttagagtaaa

SEQ ID NO: 459349 - DNA, 3366 bp, Homo sapiens
agggaaggaagaagggcgggaggaaggagggagggaagagggagagaggaggagtgtgggaagaggaaggaaaaaagagagcgagacagcgagaggaagagaaagatgtcactgtctctaatctccctgtcatttttatttccagcaggcgcggggcgaaggagctgctagaacaatgctgaggcgggtgaggtgaggagcagcccctcgcggcagccccgacagagtgtctggaacaggtgattggaggagccggagacccaggcacctgggcatccttcccctcgcctctgccaggccccgcgcccctaaaaggtgggaaaaccatggcgaccaatttcagtgacatcgtcaagcaaggctacgtgaagatgaagagcaggaagctcgggatctaccggaggtgctggctggtgttccggaaatcctccagcaaggggccccagcggctggagaagtatccagatgagaagtcggtgtgcctccggggctgccccaaggtgactgagatcagcaacgtcaagtgtgttacgcggctccccaaggagaccaagcggcaggcggtggccatcatattcactgatgactcggcacgtaccttcacctgcgactcagagctagaggcagaggagtggtacaagacactatctgtggagtgtctggggtcccgcctcaacgacatcagtctgggagaacctgacctcctggccccaggggtgcagtgtgaacagacagatcgcttcaatgtcttcctgctgccctgccccaacctggacgtgtatggcgagtgcaagctgcagatcacccacgagaacatctacctctgggacatccacaacccccgtgtgaagctcgtctcgtggcccctctgctcactgcgccgctatggccgggatgccacacgctttaccttcgaggctggccggatgtgtgatgctggggaaggactctataccttccagacacaagagggggagcagatttaccagcgcgtccacagtgccaccctggccatcgcagagcagcacaagcgggtcctgctggaaatggagaagaacgtgaggctgctgaacaagggcacggaacattactcgtatccctgcacacccacgaccatgctgccgcgcagtgcctactggcaccacatcactggttcccagaacatcgccgaagcctccagctatgctggtgagtcgcttccatgccccacacccacctgccaggaggctttgtggaggatgaggcctattgggcaggggtcttttgacctagctctgagttctgagcctgcttctgtgcccacaggtgaggggtatggggcagcccaggccagctcggaaacagacctcctcaacagattcatcctgctaaagccaaagcccagccagggggacagcagtgaggccaagaccccatcccagtgaccacagtgctggcgagcaccgatgactgctgggggctgcctgctgcggggctggctgcagtgtaccgtggacagcctcagggggctgtcggccaagagcctggagaaagggagcaagctgccccctccttgcccccaaggatgaggctggactgaggcaaagggctggccacaccacctgagcatgtgtgaggggttggagctaccgtgggactatatactgttaatgattttaatatatatggcttatgacatactctgtatcaatgagatcccctcaccctcaccccatccttccccaccaatacacacaaattttttaatcccatgaccaggccacggtcaaggctgtttttgagtatgagtgcagtcgtgtccatcctccatggcacagccctcctgctgccaggacctgcttgaactaccagggccacaggagggggataatcagagcttgaggctggcactctgactgctggcttttcccaaacagcccaagggccggaacagcaggtggcttctcagttcctctgggcctggagtgacacaggaaggatctgcacttcctctgtgctgcttgccagccttgcagttggagttttaagcagaggtgacatctggttgacgcctcaggtgaaaatctggttttaaaatgtaacttctgcacaggctccttcctgctttgtaggctgggaagatgcccctggggtaggggtgctgattacctcagccatgtggaggaaggctggagcttgttcctgccccaggaataggccaggagggaaggccgcagcaggactgccgtggggagcacccctgctgcccccctctcactgaccaggggtggacaatgcccaagcagagggagcccccttgccctgtttggccaccctctggccagccaaaagcactctgaaaccaagaccttcccatttcctcctccccacatggtgctgaggctccctgctgcaatgcaattaaagcaattgattttctagtgctggtatttgttgactaccatgcagaagggctatctttctattcacgtcaaacttttggttgtgtggggttttttgttgttttttgggttttgttttttaatactttagggtcctgatttgtgggaacagaccttcttgtaaataaccactatttgagttgtggcaggaggatgataaagcacgcggcccctcccaaaggagcccttgagctagggaggtggtgcagtcagcctcgctctcaacgtgacccggggaatgaccacccagagggatgagctagcctgtagaggggaactggggtccaaaggtctttggggagggaggcagagctggctggctcagctaagtggcacgatgacgcatgaaggagattatgttgtgctctttattgccaaaaataaacacttttaaaaagacaacttctgttaatcaataaatatcctttcctttctgtactggatctctggttttctccaggctgcctaattaactgctttgtgcatgttcctatctggagacagtgctgaggggttagggccagagccttcattaaggagaaatgaaatactcctcctgtgtatgtgggaggggcccttgctcctgcggctgcttccacccccacccccacccccacccccacccccaccaaactaaatgatcaggtcattggaggtgaaggggttcatgactgctggacagagaatgaaatatcatgtttatttggtggggaggggacagccagggtctaatgctattccaaaaggttacttctcaaattagggacacctgggaatttgaagcgctagcaggccagccctggggcaagaactggaagggtttataggccccctgaataaaggctatggcacttgatcctcaacaccagacatctaaggtacaactgaaaatgactcattttggacagaaagggtttagagtaaa

SEQ ID NO: 459350 - DNA, 3258 bp, Homo sapiens
attttaaaatgcaagctggccaggcacaatggctcacacctgtaatctcagcactttgggaggctgaggcaggagggtggtttgagcccaggagtttgagaccagcctgggcaacatagtgagacactgtctctacaaaaaataaaaaaaattgcaggcgcggggcgaaggagctgctagaacaatgctgaggcgggtgaggtgaggagcagcccctcgcggcagccccgacagagtgtctggaacaggtgattggaggagccggagacccaggcacctgggcatccttcccctcgcctctgccaggccccgcgcccctaaaaggtgggaaaaccatggcgaccaatttcagtgacatcgtcaagcaaggctacgtgaagatgaagagcaggaagctcgggatctaccggaggtgctggctggtgttccggaaatcctccagcaaggggccccagcggctggagaagtatccagatgagaagtcggtgtgcctccggggctgccccaaggtgactgagatcagcaacgtcaagtgtgttacgcggctccccaaggagaccaagcggcaggcggtggccatcatattcactgatgactcggcacgtaccttcacctgcgactcagagctagaggcagaggagtggtacaagacactatctgtggagtgtctggggtcccgcctcaacgacatcagtctgggagaacctgacctcctggccccaggggtgcagtgtgaacagacagatcgcttcaatgtcttcctgctgccctgccccaacctggacgtgtatggcgagtgcaagctgcagatcacccacgagaacatctacctctgggacatccacaacccccgtgtgaagctcgtctcgtggcccctctgctcactgcgccgctatggccgggatgccacacgctttaccttcgaggctggccggatgtgtgatgctggggaaggactctataccttccagacacaagagggggagcagatttaccagcgcgtccacagtgccaccctggccatcgcagagcagcacaagcgggtcctgctggaaatggagaagaacgtgaggctgctgaacaagggcacggaacattactcgtatccctgcacacccacgaccatgctgccgcgcagtgcctactggcaccacatcactggttcccagaacatcgccgaagcctccagctatgctggtgaggggtatggggcagcccaggccagctcggaaacagacctcctcaacagattcatcctgctaaagccaaagcccagccagggggacagcagtgaggccaagaccccatcccagtgaccacagtgctggcgagcaccgatgactgctgggggctgcctgctgcggggctggctgcagtgtaccgtggacagcctcagggggctgtcggccaagagcctggagaaagggagcaagctgccccctccttgcccccaaggatgaggctggactgaggcaaagggctggccacaccacctgagcatgtgtgaggggttggagctaccgtgggactatatactgttaatgattttaatatatatggcttatgacatactctgtatcaatgagatcccctcaccctcaccccatccttccccaccaatacacacaaattttttaatcccatgaccaggccacggtcaaggctgtttttgagtatgagtgcagtcgtgtccatcctccatggcacagccctcctgctgccaggacctgcttgaactaccagggccacaggagggggataatcagagcttgaggctggcactctgactgctggcttttcccaaacagcccaagggccggaacagcaggtggcttctcagttcctctgggcctggagtgacacaggaaggatctgcacttcctctgtgctgcttgccagccttgcagttggagttttaagcagaggtgacatctggttgacgcctcaggtgaaaatctggttttaaaatgtaacttctgcacaggctccttcctgctttgtaggctgggaagatgcccctggggtaggggtgctgattacctcagccatgtggaggaaggctggagcttgttcctgccccaggaataggccaggagggaaggccgcagcaggactgccgtggggagcacccctgctgcccccctctcactgaccaggggtggacaatgcccaagcagagggagcccccttgccctgtttggccaccctctggccagccaaaagcactctgaaaccaagaccttcccatttcctcctccccacatggtgctgaggctccctgctgcaatgcaattaaagcaattgattttctagtgctggtatttgttgactaccatgcagaagggctatctttctattcacgtcaaacttttggttgtgtggggttttttgttgttttttgggttttgttttttaatactttagggtcctgatttgtgggaacagaccttcttgtaaataaccactatttgagttgtggcaggaggatgataaagcacgcggcccctcccaaaggagcccttgagctagggaggtggtgcagtcagcctcgctctcaacgtgacccggggaatgaccacccagagggatgagctagcctgtagaggggaactggggtccaaaggtctttggggagggaggcagagctggctggctcagctaagtggcacgatgacgcatgaaggagattatgttgtgctctttattgccaaaaataaacacttttaaaaagacaacttctgttaatcaataaatatcctttcctttctgtactggatctctggttttctccaggctgcctaattaactgctttgtgcatgttcctatctggagacagtgctgaggggttagggccagagccttcattaaggagaaatgaaatactcctcctgtgtatgtgggaggggcccttgctcctgcggctgcttccacccccacccccacccccacccccacccccaccaaactaaatgatcaggtcattggaggtgaaggggttcatgactgctggacagagaatgaaatatcatgtttatttggtggggaggggacagccagggtctaatgctattccaaaaggttacttctcaaattagggacacctgggaatttgaagcgctagcaggccagccctggggcaagaactggaagggtttataggccccctgaataaaggctatggcacttgatcctcaacaccagacatctaaggtacaactgaaaatgactcattttggacagaaagggtttagagtaaa

SEQ ID NO: 459351 - DNA, 3368 bp, Homo sapiens
agggaaggaagaagggcgggaggaaggagggagggaagagggagagaggaggagtgtgggaagaggaaggaaaaaagagagcgagacagcgagaggaagagaaagatgtcactgtctctaatctccctgtcatttttatttccagcaggcgcggggcgaaggagctgctagaacaatgctgaggcgggtgaggtgaggagcagcccctcgcggcagccccgacagagtgtctggaacaggtgattggaggagccggagacccaggcacctgggcatccttcccctcgcctctgccaggccccgcgcccctaaaaggtgggaaaaccatggcgaccaatttcagtgacatcgtcaagcaaggctacgtgaagatgaagagcaggaagctcgggacccccaactggtgaagaccccctagaagacaggagcagaggggatcaacttcatgatctcggcgaggctgtctgagagctgcctctattcctctgccaggcccccctgccaaagacagatctaccggaggtgctggctggtgttccggaaatcctccagcaaggggccccagcggctggagaagtatccagatgagaagtcggtgtgcctccggggctgccccaaggtgactgagatcagcaacgtcaagtgtgttacgcggctccccaaggagaccaagcggcaggcggtggccatcatattcactgatgactcggcacgtaccttcacctgcgactcagagctagaggcagaggagtggtacaagacactatctgtggagtgtctggggtcccgcctcaacgacatcagtctgggagaacctgacctcctggccccaggggtgcagtgtgaacagacagatcgcttcaatgtcttcctgctgccctgccccaacctggacgtgtatggcgagtgcaagctgcagatcacccacgagaacatctacctctgggacatccacaacccccgtgtgaagctcgtctcgtggcccctctgctcactgcgccgctatggccgggatgccacacgctttaccttcgaggctggccggatgtgtgatgctggggaaggactctataccttccagacacaagagggggagcagatttaccagcgcgtccacagtgccaccctggccatcgcagagcagcacaagcgggtcctgctggaaatggagaagaacgtgaggctgctgaacaagggcacggaacattactcgtatccctgcacacccacgaccatgctgccgcgcagtgcctactggcaccacatcactggttcccagaacatcgccgaagcctccagctatgctggtgaggggtatggggcagcccaggccagctcggaaacagacctcctcaacagattcatcctgctaaagccaaagcccagccagggggacagcagtgaggccaagaccccatcccagtgaccacagtgctggcgagcaccgatgactgctgggggctgcctgctgcggggctggctgcagtgtaccgtggacagcctcagggggctgtcggccaagagcctggagaaagggagcaagctgccccctccttgcccccaaggatgaggctggactgaggcaaagggctggccacaccacctgagcatgtgtgaggggttggagctaccgtgggactatatactgttaatgattttaatatatatggcttatgacatactctgtatcaatgagatcccctcaccctcaccccatccttccccaccaatacacacaaattttttaatcccatgaccaggccacggtcaaggctgtttttgagtatgagtgcagtcgtgtccatcctccatggcacagccctcctgctgccaggacctgcttgaactaccagggccacaggagggggataatcagagcttgaggctggcactctgactgctggcttttcccaaacagcccaagggccggaacagcaggtggcttctcagttcctctgggcctggagtgacacaggaaggatctgcacttcctctgtgctgcttgccagccttgcagttggagttttaagcagaggtgacatctggttgacgcctcaggtgaaaatctggttttaaaatgtaacttctgcacaggctccttcctgctttgtaggctgggaagatgcccctggggtaggggtgctgattacctcagccatgtggaggaaggctggagcttgttcctgccccaggaataggccaggagggaaggccgcagcaggactgccgtggggagcacccctgctgcccccctctcactgaccaggggtggacaatgcccaagcagagggagcccccttgccctgtttggccaccctctggccagccaaaagcactctgaaaccaagaccttcccatttcctcctccccacatggtgctgaggctccctgctgcaatgcaattaaagcaattgattttctagtgctggtatttgttgactaccatgcagaagggctatctttctattcacgtcaaacttttggttgtgtggggttttttgttgttttttgggttttgttttttaatactttagggtcctgatttgtgggaacagaccttcttgtaaataaccactatttgagttgtggcaggaggatgataaagcacgcggcccctcccaaaggagcccttgagctagggaggtggtgcagtcagcctcgctctcaacgtgacccggggaatgaccacccagagggatgagctagcctgtagaggggaactggggtccaaaggtctttggggagggaggcagagctggctggctcagctaagtggcacgatgacgcatgaaggagattatgttgtgctctttattgccaaaaataaacacttttaaaaagacaacttctgttaatcaataaatatcctttcctttctgtactggatctctggttttctccaggctgcctaattaactgctttgtgcatgttcctatctggagacagtgctgaggggttagggccagagccttcattaaggagaaatgaaatactcctcctgtgtatgtgggaggggcccttgctcctgcggctgcttccacccccacccccacccccacccccacccccaccaaactaaatgatcaggtcattggaggtgaaggggttcatgactgctggacagagaatgaaatatcatgtttatttggtggggaggggacagccagggtctaatgctattccaaaaggttacttctcaaattagggacacctgggaatttgaagcgctagcaggccagccctggggcaagaactggaagggtttataggccccctgaataaaggctatggcacttgatcctcaacaccagacatctaaggtacaactgaaaatgactcattttggacagaaagggtttagagtaaa

SEQ ID NO: 459352 - DNA, 3134 bp, Homo sapiens
agggaaggaagaagggcgggaggaaggagggagggaagagggagagaggaggagtgtgggaagaggaaggaaaaaagagagcgagacagcgagaggaagagaaagatgtcactgtctctaatctccctgtcatttttatttccagcaggcgcggggcgaaggagctgctagaacaatgctgaggcgggtgaggtgaggagcagcccctcgcggcagccccgacagagtgtctggaacaggtgattggaggagccggagacccaggcacctgggcatccttcccctcgcctctgccaggccccgcgcccctaaaaggtgggaaaaccatggcgaccaatttcagtgacatcgtcaagcaaggctacgtgaagatgaagagcaggaagctcgggatctaccggaggtgctggctggtgttccggaaatcctccagcaaggggccccagcggctggagaagtatccagatgagaagtcggtgtgcctccggggctgccccaagagctagaggcagaggagtggtacaagacactatctgtggagtgtctggggtcccgcctcaacgacatcagtctgggagaacctgacctcctggccccaggggtgcagtgtgaacagacagatcgcttcaatgtcttcctgctgccctgccccaacctggacgtgtatggcgagtgcaagctgcagatcacccacgagaacatctacctctgggacatccacaacccccgtgtgaagctcgtctcgtggcccctctgctcactgcgccgctatggccgggatgccacacgctttaccttcgaggctggccggatgtgtgatgctggggaaggactctataccttccagacacaagagggggagcagatttaccagcgcgtccacagtgccaccctggccatcgcagagcagcacaagcgggtcctgctggaaatggagaagaacgtgaggctgctgaacaagggcacggaacattactcgtatccctgcacacccacgaccatgctgccgcgcagtgcctactggcaccacatcactggttcccagaacatcgccgaagcctccagctatgctggtgaggggtatggggcagcccaggccagctcggaaacagacctcctcaacagattcatcctgctaaagccaaagcccagccagggggacagcagtgaggccaagaccccatcccagtgaccacagtgctggcgagcaccgatgactgctgggggctgcctgctgcggggctggctgcagtgtaccgtggacagcctcagggggctgtcggccaagagcctggagaaagggagcaagctgccccctccttgcccccaaggatgaggctggactgaggcaaagggctggccacaccacctgagcatgtgtgaggggttggagctaccgtgggactatatactgttaatgattttaatatatatggcttatgacatactctgtatcaatgagatcccctcaccctcaccccatccttccccaccaatacacacaaattttttaatcccatgaccaggccacggtcaaggctgtttttgagtatgagtgcagtcgtgtccatcctccatggcacagccctcctgctgccaggacctgcttgaactaccagggccacaggagggggataatcagagcttgaggctggcactctgactgctggcttttcccaaacagcccaagggccggaacagcaggtggcttctcagttcctctgggcctggagtgacacaggaaggatctgcacttcctctgtgctgcttgccagccttgcagttggagttttaagcagaggtgacatctggttgacgcctcaggtgaaaatctggttttaaaatgtaacttctgcacaggctccttcctgctttgtaggctgggaagatgcccctggggtaggggtgctgattacctcagccatgtggaggaaggctggagcttgttcctgccccaggaataggccaggagggaaggccgcagcaggactgccgtggggagcacccctgctgcccccctctcactgaccaggggtggacaatgcccaagcagagggagcccccttgccctgtttggccaccctctggccagccaaaagcactctgaaaccaagaccttcccatttcctcctccccacatggtgctgaggctccctgctgcaatgcaattaaagcaattgattttctagtgctggtatttgttgactaccatgcagaagggctatctttctattcacgtcaaacttttggttgtgtggggttttttgttgttttttgggttttgttttttaatactttagggtcctgatttgtgggaacagaccttcttgtaaataaccactatttgagttgtggcaggaggatgataaagcacgcggcccctcccaaaggagcccttgagctagggaggtggtgcagtcagcctcgctctcaacgtgacccggggaatgaccacccagagggatgagctagcctgtagaggggaactggggtccaaaggtctttggggagggaggcagagctggctggctcagctaagtggcacgatgacgcatgaaggagattatgttgtgctctttattgccaaaaataaacacttttaaaaagacaacttctgttaatcaataaatatcctttcctttctgtactggatctctggttttctccaggctgcctaattaactgctttgtgcatgttcctatctggagacagtgctgaggggttagggccagagccttcattaaggagaaatgaaatactcctcctgtgtatgtgggaggggcccttgctcctgcggctgcttccacccccacccccacccccacccccacccccaccaaactaaatgatcaggtcattggaggtgaaggggttcatgactgctggacagagaatgaaatatcatgtttatttggtggggaggggacagccagggtctaatgctattccaaaaggttacttctcaaattagggacacctgggaatttgaagcgctagcaggccagccctggggcaagaactggaagggtttataggccccctgaataaaggctatggcacttgatcctcaacaccagacatctaaggtacaactgaaaatgactcattttggacagaaagggtttagagtaaa

SEQ ID NO: 459353 - DNA, 2544 bp, Homo sapiens
actctacatgctttttattacaagactactgaccatacgaggaaaattcatcatctggtaactacacctaaagcacaagtatttggaaaaaaaaaaaggataaacagattcattaaattatatgattaaatcactgacccaatagaaaatttatataataaagccagaaaaaaagttgtaaaatatagtttacaataattattcacattcaaggctgtacatcaatacatacaacaacgtggccccgaacatgaattcaattcaaataattcatatattagaatttaaataacacagactgaactagaggccaacaatagccagcaaataaccttatataagaataaaaatacaaaagtgtatatcctagtatcattgcatttgttttcataagttcttttaatttttgctttgtctgtacatcacagttacagctacagaccaggtagagaatattacgcatgttctgcttgccacccacctgaaagacgtactagtcatttatcctattttatgttgtgaaggaacagctacagcagctctaaatactgtaacaatttaattttgccaacatccaacttacttacagtcgtaatagaggcttttaccagcacaatgacccctattcgtagtcattctgccaggtggttaggctatgtgggttacacagcttaaaaaaggtctgccttttgtaaaaagttctctgtacatagtttggtgtttcttcatatggaagaaatgagttacggggaaaattcaggtacacacgtaggctcgttcagttgctcaccacagccatctcaacagatgaaagtgctctttgttggaaacagcttcctcctcacaccagttctccacaggcagcctcatctacaaccctgcaattttgggccagaagtggtggcccctcagaggctctgaagtgcctccagccccgattcaggcacttgccacgtgtgctgcgtaagaagggacccccacccagtgagtcaacataggctcatgtcaagtttgaaaataactggggaaaagtgtatgacaacatcttccagaacaaagtaccttcaccgtattctcacagcagctgcgatctctgaagtctcagcagtgaccaccccgggtctgtcaaccagccaggcaagggggggccctcaggcttcagagggcaagaaaccaaattccgtgcaatttggccataatctctggtagagtgaagcagcactgaacacggtgcctagaaaaacctcctgcacgttcccctgcacaatcaatggaccccaactacagtggagaaatgaagaatccaaccaaatttgggtggtctggacttgctgccagccaggcaatctgcaacactgtgggcagggagttggggggggcggcctgaaatctacaccagctgggacaaccacgccctacaatgaaaaagccagcctggctgctgggctcttgtgaaccactaagacctgaaggtgggggggtggaagggggagacaaatgcactcttgtaaaacccaatcagctacgtggtttttttcaaagaggctttgctctgctactgattccaaatgtcctaatataccttctgagtctataaacttaattacaaatcactcactaagcatgtggcaaggtcagttcaacacttgttatctctgctgactgtgcagatgcaaattcagtaccattgtggacacgaagtacaagattctgccaagcgcttgaaagccacggcagcagggagggcagagagctgacatgcaggcagagccaggttcttgcaaccaaaacaaggaaattggctcttggaaaaaatcggccacagatggattgcagtagtgacatcctcttagcatttaaataaagagcggtcttattcagacattctttggaacacatggcttatcagaaaccgatttgttcagaatctgtaagacacaactaaggtggttctgctactggaagtgagcgtctacacatcaggtcgagagagagacagaaatatcttcaaaatgaacaaactctttcacctcaaaataccacttccaggcatctaagggggaaaaaagtaagaaatcagaagattttaaagatattcatcacagcattatttaaatagtggaaaaatcagaaaccgtcttaagtattttacagtagggaaatggtcagataaattatagtaaatggacaatgactaaatagtacaattgttaaaaacatgtttctgagaaactcatgacatgggaaaatgcttaaaatatcaagggagaagacgatgcaaacggtgtgtgtcggatgttcctattttagtttaaaaagtgaacaaatggcagggcaggatatacggcaaaatgctcacagtggtcttctctggccggtgagcctacagctgatcttgtcagagacaaacgttagttttactgagtcacccagagccctgtgctggtgcctgagggtttgttccatgggacagtctccacaattcctctggggaagggccacaaatcccacagtgtgtcccaagagggctggagtaggcggagt

SEQ ID NO: 459354 - DNA, 882 bp, Homo sapiens
actctacatgctttttattacaagactactgaccatacgaggaaaattcatcatctggtaactacacctaaagcacaagtatttggaaaaaaaaaaaggataaacagattcattaaattatatgattaaatcactgacccaatagaaaatttatataataaagccagaaaaaaagttgtaaaatatagtttacaataattattcacattcaaggctgtacatcaatacatacaacaacgtggccccgaacatgaattcaattcaaataattcatatattagaatttaaataacacagactgaactagaggccaacaatagccagcaaataaccttatataagaataaaaatacaaaagtgtatatcctagtatcattgcatttgttttcataagttcttttaatttttgctttgtctgtacatcacagttacagctacagaccaggtagagaatattacgcatgttctgcttgccacccacctgaaagacgtactagtcatttatcctattttatgttgtgaaggaacagctacagcagctctaaatactgtaacaatttaattttgccaacatccaacttacttacagtcgtaatagaggcttttaccagcacaatgacccctattcgtagtcattctgccaggtggttaggctatgtgggttacacagcttaaaaaaggtctgccttttgtaaaaagttctctgtacatagtttggtgtttcttcatatggaagaaatgagttacggggaaaattcaggtacacacgtaggctcgttcagttgctcaccacagccatctcaacagatgaaagtgctctttgttggaaacagcttcctcctcacaccagttctccacatctcctggggatactctagagtg

SEQ ID NO: 459355 - DNA, 391 bp, Homo sapiens
gcggccgcctactactactactaaattcgcggcccgtcgaccgcctccacacaagcacttgcacacatgtggactcctaaccatgctaacctcactggctgggaaggtggggaccccatgggccagcccttgcaggaggcccttttgcaaggcttagggtgtggccagccctgaaagctacttggacacaggtttcagctggccccagcccagaagtgacccccagaaagggagggccaccgctttgccccctgcttttacccttccttctgggtgctctacacctcaggttaccaggcctgaggcatctcagccaagcttgtttcctgctctgaggcttgtggggtgggagccagagtggaggtcggtgaaataaagtgatgcaattaga

SEQ ID NO: 459356 - DNA, 649 bp, Homo sapiens
gtcccggcgccagcggccgcgtcggcgcggatgtccccgcccgcctctggttcgggcctcagcgagattactggaggattagatccggatcccgtccccgggcagcggccgccgcggccagcgccgccccgcgagttgcgagctccgggctggccctgctctgacaggctcgccccgccccacacgacacgcctgccactcctgcccccaggtatgcgccgggagctcaggacggtcccgtcccctaagggcgcctcctccttcagcccccggatagggcgggaggaaagggggccgccccgaggctctcaagatgcagagctgcaaagccctgggcctgcgccctcgccctcctcggcaagtctccaacggctccccactgcaggcctcagcccctcggggaggtcctccctgacgcctcagctccacttgtactgaagttattggccaatgtctgtctgcccacactgaactccaggaggctgtgagctccacttcctgcaaggttctgcccggggccgtgccgagcccggacagtgcctagaatgggaatgaatgcatggacaagagcacgtgtgacggtttaagcgtgccactgcgtgtgcagtctatcagtggatatgattgtgtatgtgacagtgtgagatgg

SEQ ID NO: 459357 - DNA, 2247 bp, Homo sapiens
gtcccggcgccagcggccgcgtcggcgcggatgtccccgcccgcctctggttcgggcctcagcgagattactggaggattagatccggatcccgtccccgggcagcggccgccgcggccagcgccgccccgcgagttgcgagctccgggctggccctgctctgacaggctcgccccgccccacacgacacgcctgccactcctgcccccaggtcgctgaagagttcgaaaccgtgctcagcaccgcgtttggggcatgtgagaccgagaggctttgggaaactgacgccgctgtgagaacgagtttagcggagtctatggacgctgcgagcttgtggccacaagagggcgccccggagcacggcccagtccccgcccccgctggatggggcccggcctcttcccagcgttcctcctccggccccaggtcaccgccagcacgcgcctgcttcccgtctgcgcgagtccacgcagctccccagatcaagaagctgaggccccaggttacacactaaagtaaatggcagaggcagaaataacacctatgtcctcctgaccccaaggcatgttcttaaagttctggaaacctcctggaggcttccttgctgctcctctgggactgccaccctgggcagggtgttctgtggcccctcatcatcgtggttttgaaccacaggcccttcaccagcacagcagcagcaggcatggcagcaagcgtggagcagcgcgagggcaccatccaggtgcagggccaggccctcttcttccgagaggccctgcccggcagtgggcaggctcgcttctctgtactgctgctgcatggtattcgcttctcctccgagacctggcagaacctgggtacactgcacaggctggcccaggctggctaccgggctgtggccattgacctgccaggtctggggcactccaaggaagcagcagcccctgcccctattggggagctggcccctggcagcttcctggcggctgtggtggatgccttggagctgggccccccggttgtgatcagtccatcactgagtggcatgtactccctgcccttcctcacggcccctggctcccagctcccgggctttgtgccagtggcccccatctgcactgacaaaatcaatgctgccaactatgccagtgtgaagactccagctctgattgtatatggagaccaggaccccatgggtcagaccagctttgagcacctgaagcagctgcccaaccaccgggtgctgatcatgaagggggcggggcacccctgttacctggacaaaccagaggagtggcatacagggctgctggacttcctgcaggggctccagtgaagcccagcactgctgcagggggtgggctgcctgcctgctctgagctctctcttgcacgctctctcttctctcccaggctctggctcatgcacatgcaacaggtgcgtctgtctatatgtctgggttcttgtcttttgtggtctgtttgtcttttctacctctttctcttgcagtgatagactgagggggtaaaatcaagagaaaaaactctcaggaatcaaggaacataatcctgtggagggtaatccattacatgagcttctcctgttcttccactttcctgcctggctttcactccttcccctgctctgcccagcctttccctcccacccactcctccttctgcaaatgccctgaaggccagcccttaccccaacacccacttccccacctccttaggccccagatacatacatgcccacatgcacgcttacatgtttagagccatccttgtttccaaatatgacccttcgcttgagggcaactgcataggtacatctaactctggactggcatgcacattgtcatgtgcagctttgcatatacacacatgcatacatgagcctccacacaagcacttgcacacatgtggactcctaaccatgctaacctcactggctgggaaggtggggaccccatgggccagcccttgcaggaggcccttttgcaaggcttagggtgtggccagccctgaaagctacttggacacaggtttcagctggccccagcccagaagtgacccccagaaagggagggccaccgctttgccccctgcttttacccttccttctgggtgctctacacctcaggttaccaggcctgaggcatctcagccaagcttgtttcctgctctgaggcttgtggggtgggagccagagtggaggtcggtgaaataaagtgatgcaattaga

SEQ ID NO: 459358 - DNA, 1640 bp, Homo sapiens
ggtacggtccgagttttgggatagcacgcgcctgcttcccgtctgcgcgagtccacgcagctccccaggcccttcaccagcacagcagcagcaggcatggcagcaagcgtggagcagcgcgagggcaccatccaggtgcagggccaggccctcttcttccgagaggccctgcccggcagtgggcaggctcgcttctctgtactgctgctgcatggtattcgcttctcctccgagacctggcagaacctgggtacactgcacaggctggcccaggctggctaccgggctgtggccattgacctgccaggtctggggcactccaaggaagcagcagcccctgcccctattggggagctggcccctggcagcttcctggcggctgtggtggatgccttggagctgggccccccggttgtgatcagtccatcactgagtggcatgtactccctgcccttcctcacggcccctggctcccagctcccgggctttgtgccagtggcccccatctgcactgacaaaatcaatgctgccaactatgccagtgtgaagactccagctctgattgtatatggagaccaggaccccatgggtcagaccagctttgagcacctgaagcagctgcccaaccaccgggtgctgatcatgaagggggcggggcacccctgttacctggacaaaccagaggagtggcatacagggctgctggacttcctgcaggggctccagtgaagcccagcactgctgcagggggtgggctgcctgcctgctctgagctctctcttgcacgctctctcttctctcccaggctctggctcatgcacatgcaacaggtgcgtctgtctatatgtctgggttcttgtcttttgtggtctgtttgtcttttctacctctttctcttgcagtgatagactgagggggtaaaatcaagagaaaaaactctcaggaatcaaggaacataatcctgtggagggtaatccattacatgagcttctcctgttcttccactttcctgcctggctttcactccttcccctgctctgcccagcctttccctcccacccactcctccttctgcaaatgccctgaaggccagcccttaccccaacacccacttccccacctccttaggccccagatacatacatgcccacatgcacgcttacatgtttagagccatccttgtttccaaatatgacccttcgcttgagggcaactgcataggtacatctaactctggactggcatgcacattgtcatgtgcagctttgcatatacacacatgcatacatgagcctccacacaagcacttgcacacatgtggactcctaaccatgctaacctcactggctgggaaggtggggaccccatgggccagcccttgcaggaggcccttttgcaaggcttagggtgtggccagccctgaaagctacttggacacaggtttcagctggccccagcccagaagtgacccccagaaagggagggccaccgctttgccccctgcttttacccttccttctgggtgctctacacctcaggttaccaggcctgaggcatctcagccaagcttgtttcctgctctgaggcttgtggggtgggagccagagtggaggtcggtgaaataaagtgatgcaattaga

SEQ ID NO: 459359 - DNA, 1645 bp, Homo sapiens
agactatgtataagtgcgatactgggtgtaatttcagtgacgagggcgtggtctctcattgttaccaaggtgcgttcatcgagcagcagtatgcagcaggcatggcagcaagcgtggagcagcgcgagggcaccatccaggtgcagggccaggccctcttcttccgagaggccctgcccggcagtgggcaggctcgcttctctgtactgctgctgcatggtattcgcttctcctccgagacctggcagaacctgggtacactgcacaggctggcccaggctggctaccgggctgtggccattgacctgccaggtctggggcactccaaggaagcagcagcccctgcccctattggggagctggcccctggcagcttcctggcggctgtggtggatgccttggagctgggccccccggttgtgatcagtccatcactgagtggcatgtactccctgcccttcctcacggcccctggctcccagctcccgggctttgtgccagtggcccccatctgcactgacaaaatcaatgctgccaactatgccagtgtgaagactccagctctgattgtatatggagaccaggaccccatgggtcagaccagctttgagcacctgaagcagctgcccaaccaccgggtgctgatcatgaagggggcggggcacccctgttacctggacaaaccagaggagtggcatacagggctgctggacttcctgcaggggctccagtgaagcccagcactgctgcagggggtgggctgcctgcctgctctgagctctctcttgcacgctctctcttctctcccaggctctggctcatgcacatgcaacaggtgcgtctgtctatatgtctgggttcttgtcttttgtggtctgtttgtcttttctacctctttctcttgcagtgatagactgagggggtaaaatcaagagaaaaaactctcaggaatcaaggaacataatcctgtggagggtaatccattacatgagcttctcctgttcttccactttcctgcctggctttcactccttcccctgctctgcccagcctttccctcccacccactcctccttctgcaaatgccctgaaggccagcccttaccccaacacccacttccccacctccttaggccccagatacatacatgcccacatgcacgcttacatgtttagagccatccttgtttccaaatatgacccttcgcttgagggcaactgcataggtacatctaactctggactggcatgcacattgtcatgtgcagctttgcatatacacacatgcatacatgagcctccacacaagcacttgcacacatgtggactcctaaccatgctaacctcactggctgggaaggtggggaccccatgggccagcccttgcaggaggcccttttgcaaggcttagggtgtggccagccctgaaagctacttggacacaggtttcagctggccccagcccagaagtgacccccagaaagggagggccaccgctttgccccctgcttttacccttccttctgggtgctctacacctcaggttaccaggcctgaggcatctcagccaagcttgtttcctgctctgaggcttgtggggtgggagccagagtggaggtcggtgaaataaagtgatgcaattaga

SEQ ID NO: 459360 - DNA, 1420 bp, Homo sapiens
ggacgcgtgggtcgacccacgcgtcgcggacgcgtgggtccagcacgcgcctgcttcccgtctgcgcgagtccacgcagctccccaggtctggggcactccaaggaagcagcagcccctgcccctattggggagctggcccctggcagcttcctggcggctgtggtggatgccttggagctgggccccccggttgtgatcagtccatcactgagtggcatgtactccctgcccttcctcacggcccctggctcccagctcccgggctttgtgccagtggcccccatctgcactgacaaaatcaatgctgccaactatgccagtgtgaagactccagctctgattgtatatggagaccaggaccccatgggtcagaccagctttgagcacctgaagcagctgcccaaccaccgggtgctgatcatgaagggggcggggcacccctgttacctggacaaaccagaggagtggcatacagggctgctggacttcctgcaggggctccagtgaagcccagcactgctgcagggggtgggctgcctgcctgctctgagctctctcttgcacgctctctcttctctcccaggctctggctcatgcacatgcaacaggtgcgtctgtctatatgtctgggttcttgtcttttgtggtctgtttgtcttttctacctctttctcttgcagtgatagactgagggggtaaaatcaagagaaaaaactctcaggaatcaaggaacataatcctgtggagggtaatccattacatgagcttctcctgttcttccactttcctgcctggctttcactccttcccctgctctgcccagcctttccctcccacccactcctccttctgcaaatgccctgaaggccagcccttaccccaacacccacttccccacctccttaggccccagatacatacatgcccacatgcacgcttacatgtttagagccatccttgtttccaaatatgacccttcgcttgagggcaactgcataggtacatctaactctggactggcatgcacattgtcatgtgcagctttgcatatacacacatgcatacatgagcctccacacaagcacttgcacacatgtggactcctaaccatgctaacctcactggctgggaaggtggggaccccatgggccagcccttgcaggaggcccttttgcaaggcttagggtgtggccagccctgaaagctacttggacacaggtttcagctggccccagcccagaagtgacccccagaaagggagggccaccgctttgccccctgcttttacccttccttctgggtgctctacacctcaggttaccaggcctgaggcatctcagccaagcttgtttcctgctctgaggcttgtggggtgggagccagagtggaggtcggtgaaataaagtgatgcaattaga

SEQ ID NO: 459361 - DNA, 1651 bp, Homo sapiens
gtcccggcgccagcggccgcgtcggcgcggatgtccccgcccgcctctggttcgggcctcagcgagattactggaggattagatccggatcccgtccccgggcagcggccgccgcggccagcgccgccccgcgagttgcgagctccgggctggccctgctctgacaggctcgccccgccccacacgacacgcctgccactcctgcccccaggtcgctgaagagttcgaaaccgtgctcagcaccgcgtttggggcatgtgagaccgagaggctttgggaaactgacgccgctgtgagaacgagtttagcggagtctatggacgctgcgagcttgtggccacaagagggcgccccggagcacggcccagtccccgcccccgctggatggggcccggcctcttcccagcgttcctcctccggccccaggtcaccgccagcacgcgcctgcttcccgtctgcgcgagtccacgcagctccccaggcccttcaccagcacagcagcagcaggcatggcagcaagcgtggagcagcgcgagggcaccatccaggtgcagggccaggccctcttcttccgagaggccctgcccggcagtgggcaggctcgcttctctgtactgctgctgcatggtattcgcttctcctccgagacctggcagaacctgggtacactgcacaggctggcccaggctggctaccgggctgtggccattgacctgccaggtctggggcactccaaggaagcagcagcccctgcccctattggggagctggcccctggcagcttcctggcggctgtggtggatgccttggagctgggccccccggttgtgatcagtccatcactgagtggcatgtactccctgcccttcctcacggcccctggctcccagctcccgggctttgtgccagtggcccccatctgcactgacaaaatcaatgctgccaactatgccagtgtgaagactccagctctgattgtatatggagaccaggaccccatgggtcagaccagctttgagcacctgaagcagctgcccaaccaccgggtgctgatcatgaagggggcggggcacccctgttacctggacaaaccagaggagtggcatacagggctgctggacttcctgcaggggctccagtgaagcccagcactgctgcagggggtgggctgcctgcctgctctgagctctctcttgcacgctctctcttctctcccaggctctggctcatgcacatgcaacaggtgcgtctgtctatatgtctgggttcttgtcttttgtggtctgtttgtcttttctacctctttctcttgcagtgatagactgagggggtaaaatcaagagaaaaaactctcaggaatcaaggaacataatcctgtggagggtaatccattacatgagcttctcctgttcttccactttcctgcctggctttcactccttcccctgctctgcccagcctttccctcccacccactcctccttctgcaaatgccctgaaggccagcccttaccccaacacccacttccccacctccttaggccccagatacatacatgcccacatgcacgcttacatgtttagaccacccagtctcgacgattgtgacccgtcgctcgaggccaagcgttagtaggaccagcagatctga

SEQ ID NO: 459362 - DNA, 1621 bp, Homo sapiens
  misc_feature (93)..(93): n is a, c, g, or t
  misc_feature (105)..(105): n is a, c, g, or t
  misc_feature (232)..(232): n is a, c, g, or t
  misc_feature (245)..(245): n is a, c, g, or t
  misc_feature (294)..(296): n is a, c, g, or t
  misc_feature (306)..(306): n is a, c, g, or t
  misc_feature (366)..(366): n is a, c, g, or t
  misc_feature (444)..(444): n is a, c, g, or t
  misc_feature (465)..(466): n is a, c, g, or t
cccaccacccccctccttcccctctcccccactccacccacctccccacccccttcaccaccacaccaccaccacccatcccaccaaccctcnagcaccccaccnccaccatccacctccacccccaccccctcttcttcccacaccccctcccccccactccccaccctcccttctctttactcctcctccatcctattcccttctcctcccacacctcccacaacctccntacactccacacnctcccccaccctccctacccccctttccccattcacctcccacctctcnnncactccaacnaaccaccaccccctccccctattccccacctcccccctcccaccttcctcccccctctcntccatcccttccacctcccccccccccttttcatcactccatcactcactcccatctactccctccccttcctcaccncccctcgctcccacctccccnnctttctcccactcgcccccatctccactcacaaaatcaatcctgccaactatcccactctcaacactccagctctgattgtatatggagaccaggaccccatgggtcagaccagctttgagcacctgaagcagctgcccaaccaccgggtgctgatcatgaagggggcggggcacccctgttacctggacaaaccagaggagtggcatacagggctgctggacttcctgcaggggctccagtgaagcccagcactgctgcagggggtgggctgcctgcctgctctgagctctctcttgcacgctctctcttctctcccaggctctggctcatgcacatgcaacaggtgcgtctgtctatatgtctgggttcttgtcttttgtggtctgtttgtcttttctacctctttctcttgcagtgatagactgagggggtaaaatcaagagaaaaaactctcaggaatcaaggaacataatcctgtggagggtaatccattacatgagcttctcctgttcttccactttcctgcctggctttcactccttcccctgctctgcccagcctttccctcccacccactcctccttctgcaaatgccctgaaggccagcccttaccccaacacccacttccccacctccttaggccccagatacatacatgcccacatgcacgcttacatgtttagagccatccttgtttccaaatatgacccttcgcttgagggcaactgcataggtacatctaactctggactggcatgcacattgtcatgtgcagctttgcatatacacacatgcatacatgagcctccacacaagcacttgcacacatgtggactcctaaccatgctaacctcactggctgggaaggtggggaccccatgggccagcccttgcaggaggcccttttgcaaggcttagggtgtggccagccctgaaagctacttggacacaggtttcagctggccccagcccagaagtgacccccagaaagggagggccaccgctttgccccctgcttttacccttccttctgggtgctctacacctcaggttaccaggcctgaggcatctcagccaagcttgtttcctgctctgaggcttgtggggtgggagccagagtggaggtcggtgaaataaagtgatgcaattaga

SEQ ID NO: 459363 - DNA, 1695 bp, Homo sapiens
gtcccggcgccagcggccgcgtcggcgcggatgtccccgcccgcctctggttcgggcctcagcgagattactggaggattagatccggatcccgtccccgggcagcggccgccgcggccagcgccgccccgcgagttgcgagctccgggctggccctgctctgacaggctcgccccgccccacacgacacgcctgccactcctgcccccaggtcgctgaagagttcgaaaccgtgctcagcaccgcgtttggggcatgtgagaccgagaggctttgggaaactgacgccgctgtgagaacgagtttagcggagtctatggacgctgcgagcttgtggccacaagagggcgccccggagcacggcccagtccccgcccccgctggatggggcccggcctcttcccagcgttcctcctccggccccaggtcaccgccagcacgcgcctgcttcccgtctgcgcgagtccacgcagctccccaggcccttcaccagcacagcagcagcaggcatggcagcaagcgtggagcagcgcgagggcaccatccaggtgcagggccaggccctcttcttccgagaggccctgcccggcagtgggcaggctcgcttctctgtactgctgctgcatggtattcgcttctcctccgagacctggcagaacctgggtacactgcacaggctggcccaggctggctaccgggctgtggccattgacctgccaggtctggggcactccaaggaagcagcagcccctgcccctattggggagctggcccctggcagcttcctggcggctgtggtggatgccttggagctgggccccccggttgtgatcagtccatcactgagtggcatgtactccctgcccttcctcacggcccctggctcccagctcccgggctttgtgccagtggcccccatctgcactgacaaaatcaatgctgccaactatgccagtgtgaagactccagctctgattgtatatggagaccaggaccccatgggtcagaccagctttgagcacctgaagcagctgcccaaccaccgggtgctgatcatgaagggggcggggcacccctgttacctggacaaaccagaggagtggcatacagggctgctggacttcctgcaggggctccagtgaagcccagcactgctgcagggggtgggctgcctgcctgctctgagctctctcttgcacgctctctcttctctcccaggctctggctcatgcacatgcaacaggtgcgtctgtctatatgtctgggttcttgtcttttgtggtctgtttgtcttttctacctctttctcttgcagtgatagactgagggggtaaaatcaagagaaaaaactctcaggaatcaaggaacataatcctgtggagggtaatccattacatgagcttctcctgttcttccactttcctgcctggctttcactccttccccttttgcaaggcttagggtgtggccagccctgaaagctacttggacacaggtttcagctggccccagcccagaagtgacccccagaaagggagggccaccgctttgccccctgcttttacccttccttctgggtgctctacacctcaggttaccaggcctgaggcatctcagccaagcttgtttcctgctctgaggcttgtggggtgggagccagagtggaggtcggtgaaataaagtgatgcaattaga

SEQ ID NO: 459364 - DNA, 1039 bp, Homo sapiens
ggccatagccgattcctgagggaaaacccgcgccgggggcatgcagaacactggggcacccctgttacctggacaaaccagaggagtggcatacagggctgctggacttcctgcaggggctccagtgaagcccagcactgctgcagggggtgggctgcctgcctgctctgagctctctcttgcacgctctctcttctctcccaggctctggctcatgcacatgcaacaggtgcgtctgtctatatgtctgggttcttgtcttttgtggtctgtttgtcttttctacctctttctcttgcagtgatagactgagggggtaaaatcaagagaaaaaactctcaggaatcaaggaacataatcctgtggagggtaatccattacatgagcttctcctgttcttccactttcctgcctggctttcactccttcccctgctctgcccagcctttccctcccacccactcctccttctgcaaatgccctgaaggccagcccttaccccaacacccacttccccacctccttaggccccagatacatacatgcccacatgcacgcttacatgtttagagccatccttgtttccaaatatgacccttcgcttgagggcaactgcataggtacatctaactctggactggcatgcacattgtcatgtgcagctttgcatatacacacatgcatacatgagcctccacacaagcacttgcacacatgtggactcctaaccatgctaacctcactggctgggaaggtggggaccccatgggccagcccttgcaggaggcccttttgcaaggcttagggtgtggccagccctgaaagctacttggacacaggtttcagctggccccagcccagaagtgacccccagaaagggagggccaccgctttgccccctgcttttacccttccttctgggtgctctacacctcaggttaccaggcctgaggcatctcagccaagcttgtttcctgctctgaggcttgtggggtgggagccagagtggaggtcggtgaaataaagtgatgcaattaga

SEQ ID NO: 459365 - DNA, 919 bp, Homo sapiens
tgtgcgttgtgtgtgtgacaagccctcacggtgctatgcaggagcggatgagctctctcttgcacgctctctcttctctcccaggctctggctcatgcacatgcaacaggtgcgtctgtctatatgtctgggttcttgtcttttgtggtctgtttgtcttttctacctctttctcttgcagtgatagactgagggggtaaaatcaagagaaaaaactctcaggaatcaaggaacataatcctgtggagggtaatccattacatgagcttctcctgttcttccactttcctgcctggctttcactccttcccctgctctgcccagcctttccctcccacccactcctccttctgcaaatgccctgaaggccagcccttaccccaacacccacttccccacctccttaggccccagatacatacatgcccacatgcacgcttacatgtttagagccatccttgtttccaaatatgacccttcgcttgagggcaactgcataggtacatctaactctggactggcatgcacattgtcatgtgcagctttgcatatacacacatgcatacatgagcctccacacaagcacttgcacacatgtggactcctaaccatgctaacctcactggctgggaaggtggggaccccatgggccagcccttgcaggaggcccttttgcaaggcttagggtgtggccagccctgaaagctacttggacacaggtttcagctggccccagcccagaagtgacccccagaaagggagggccaccgctttgccccctgcttttacccttccttctgggtgctctacacctcaggttaccaggcctgaggcatctcagccaagcttgtttcctgctctgaggcttgtggggtgggagccagagtggaggtcggtgaaataaagtgatgcaattaga

SEQ ID NO: 459366 - DNA, 398 bp, Homo sapiens
tgtgaccgagtctcactctgtcacccaggctggagcacagtggcacgatctcggctcactgcaacctctgcctcccgggttcaagcgattctcctgctgagtagctgggactacaggcacgtgccaccacacctggctaatttttttttctttttagtagagacggggttccaccatgttggccagggtggtcttgaactcctgacctcaggtgatccacccgcctcggcctcccaaagtgctgggattacaggcgtgagccaccatgcctggccgataatttttcttaaacttttaattaaattgctaattcttgaagttggctttattgttcccatatttcagatcaagaagctgaggccccaggttacacactaaagtaaatggcagaggcagaa

SEQ ID NO: 459367 - DNA, 2053 bp, Homo sapiens
gtcccggcgccagcggccgcgtcggcgcggatgtccccgcccgcctctggttcgggcctcagcgagattactggaggattagatccggatcccgtccccgggcagcggccgccgcggccagcgccgccccgcgagttgcgagctccgggctggccctgctctgacaggctcgccccgccccacacgacacgcctgccactcctgcccccaggtcgctgaagagttcgaaaccgtgctcagcaccgcgtttggggcatgtgagaccgagaggctttgggaaactgacgccgctgtgagaacgagtttagcggagtctatggacgctgcgagcttgtggccacaagagggcgccccggagcacggcccagtccccgcccccgctggatggggcccggcctcttcccagcgttcctcctccggccccaggtcaccgccagcacgcgcctgcttcccgtctgcgcgagtccacgcagctccccaggcccttcaccagcacagcagcagcaggcatggcagcaagcgtggagcagcgcgagggcaccatccaggtgcagggccaggccctcttcttccgagaggccctgcccggcagtgggcaggctcgcttctctgtactgctgctgcatggtattcgcttctcctccgagacctggcagaacctgggtacactgcacaggctggcccaggctggctaccgggctgtggccattgacctgccaggtctggggcactccaaggaagcagcagcccctgcccctattggggagctggcccctggcagcttcctggcggctgtggtggatgccttggagctgggccccccggttgtgatcagtccatcactgagtggcatgtactccctgcccttcctcacggcccctggctcccagctcccgggctttgtgccagtggcccccatctgcactgacaaaatcaatgctgccaactatgccagtgtgaagactccagctctgattgtatatggagaccaggaccccatgggtcagaccagctttgagcacctgaagcagctgcccaaccaccgggtgctgatcatgaagggggcggggcacccctgttacctggacaaaccagaggagtggcatacagggctgctggacttcctgcaggggctccagtgaagcccagcactgctgcagggggtgggctgcctgcctgctctgagctctctcttgcacgctctctcttctctcccaggctctggctcatgcacatgcaacaggtgcgtctgtctatatgtctgggttcttgtcttttgtggtctgtttgtcttttctacctctttctcttgcagtgatagactgagggggtaaaatcaagagaaaaaactctcaggaatcaaggaacataatcctgtggagggtaatccattacatgagcttctcctgttcttccactttcctgcctggctttcactccttcccctgctctgcccagcctttccctcccacccactcctccttctgcaaatgccctgaaggccagcccttaccccaacacccacttccccacctccttaggccccagatacatacatgcccacatgcacgcttacatgtttagagccatccttgtttccaaatatgacccttcgcttgagggcaactgcataggtacatctaactctggactggcatgcacattgtcatgtgcagctttgcatatacacacatgcatacatgagcctccacacaagcacttgcacacatgtggactcctaaccatgctaacctcactggctgggaaggtggggaccccatgggccagcccttgcaggaggcccttttgcaaggcttagggtgtggccagccctgaaagctacttggacacaggtttcagctggccccagcccagaagtgacccccagaaagggagggccaccgctttgccccctgcttttacccttccttctgggtgctctacacctcaggttaccaggcctgaggcatctcagccaagcttgtttcctgctctgaggcttgtggggtgggagccagagtggaggtcggtgaaataaagtgatgcaattaga

SEQ ID NO: 459368 - DNA, 2085 bp, Homo sapiens
gtcccggcgccagcggccgcgtcggcgcggatgtccccgcccgcctctggttcgggcctcagcgagattactggaggattagatccggatcccgtccccgggcagcggccgccgcggccagcgccgccccgcgagttgcgagctccgggctggccctgctctgacaggctcgccccgccccacacgacacgcctgccactcctgcccccaggtcgctgaagagttcgaaaccgtgctcagcaccgcgtttggggcatgtgagaccgagaggctttgggaaactgacgccgctgtgagaacgagtttagcggagtctatggacgctgcgagcttgtggccacaagagggcgccccggagcacggcccagtccccgcccccgctggatggggcccggcctcttcccagcgttcctcctccggccccaggtcaccgccagcacgcgcctgcttcccgtctgcgcgagtccacgcagctccccaggcccttcaccagcacagcagcagcaggcatggcagcaagcgtggagcagcgcgagggcaccatccaggtgcagggccaggccctcttcttccgagaggccctgcccggcagtgggcaggctcgcttctctgtactgctgctgcatggtattcgcttctcctccgagacctggcagaacctgggtacactgcacaggctggcccaggctggctaccgggctgtggccattgacctgccaggtctggggcactccaaggaagcagcagcccctgcccctattggggagctggcccctggcagcttcctggcggctgtggtggatgccttggagctgggccccccggttgtgatcagtccatcactgagtggcatgtactccctgcccttcctcacggcccctggctcccagctcccgggctttgtgccagtggcccccatctgcactgacaaaatcaatgctgccaactatgccagtgtgaagactccagctctgattgtatatggagaccaggaccccatgggtcagaccagctttgagcacctgaagcagctgcccaaccaccgggtgctgatcatgaagggggcggggcacccctgttacctggacaaaccagaggagtggcatacagggctgctggacttcctgcaggggctccagtgaagcccagcactgctgcagggggtgggctgcctgcctgctctgagctctctcttgcacgctctctcttctctcccaggctctggctcatgcacatgcaacaggtgcgtctgtctatatgtctgggttcttgtcttttgtggtctgtttgtcttttctacctctttctcttgcagtgatagactgagggggtaaaatcaagagaaaaaactctcaggaatcaaggaacataatcctgtggagggtaatccattacatgagcttctcctgttcttccactttcctgcctggctttcactccttcccctgctctgcccagcctttccctcccacccactcctccttctgcaaatgccctgaaggccagcccttaccccaacacccacttccccacctccttaggccccagatacatacatgcccacatgcacgcttacatgtttagagccatccttgtttccaaatatgacccttcgcttgagggcaactgcataggtacatctaactctggactggcatgcacattgtcatgtgcagctttgcatatacacacatgcatacatgagcctccacacaagcacttgcacacatgtggactcctaaccatgctaacctcactggctgggaaggtggggaccccatgggccagcccttgcaggaggcccttttgcaaggcttagggtgtggccagccctgaaagctacttggacacaggtttcagctggccccagcccagaagtgacccccagaaagggagggccaccgctttgccccctgcttttacccttccttctgggtgctctacacctcaggttaccaggcctgaggcatctcagccaagcttgtttcctgctctgaggcttgtggggtgggagccagagtggaggtcggtgaaataaagtgatgcaattagaaaaaaaaaaaaaagggggcggcctaaaatacc

SEQ ID NO: 459369 - DNA, 1999 bp, Homo sapiens
gtcccggcgccagcggccgcgtcggcgcggatgtccccgcccgcctctggttcgggcctcagcgagattactggaggattagatccggatcccgtccccgggcagcggccgccgcggccagcgccgccccgcgagttgcgagctccgggctggccctgctctgacaggctcgccccgccccacacgacacgcctgccactcctgcccccaggtcgctgaagagttcgaaaccgtgctcagcaccgcgtttggggcatgtgagaccgagaggctttgggaaactgacgccgctgtgagaacgagtttagcggagtctatggacgctgcgagcttgtggccacaagagggcgccccggagcacggcccagtccccgcccccgctggatggggcccggcctcttcccagcgttcctcctccggccccaggtcaccgccagcacgcgcctgcttcccgtctgcgcgagtccacgcagctccccaggcccttcaccagcacagcagcagcaggcatggcagcaagcgtggagcagcgcgagggcaccatccaggtgcagggccaggccctcttcttccgagaggccctgcccggcagtgggcaggctcgcttctctgtactgctgctgcatggtattcgcttctcctccgagacctggcagaacctgggtacactgcacaggctggcccaggctggctaccgggctgtggccattgacctgccaggtctggggcactccaaggaagcagcagcccctgcccctattggggagctggcccctggcagcttcctggcggctgtggtggatgccttggagctgggccccccggttgtgatcagtccatcactgagtggcatgtactccctgcccttcctcacggcccctggctcccagctcccgggctttgtgccagtggcccccatctgcactgacaaaatcaatgctgccaactatgccagtgtgaagactccagctctgattgtatatggagaccaggaccccatgggtcagaccagctttgagcacctgaagcagctgcccaaccaccgggtgctgatcatgaagggggcggggcacccctgttacctggacaaaccagaggagtggcatacagggctgctggacttcctgcaggggctccagtgaagcccagcactgctgcagggggtgggctgcctgcctgctctgagctctctcttgcacgctctctcttctctcccaggctctggctcatgcacatgcaacaggtgcgtctgtctatatgtctgggttcttgtcttttgtggtctgtttgtcttttctacctctttctcttgcagtgatagactgagggggtaaaatcaagagaaacttctcctgttcttccactttcctgcctggctttcactccttcccctgctctgcccagcctttccctcccacccactcctccttctgcaaatgccctgaaggccagcccttaccccaacacccacttccccacctccttaggccccagatacatacatgcccacatgcacgcttacatgtttagagccatccttgtttccaaatatgacccttcgcttgagggcaactgcataggtacatctaactctggactggcatgcacattgtcatgtgcagctttgcatatacacacatgcatacatgagcctccacacaagcacttgcacacatgtggactcctaaccatgctaacctcactggctgggaaggtggggaccccatgggccagcccttgcaggaggcccttttgcaaggcttagggtgtggccagccctgaaagctacttggacacaggtttcagctggccccagcccagaagtgacccccagaaagggagggccaccgctttgccccctgcttttacccttccttctgggtgctctacacctcaggttaccaggcctgaggcatctcagccaagcttgtttcctgctctgaggcttgtggggtgggagccagagtggaggtcggtgaaataaagtgatgcaattaga

SEQ ID NO: 459370 - DNA, 1374 bp, Homo sapiens
ggtacggtccgagttttgggatagcacgcgcctgcttcccgtctgcgcgagtccacgcagctccccagcccctgcccctattggggagctggcccctggcagcttcctggcggctgtggtggatgccttggagctgggccccccggttgtgatcagtccatcactgagtggcatgtactccctgcccttcctcacggcccctggctcccagctcccgggctttgtgccagtggcccccatctgcactgacaaaatcaatgctgccaactatgccagtgtgaagactccagctctgattgtatatggagaccaggaccccatgggtcagaccagctttgagcacctgaagcagctgcccaaccaccgggtgctgatcatgaagggggcggggcacccctgttacctggacaaaccagaggagtggcatacagggctgctggacttcctgcaggggctccagtgaagcccagcactgctgcagggggtgggctgcctgcctgctctgagctctctcttgcacgctctctcttctctcccaggctctggctcatgcacatgcaacaggtgcgtctgtctatatgtctgggttcttgtcttttgtggtctgtttgtcttttctacctctttctcttgcagtgatagactgagggggtaaaatcaagagaaaaaactctcaggaatcaaggaacataatcctgtggagggtaatccattacatgagcttctcctgttcttccactttcctgcctggctttcactccttcccctgctctgcccagcctttccctcccacccactcctccttctgcaaatgccctgaaggccagcccttaccccaacacccacttccccacctccttaggccccagatacatacatgcccacatgcacgcttacatgtttagagccatccttgtttccaaatatgacccttcgcttgagggcaactgcataggtacatctaactctggactggcatgcacattgtcatgtgcagctttgcatatacacacatgcatacatgagcctccacacaagcacttgcacacatgtggactcctaaccatgctaacctcactggctgggaaggtggggaccccatgggccagcccttgcaggaggcccttttgcaaggcttagggtgtggccagccctgaaagctacttggacacaggtttcagctggccccagcccagaagtgacccccagaaagggagggccaccgctttgccccctgcttttacccttccttctgggtgctctacacctcaggttaccaggcctgaggcatctcagccaagcttgtttcctgctctgaggcttgtggggtgggagccagagtggaggtcggtgaaataaagtgatgcaattaga

SEQ ID NO: 459371 - DNA, 1595 bp, Homo sapiens
  misc_feature (1574)..(1574): n is a, c, g, or t
gtcccggcgccagcggccgcgtcggcgcggatgtccccgcccgcctctggttcgggcctcagcgagattactggaggattagatccggatcccgtccccgggcagcggccgccgcggccagcgccgccccgcgagttgcgagctccgggctggccctgctctgacaggctcgccccgccccacacgacacgcctgccactcctgcccccaggtcgctgaagagttcgaaaccgtgctcagcaccgcgtttggggcatgtgagaccgagaggctttgggaaactgacgccgctgtgagaacgagtttagcggagtctatggacgctgcgagcttgtggccacaagagggcgccccggagcacggcccagtccccgcccccgctggatggggcccggcctcttcccagcgttcctcctccggccccaggtcaccgccagcacgcgcctgcttcccgtctgcgcgagtccacgcagctccccaggcccttcaccagcacagcagcagcaggcatggcagcaagcgtggagcagcgcgagggcaccatccaggtgcagggccaggccctcttcttccgagaggccctgcccggcagtgggcaggctcgcttctctgtactgctgctgcatggtattcgcttctcctccgagacctggcagaacctgggtacactgcacaggctggcccaggctggctaccgggctgtggccattgacctgccaggtctggggcactccaaggaagcagcagcccctgcccctattggggagctggcccctggcagcttcctggcggctgtggtggatgccttggagctgggccccccggttgtgatcagtccatcactgagtggcatgtactccctgcccttcctcacggcccctggctcccagctcccgggctttgtgccagtggcccccatctgcactgacaaaatcaatgctgccaactatgccagtgtgaagactccagctctgattgtatatggagaccaggaccccatgggtcagaccagctttgagcacctgaagcagctgcccaaccaccgggtgctgatcatgaagggggcggggcacccctgttacctggacaaaccagaggagtggcatacagggctgctggacttcctgcaggggctccagtgaagcccagcactgctgcagggggtgggctgcctgcctgctctgagctctctcttgcacgctctctcttctctcccaggctctggctcatgcacatgcaacaggtgcgtctgtctatatgtctgggttcttgtcttttgtggtctgtttgtcttttctacctctttctcttgcagtgatagactgagggggtaaaatcaagagaaaaaactctcaggaatcaaggaacataatcctgtggagggtaatccattacatgagcttctcctgttcttccactttcctgcctggctttcactccttcccctgctctgcccagcctttccctcccacccactcctccttctgcaaatgccctgaaggccagcccttaccccaacacccacttccccacctccttaggccccagatacatacatgcccacatcatcaccnggggatccttagataccagca

SEQ ID NO: 459372 - DNA, 1999 bp, Homo sapiens
gtcccggcgccagcggccgcgtcggcgcggatgtccccgcccgcctctggttcgggcctcagcgagattactggaggattagatccggatcccgtccccgggcagcggccgccgcggccagcgccgccccgcgagttgcgagctccgggctggccctgctctgacaggctcgccccgccccacacgacacgcctgccactcctgcccccaggtcgctgaagagttcgaaaccgtgctcagcaccgcgtttggggcatgtgagaccgagaggctttgggaaactgacgccgctgtgagaacgagtttagcggagtctatggacgctgcgagcttgtggccacaagagggcgccccggagcacggcccagtccccgcccccgctggatggggcccggcctcttcccagcgttcctcctccggccccaggtcaccgccagcacgcgcctgcttcccgtctgcgcgagtccacgcagctccccaggcccttcaccagcacagcagcagcaggcatggcagcaagcgtggagcagcgcgagggcaccatccaggtgcagggccaggccctcttcttccgagaggccctgcccggcagtgggcaggctcgcttctctgtactgctgctgcatggtattcgcttctcctccgagacctggcagaacctgggtacactgcacaggctggcccaggctggctaccgggctgtggccattgacctgccaggtctggggcactccaaggaagcagcagcccctgcccctattggggagctggcccctggcagcttcctggcggctgtggtggatgccttggagctgggccccccggttgtgatcagtccatcactgagtggcatgtactccctgcccttcctcacggcccctggctcccagctcccgggctttgtgccagtggcccccatctgcactgacggagaccaggaccccatgggtcagaccagctttgagcacctgaagcagctgcccaaccaccgggtgctgatcatgaagggggcggggcacccctgttacctggacaaaccagaggagtggcatacagggctgctggacttcctgcaggggctccagtgaagcccagcactgctgcagggggtgggctgcctgcctgctctgagctctctcttgcacgctctctcttctctcccaggctctggctcatgcacatgcaacaggtgcgtctgtctatatgtctgggttcttgtcttttgtggtctgtttgtcttttctacctctttctcttgcagtgatagactgagggggtaaaatcaagagaaaaaactctcaggaatcaaggaacataatcctgtggagggtaatccattacatgagcttctcctgttcttccactttcctgcctggctttcactccttcccctgctctgcccagcctttccctcccacccactcctccttctgcaaatgccctgaaggccagcccttaccccaacacccacttccccacctccttaggccccagatacatacatgcccacatgcacgcttacatgtttagagccatccttgtttccaaatatgacccttcgcttgagggcaactgcataggtacatctaactctggactggcatgcacattgtcatgtgcagctttgcatatacacacatgcatacatgagcctccacacaagcacttgcacacatgtggactcctaaccatgctaacctcactggctgggaaggtggggaccccatgggccagcccttgcaggaggcccttttgcaaggcttagggtgtggccagccctgaaagctacttggacacaggtttcagctggccccagcccagaagtgacccccagaaagggagggccaccgctttgccccctgcttttacccttccttctgggtgctctacacctcaggttaccaggcctgaggcatctcagccaagcttgtttcctgctctgaggcttgtggggtgggagccagagtggaggtcggtgaaataaagtgatgcaattaga

SEQ ID NO: 459373 - DNA, 207 bp, Homo sapiens
ctccagcctggacaacaagagctaaaactctgtctcagaaaaaaaaaaagccgagacgcatccagagctttcgtgaccggggactgttctgaagcaggcctcgtggatgacgtatccgacctgtcagccgctgagatgctgacacttcacaattggctttcattctatgagaagaattatgtgtgtgttggtaagtcgtccataggt

SEQ ID NO: 459374 - DNA, 1887 bp, Homo sapiens
ctcggccatcttagctgtagatagaggcggcaacctcggaagtgcggagcgggtgggcctatatagatgttgaggtgcggaggccgtgggcttttgttgggcctggctgtagccgcagcagcggtaatggcagcacggcttatgggctggtggggtccccgcgctggctttcgccttttcataccggaggagctgtctcgctaccgcggcggcccaggggacccgggcctgtacttggcgttgctcggccgtgtctacgatgtgtcctccggccggaggcactacgagcctgggtcccactatagcggcttcgcaggccgagacgcatccagagctttcgtgaccggggactgttctgaagcaggcctcgtggatgacgtatccgacctgtcagccgctgagatgctgacacttcacaattggctttcattctatgagaagaattatgtgtgtgttgggagggtgacaggacggttctacggagaggatgggctgcccaccccggcactgacccaggtagaagctgcgatcaccagaggcttggaggccaacaaactacagctgcaagagaagcagacattcccgccgtgcaacgcggagtggagctcagccaggggcagccggctctggtgctcccagaagagtggaggtgtgagcagagactggattggcgtccccaggaagctgtataagccaggtgctaaggagccccgctgcgtgtgtgtgagaaccaccggcccccctagtggccagatgccggacaaccctccacacagaaatcgtggggacctggaccacccaaacttggcagagtacacaggctgcccaccgctagccatcacatgctcctttccactctaagccgtagcctcttctgttaataacacacagagagctctgccaagcacctgagtaggcccttgacacttgtgtgccctgggatgcctcctggcgcgaatcaggaggttctggaaggactctggctatattctgcaaatgtggctcatgccccttaccgtggctcggcgttgtggtgcctgagggacagccggccacctgcccagtactggtcagcttttcaacactattccctttgacctactggccatcttcctcacagccctcagatatcaacgggcacaaataagaccaactcaatttccacttgaatttacaaccaaaagcctgctgagttgattacagctgggccaatacagtacgaggcaataacaaattagtgtgggttgattctggaattggaaaagcttttgcttgtatggatacagcaaatccagatgtctctgaacaaagcaacaatttaaagcaacgacattttctgtcctttaagcacttaaaatcaggtgtggtgtgttttcaaaggcagaagtctgcattttgagcaaaaggtggcttcccagctctaacaaggtaactggttagcatgacattaaagcttgggcaaggcttcaaacttaaggtggctgggcttgctgcttgtccagtggtttgtatgtccagcgtcatctggcaatgtcatacctgttacctcttgactacttgtgaaggtagatgggggcaaggagtgttcctacttcagacagagaagtgggaccagcactaccacagacagcgccacggcctctgtgcatcgcctcatcagagcttccacccagctccctttgccgctcagtctcaccctcaacatccaccagcttcctccctctctgtcactgtctcctttttctccatcattcatttcactaaatcgctttccagattcacagactagaaaatggaggctgcctccccttcactggcagacccgtactcactgcccctgtccccttcactggcagacccgtgctcactgcccctgtcccctcactg

SEQ ID NO: 459375 - DNA, 1257 bp, Homo sapiens
acaacctgcaagccaagaagtacgagaagggccaggcgcggtggctcacgcctgtaatcccagcactttgggaggccgagacgggtggatcacctgaggccgagacgcatccagagctttcgtgaccggggactgttctgaagcaggcctcgtggatgacgtatccgacctgtcagccgctgagatgctgacacttcacaattggctttcattctatgagaagaattatgtgtgtgttgggagggtgacaggacggttctacggagaggatgggctgcccaccccggcactgacccaggtagaagctgcgatcaccagaggcttggaggccaacaaactacagctgcaagagaagcagacattcccgccgtgcaacgcggagtggagctcagccaggggcagccggctctggtgctcccagaagagtggaggtgtgagcagagactggattggcgtccccaggaagctgtataagccaggtgctaaggagccccgctgcgtgtgtgtgagaaccaccggcccccctagtggccagatgccggacaaccctccacacagaaatcgtggggacctggaccacccaaacttggcagagtacacaggctgcccaccgctagccatcacatgctcctttccactctaagccgtagcctcttctgttaataacacacagagagctctgccaagcacctgagtaggcccttgacacttgtgtgccctgggatgcctcctggcgcgaatcaggaggttctggaaggactctggctatattctgcaaatgtggctcatgccccttaccgtggctcggcgttgtggtgcctgagggacagccggccacctgcccagtactggtcagcttttcaacactattccctttgacctactggccatcttcctcacagccctcagatatcaacgggcacaaataagaccaactcaatttccacttgaatttacaaccaaaagcctgctgagttgattacagctgggccaatacagtacgaggcaataacaaattagtgtgggttgattctggaattggaaaagcttttgcttgtatggatacagcaaatccagatgtctctgaacaaagcaacaatttaaagcaacgacattttctgtcctttaagcacttaaaatcaggtgtggtgtgttttcaaaggcagaagtctgcattttgagcaaaaggtggcttcccagctctaacaaggtaactggttagcatgacattaaagcttgggcaaggcttcaaactta

SEQ ID NO: 459376 - DNA, 1871 bp, Homo sapiens
gaatagggatgagccgcccagaaggagatggatgggcacctgcttcccccactcttagtcttgggagaggattactaagctgcttgctttggcctcagtttcgccatagccagtggttgcttgcaccatccttgaacaaccagctccagaagggcagcttccctgtctcactgtgttcgatgcatctggcttcagcacacagccagaagggcttgaagcctgaatttgtgtttcgacaaatccccttttatttggtcctctaggaggagacaaacttcgtgagtgagctgtctcccaggtggtagttatgctaatcaaaccactgtgtaggttactgcacttgctacttactgatgctacataagggacttgcttctcaaatgagacaacaccaaactgtgtcctaaagcagtgttaaagactctaaacactaggcccggcgcagtggctcacgactgtaataccagcactttgggaggctgaggcggttggatcacttgaggtcaggagttcaagaccagcctggccaacatggtgaaaccctgtctctactaaaaaatacaaaaattacctgggcgtggtggcacgcacctgtactcccagctactcaggaggctgaggcaggagaatcgcttcagcccgggagatggaggttgcagtgacctgagattgcgctactgcactccagcctcaacgaaagacactaaacactagattgcttcacaagtactgacaactgggatggccgtagccctttcttctatctatctgcagcccccacgtctcactggagtcctacttggacatgactgacttcctgaggaacaccagtatcacttcaccatcgaaacagggagggtgacaggacggttctacggagaggatgggctgcccaccccggcactgacccaggtagaagctgcgatcaccagaggcttggaggccaacaaactacagctgcaagagaagcagacattcccgccgtgcaacgcggagtggagctcagccaggggcagccggctctggtgctcccagaagagtggaggtgtgagcagagactggattggcgtccccaggaagctgtataagccaggtgctaaggagccccgctgcgtgtgtgtgagaaccaccggcccccctagtggccagatgccggacaaccctccacacagaaatcgtggggacctggaccacccaaacttggcagagtacacaggctgcccaccgctagccatcacatgctcctttccactctaagccgtagcctcttctgttaataacacacagagagctctgccaagcacctgagtaggcccttgacacttgtgtgccctgggatgcctcctggcgcgaatcaggaggttctggaaggactctggctatattctgcaaatgtggctcatgccccttaccgtggctcggcgttgtggtgcctgagggacagccggccacctgcccagtactggtcagcttttcaacactattccctttgacctactggccatcttcctcacagccctcagatatcaacgggcacaaataagaccaactcaatttccacttgaatttacaaccaaaagcctgctgagttgattacagctgggccaatacagtacgaggcaataacaaattagtgtgggttgattctggaattggaaaagcttttgcttgtatggatacagcaaatccagatgtctctgaacaaagcaacaatttaaagcaacgacattttctgtcctttaagcacttaaaatcaggtgtggtgtgttttcaaaggcagaagtctgcattttgagcaaaaggtggcttcccagctctaacaaggtaactggttagcatgacattaaagcttgggcaaggcttcaaactta

SEQ ID NO: 459377 - DNA, 983 bp, Homo sapiens
ctcaggggctgagcgctgtagcctgctgccttgggaaacactctggtaggcttctacttttcagaaggcctggctctctgcttcctgctctccccttcccagagactcatgagttctcacatttaagaagtcctctttccgtctatccttagtggaggtgtgagcagagactggattggcgtccccaggaagctgtataagccaggtgctaaggagccccgctgcgtgtgtgtgagaaccaccggcccccctagtggccagatgccggacaaccctccacacagaaatcgtggggacctggaccacccaaacttggcagagtacacaggctgcccaccgctagccatcacatgctcctttccactctaagccgtagcctcttctgttaataacacacagagagctctgccaagcacctgagtaggcccttgacacttgtgtgccctgggatgcctcctggcgcgaatcaggaggttctggaaggactctggctatattctgcaaatgtggctcatgccccttaccgtggctcggcgttgtggtgcctgagggacagccggccacctgcccagtactggtcagcttttcaacactattccctttgacctactggccatcttcctcacagccctcagatatcaacgggcacaaataagaccaactcaatttccacttgaatttacaaccaaaagcctgctgagttgattacagctgggccaatacagtacgaggcaataacaaattagtgtgggttgattctggaattggaaaagcttttgcttgtatggatacagcaaatccagatgtctctgaacaaagcaacaatttaaagcaacgacattttctgtcctttaagcacttaaaatcaggtgtggtgtgttttcaaaggcagaagtctgcattttgagcaaaaggtggcttcccagctctaacaaggtaactggttagcatgacattaaagcttgggcaaggcttcaaactta

SEQ ID NO: 459378 - DNA, 1274 bp, Homo sapiens
ctcggccatcttagctgtagatagaggcggcaacctcggaagtgcggagcgggtgggcctatatagatgttgaggtgcggaggccgtgggcttttgttgggcctggctgtagccgcagcagcggtaatggcagcacggcttatgggctggtggggtccccgcgctggctttcgccttttcataccggaggagctgtctcgctaccgcggcggcccaggggacccgggcctgtacttggcgttgctcggccgtgtctacgatgtgtcctccggccggaggcactacgagcctgggtcccactatagcggcttcgcaggccgagacgcatccagagctttcgtgaccggggactgttctgaagcaggcctcgtggatgacgtatccgacctgtcagccgctgagatgctgacacttcacaattggctttcattctatgagaagaattatgtgtgtgttgggagggtgacaggacggttctacggagaggatgggctgcccaccccggcactgacccaggtagaagctgcgatcaccagaggcttggaggccaacaaactacagctgcaagagaagcagacattcccgccgtgcaacgcggagtggagctcagccaggggcagccggctctggtgctcccagaagagtggaggtgtgagcagagactggattggcgtccccaggaagctgtataagccaggtgctaaggagccccgctgcgtgtgtgtgagaaccaccggcccccctagtggccagatgccggacaaccctccacacagaaatcgtggggacctggaccacccaaacttggcagagtacacaggctgcccaccgctagccatcacatgctcctttccactctaagccgtagcctcttctgttaataacacacagagagctctgccaagcacctgagtaggcccttgacacttgtgtgccctgggatgcctcctggcgcgaatcaggaggttctggaaggactctggctatattctgcaaatgtggctcatgccccttaccgtggctcggcgttgtggtgcctgagggacagccggccacctgcccagtactggtcagcttttcaacactattccctttgacctactggccatcttcctcacagccctcagatatcaacgggcacaaataagaccaactcaatttccacttgaatttacaaccaaaagcctgctgagttgattacagctgggccaatacagtacgaggcaataacaaattagtgtgggcgtgtgcagtctgggccctcggcgtgtgca

SEQ ID NO: 459379 - DNA, 1426 bp, Homo sapiens
ctcggccatcttagctgtagatagaggcggcaacctcggaagtgcggagcgggtgggcctatatagatgttgaggtgcggaggccgtgggcttttgttgggcctggctgtagccgcagcagcggtaatggcagcacggcttatgggctggtggggtccccgcgctggctttcgccttttcataccggaggagctgtctcgctaccgcggcggcccaggggacccgggcctgtacttggcgttgctcggccgtgtctacgatgtgtcctccggccggaggcactacgagcctgggtcccactatagcggcttcgcaggccgagacgcatccagagctttcgtgaccggggactgttctgaagcaggcctcgtggatgacgtatccgacctgtcagccgctgagatgctgacacttcacaattggctttcattctatgagaagaattatgtgtgtgttgggagggtgacaggacggttctacggagaggatgggctgcccaccccggcactgacccaggtagaagctgcgatcaccagaggcttggaggccaacaaactacagctgcaagagaagcagacattcccgccgtgcaacgcggagtggagctcagccaggggcagccggctctggtgctcccagaagagtggaggtgtgagcagagactggattggcgtccccaggaagctgtataagccaggtgctaaggagccccgctgcgtgtgtgtgagaaccaccggcccccctagtggccagatgccggacaaccctccacacagaaatcgtggggacctggaccacccaaacttggcagagtacacaggctgcccaccgctagccatcacatgctcctttccactctaagccgtagcctcttctgttaataacacacagagagctctgccaagcacctgagtaggcccttgacacttgtgtgccctgggatgcctcctggcgcgaatcaggaggttctggaaggactctggctatattctgcaaatgtggctcatgccccttaccgtggctcgcttttcaacactattccctttgacctactggccatcttcctcacagccctcagatatcaacgggcacaaataagaccaactcaatttccacttgaatttacaaccaaaagcctgctgagttgattacagctgggccaatacagtacgaggcaataacaaattagtgtgggttgattctggaattggaaaagcttttgcttgtatggatacagcaaatccagatgtctctgaacaaagcaacaatttaaagcaacgacattttctgtcctttaagcacttaaaatcaggtgtggtgtgttttcaaaggcagaagtctgcattttgagcaaaaggtggcttcccagctctaacaaggtaactggttagcatgacattaaagcttgggcaaggcttcaaactta

SEQ ID NO: 459380 - DNA, 1423 bp, Homo sapiens
ctcggccatcttagctgtagatagaggcggcaacctcggaagtgcggagcgggtgggcctatatagatgttgaggtgcggaggccgtgggcttttgttgggcctggctgtagccgcagcagcggtaatggcagcacggcttatgggctggtggggtccccgcgctggctttcgccttttcataccggaggagctgtctcgctaccgcggcggcccaggggacccgggcctgtacttggcgttgctcggccgtgtctacgatgtgtcctccggccggaggcactacgagcctgggtcccactatagcggcttcgcaggccgagacgcatccagagctttcgtgaccggggactgttctgaagcaggcctcgtggatgacgtatccgacctgtcagccgctgagatgctgacacttcacaattggctttcattctatgagaagaattatgtgtgtgttgggagggtgacaggacggttctacggagaggatgggctgcccaccccggcactgacccaggtagaagctgcgatcaccagaggcttggaggccaacaaactacagctgcaagagaagcagacattcccgccgtgcaacgcggagtggagctcagccaggggcagccggctctggtgctcccagaagagtggaggtgtgagcagagactggattggcgtccccaggaagctgtataagccaggtgctaaggagccccgctgcgtgtgtgtgagaaccaccggcccccctagtggccagatgccggacaaccctccacacagaaatcgtggggacctggaccacccaaacttggcagagtacacaggctgcccaccgctagccatcacatgctcctttccactctaagccgtagcctcttctgttaataacacacagagagctctgccaagcacctgagtaggcccttgacacttgtgtgccctgggatgcctcctggcgcgaatcaggaggttctggaaggactctggctatattctgcaaatgtggctcatgccccttaccgtggctcggcgttgtggtgcctgagggacagccggccacctgcccagtactggtcagcttttcaacactattccctttgaccaactcaatttccacttgaatttacaaccaaaagcctgctgagttgattacagctgggccaatacagtacgaggcaataacaaattagtgtgggttgattctggaattggaaaagcttttgcttgtatggatacagcaaatccagatgtctctgaacaaagcaacaatttaaagcaacgacattttctgtcctttaagcacttaaaatcaggtgtggtgtgttttcaaaggcagaagtctgcattttgagcaaaaggtggcttcccagctctaacaaggtaactggttagcatgacattaaagcttgggcaaggcttcaaactta

SEQ ID NO: 459381 - DNA, 933 bp, Homo sapiens
ctcggccatcttagctgtagatagaggcggcaacctcggaagtgcggagcgggtgggcctatatagatgttgaggtgcggaggccgtgggcttttgttgggcctggctgtagccgcagcagcggtaatggcagcacggcttatgggctggtggggtccccgcgctggctttcgccttttcataccggaggagctgtctcgctaccgcggcggcccaggggacccgggcctgtacttggcgttgctcggccgtgtctacgatgtgtcctccggccggaggcactacgagcctgggtcccactatagcggcttcgcaggccgagacgcatccagagctttcgtgaccggggactgttctgaagcaggcctcgtggatgacgtatccgacctgtcagccgctgagatgctgacacttcacaattggctttcattctatgagaagaattatgtgtgtgttgggagggtgacaggacggttctacggagaggatgggctgcccaccccggcactgacccaggtagaagctgcgatcaccagaggcttggaggccaacaaactacagctgcaagagaagcagacattcccgccgtgcaacgcggagtggagctcagccaggggcagccggctctggtgctcccagaagaggtggagagagcggcttcctcctacctgacatttatatctgcctggtgctccagcaggaagagtgcgctcttgctgtcctgccgctgtatggccatgtgcagtagcgtctgcccatccgacatggtgtcattgatggcggctccagagcccagcagctgggctgcgatcgtgtgcatgcctgggaaacaagccccgatctcatccaggctcggcttttcccgcttcctcaacatcttactacaacagccagaccctctcagcttctcaaagccagcagttttccactgga

SEQ ID NO: 459382 - DNA, 400 bp, Homo sapiens
tctcgaggagtcccataatcacaaggtcgttcacaatgtcgtacgccctcagatatcaacgggcacaaataagaccaactcaatttccacttgaatttacaaccaaaagcctgctgagttgattacagctgggccaatacagtacgaggcaataacaaattagtgtgggttgattctggaattggaaaagcttttgcttgtatggatacagcaaatccagatgtctctgaacaaagcaacaatttaaagcaacgacattttctgtcctttaagcacttaaaatcaggtgtggtgtgttttcaaaggcagaagtctgcattttgagcaaaaggtggcttcccagctctaacaaggtaactggttagcatgacattaaagcttgggcaaggcttcaaactta

SEQ ID NO: 459383 - DNA, 417 bp, Homo sapiens
  misc_feature (3)..(3): n is a, c, g, or t
cancttcgtcactcggatctcgcggcggtatggatcctcggcgtgtgcagcaacaacttcggccctcagatatcaacgggcacaaataagaccaactcaatttccacttgaatttacaaccaaaagcctgctgagttgattacagctgggccaatacagtacgaggcaataacaaattagtgtgggttgattctggaattggaaaagcttttgcttgtatggatacagcaaatccagatgtctctgaacaaagcaacaatttaaagcaacgacattttctgtcctttaagcacttaaaatcaggtgtggtgtgttttcaaaggcagaagtctgcattttgagcaaaaggtggcttcccagctctaacaaggtaactggttagcatgacattaaagcttgggcaaggcttcaaactta

SEQ ID NO: 459384 - DNA, 509 bp, Homo sapiens
gagcgcgagcactagcgcgcgagagagagagcgagagcgcgcgcgccgatgacgtcacgctcggcgtctcggccatcttagctgtagatagaggcggcaacctcggaagtgcggagcgggtgggcctatatagatgttgaggtgcggaggccgtgggcttttgttgggcctggctgtagccgcagcagcggtaatggcagcacggcttatgggctggtggggtccccgcgctggctttcgccttttcataccggaggagctgtctcgctaccgcggcggcccaggggacccgggcctgtacttggcgttgctcggccgtgtctacgatgtgtcctccggccggaggcactacgagcctgggtcccactatagcggcttcgcaggtatcagcgaggctgctcacgcctttctctccgctggcgcgagccagtagccacctgcgcgtcgttcgttggttcattattcatctatttccccccccatccccaccccacatccatcaaacccgt

SEQ ID NO: 459385 - DNA, 703 bp, Homo sapiens
ctcggccatcttagctgtagatagaggcggcaacctcggaagtgcggagcgggtgggcctatatagatgttgaggtgcggaggccgtgggcttttgttgggcctggctgtagccgcagcagcggtaatggcagcacggcttatgggctggtggggtccccgcgctggctttcgccttttcataccggaggagctgtctcgctaccgcggcggcccaggggacccgggcctgtacttggcgttgctcggccgtgtctacgatgtgtcctccggccggaggcactacgagcctgggtcccactatagcggcttcgcaggccgagacgcatccagagctttcgtgaccggggactgttctgaagcaggcctcgtggatgacgtatccgacctgtcagccgctgagatgctgacaccaggtagaagctgcgatcaccagaggcttggaggccaacaaactacagctgcaagagaagcagacattcccgccgtgcaacgcggagtggagctcagccaggggcagccggctctggtgctcccagaagaggtaagcaggctccccttcttctcctttctgcctgtcccaaatccaactcctaggccatcctgcctgcagtattcagtgaattcaggaattgattgttaaccctggggagctttttcaaaatactgataataattctcaactttggctgcatattagatct

SEQ ID NO: 459386 - DNA, 1475 bp, Homo sapiens
ctcggccatcttagctgtagatagaggcggcaacctcggaagtgcggagcgggtgggcctatatagatgttgaggtgcggaggccgtgggcttttgttgggcctggctgtagccgcagcagcggtaatggcagcacggcttatgggctggtggggtccccgcgctggctttcgccttttcataccggaggagctgtctcgctaccgcggcggcccaggggacccgggcctgtacttggcgttgctcggccgtgtctacgatgtgtcctccggccggaggcactacgagcctgggtcccactatagcggcttcgcaggccgagacgcatccagagctttcgtgaccggggactgttctgaagcaggcctcgtggatgacgtatccgacctgtcagccgctgagatgctgacacttcacaattggctttcattctatgagaagaattatgtgtgtgttgggagggtgacaggacggttctacggagaggatgggctgcccaccccggcactgacccaggtagaagctgcgatcaccagaggcttggaggccaacaaactacagctgcaagagaagcagacattcccgccgtgcaacgcggagtggagctcagccaggggcagccggctctggtgctcccagaagagtggaggtgtgagcagagactggattggcgtccccaggaagctgtataagccaggtgctaaggagccccgctgcgtgtgtgtgagaaccaccggcccccctagtggccagatgccggacaaccctccacacagaaatcgtggggacctggaccacccaaacttggcagagtacacaggctgcccaccgctagccatcacatgctcctttccactctaagccgtagcctcttctgttaataacacacagagagctctgccaagcacctgagtaggcccttgacacttgtgtgccctgggatgcctcctggcgcgaatcaggaggttctggaaggactctggctatattctgcaaatgtggctcatgccccttaccgtggctcggcgttgtggtgcctgagggacagccggccacctgcccagtactggtcagcttttcaacactattccctttgacctactggccatcttcctcacagccctcagatatcaacgggcacaaataagaccaactcaatttccacttgaatttacaaccaaaagcctgctgagttgattacagctgggccaatacagtacgaggcaataacaaattagtgtgggttgattctggaattggaaaagcttttgcttgtatggatacagcaaatccagatgtctctgaacaaagcaacaatttaaagcaacgacattttctgtcctttaagcacttaaaatcaggtgtggtgtgttttcaaaggcagaagtctgcattttgagcaaaaggtggcttcccagctctaacaaggtaactggttagcatgacattaaagcttgggcaaggcttcaaactta

SEQ ID NO: 459387 - DNA, 1233 bp, Homo sapiens
ctcggccatcttagctgtagatagaggcggcaacctcggaagtgcggagcgggtgggcctatatagatgttgaggccgagacgcatccagagctttcgtgaccggggactgttctgaagcaggcctcgtggatgacgtatccgacctgtcagccgctgagatgctgacacttcacaattggctttcattctatgagaagaattatgtgtgtgttgggagggtgacaggacggttctacggagaggatgggctgcccaccccggcactgacccaggtagaagctgcgatcaccagaggcttggaggccaacaaactacagctgcaagagaagcagacattcccgccgtgcaacgcggagtggagctcagccaggggcagccggctctggtgctcccagaagagtggaggtgtgagcagagactggattggcgtccccaggaagctgtataagccaggtgctaaggagccccgctgcgtgtgtgtgagaaccaccggcccccctagtggccagatgccggacaaccctccacacagaaatcgtggggacctggaccacccaaacttggcagagtacacaggctgcccaccgctagccatcacatgctcctttccactctaagccgtagcctcttctgttaataacacacagagagctctgccaagcacctgagtaggcccttgacacttgtgtgccctgggatgcctcctggcgcgaatcaggaggttctggaaggactctggctatattctgcaaatgtggctcatgccccttaccgtggctcggcgttgtggtgcctgagggacagccggccacctgcccagtactggtcagcttttcaacactattccctttgacctactggccatcttcctcacagccctcagatatcaacgggcacaaataagaccaactcaatttccacttgaatttacaaccaaaagcctgctgagttgattacagctgggccaatacagtacgaggcaataacaaattagtgtgggttgattctggaattggaaaagcttttgcttgtatggatacagcaaatccagatgtctctgaacaaagcaacaatttaaagcaacgacattttctgtcctttaagcacttaaaatcaggtgtggtgtgttttcaaaggcagaagtctgcattttgagcaaaaggtggcttcccagctctaacaaggtaactggttagcatgacattaaagcttgggcaaggcttcaaactta

SEQ ID NO: 459388 - DNA, 449 bp, Homo sapiens
aagcacaaactgttgtgaagtgtgcatgcgagggatctaggttgtgtactccttatgagaatctaatgcctgatattctgttactgtttcccatcaccccagatggacagtctagttgcaggaaaacaagctcagagatcccactgagtctacgttatagtgagttgtagaatcatttcattatatattactatgtagtaataatagaaataaagtgcacaatatatgtaatgcacttgaatcatcctgaaattattccctcactcccagtctgtggaaaaattgtcttccacacattcactctgttttttggtagaggcagggtcttaatatattgcccaggctgatctcaaactcttggcctcaagtaatatacctctctcagcctcccaaagtgctgagattacaggcataagccaccaccctcaaccaagactttcttaaaccaa

SEQ ID NO: 459389 - DNA, 433 bp, Homo sapiens
tgacctgcactaccagcacaacctgggtgtcctcagcttgtgctgcccgtctcgaatgactggagtttcctgcttctgtcactacacctcccaccctctccatcacctgctctgctcttataaggatccgaagaaatggaataatcgtatcgctgatctacgtaaacaaattgaagaattgtctgaaagaaaatatgttatgtctaaactggaaaagtcctgtaatcttatgttcatgggcttttacacaatggagttactgttcatcatgggggtaccgtggacaagcccagagctgccggcgagtcatgccatccttacacgtttctccttggaagacgggaactgatgaatttggcagctgcagatttaggacctgatcaatcaggggtcactgcgacaacactgggagctgcagaatcccgggagcaca

SEQ ID NO: 459390 - DNA, 368 bp, Homo sapiens
cgaggcgctcgggatacggggtccacagtcttcgcctgatatcaggcgaagactgtgacagtcatgagccagcgcatctggccaccttattttctattactggctcaatgtaatggctccatctcaggaacagccaatgaaagagatgcacaggacaagagatggggcctcagtatgttgccacggctgaccttgaactcctgcactcaagggattttcctgccctggcctcccaaagtattggtattacaggcatgagccattgtgcccaccgtctctggttcttaaccttctacttccctcttccagttttaaagaatgcttgtaattacatgggctctcctagatactccaggacaatcttgttt

SEQ ID NO: 459391 - DNA, 243 bp, Homo sapiens
ccatgttggccaggctggtctcgaactcctgacctcaagtgatccaccctcctcggcctcccaaatgctggaatatagaaaatggatggacaataatcctcctgcctcagcctcacaagtagctgggactacaggtgcttgtcaccacacctcactaattttcccatttgtgttatatgtggattccacaggactgacttcgaaaacttgagtatgcatggattttggtatacacagaaatgg

SEQ ID NO: 459392 - DNA, 2491 bp, Homo sapiens
  misc_feature (2373)..(2373): n is a, c, g, or t
tgggattacaggtaagtgccaccacacccagctgatttttgtgttttttgtagagacgaggtttcgccatgtttcccagactgttctcaaactcctgagctcaaagcagtccacccaccttggcctcccaaagtgctgggattacaggtgtgagccaccttgctcattctagtttaaactttggagtggtttgtgtctcctgattggactcctgcaaatacagaattgatgctaggaagggtaccaggagatagacgcacacagatgggatttgggaataggtttggttatccaaggagcagtgctgagctccttgctaatgggatatgggatgctggtgatttccagtaagtgacctcaaaattactcaaggctaccacatactgttgattgtgatgaaatgccagttgaagcacctgtcctgcgagcttaggggtgctacaagttgaccactgcagcagtaaagatgactctgaagaatggcatgggatggatcctttcgaatgcacttgagcagcggtctccaaccacagggccacagagctggagctggatctaccatgaaagacctctgaatccaggaagagagactgactgagcaacatgttattcagggtctccatctgttgtccaaggctggagtgtagtagtgctatcacagctgactgcagcctcaaccttccaggctgaagcgatcctcccatctcaacctcccacgtggctgagactacaggtgcttgccactatgcccaactaatatttggaattttcgtatacgtggattccagaggggtgacagtgaaacgtgggaccatccagttgcaggaaaacaagcttaagacgcccactgattctacattatgctcctacctcccggcagcctctccaggcccagaactttctccagtcagcctctacagaccaagctcatgactcacaatggcctatttaggcccataccctacgtcacggcagtctccgcagatgagcctactgccccacaacagcctccacaggcacagctccatcgttacaatggcctctttagacccagctcctgcctcccagccttctctccaggccctgaactttctcaagtcgacctcaccaggcccagctcatgcttctttgcagcctctccaggcccagctcctgcatcttggtggcccctccaggcccagcctctgcctcccgtcggcctctacagtcccaacatctgcctcacagcagattcttcacgcccagcctctgcctcacagtggaccctccagacccagatggtgtctcactgtggcatcctcagtcgaagctcctgcctttcggcagcctctccaggcccagctcctcctgcctcccagtggcctctttcggcccagcccagctcatgcctcccggcggccttcccaagccccgcttttgacttttggtggcctctgcaggcctcgacaaggcccagcctcctgcctcccgaaggcctgcacaggcccagcctctgcctcacagcggactctccacgcccagctagctctcgcctcactgcggcctccccagtccaaagctcctgcctttcggccacttcggcaggtccagctactgcctgccagtggcctctttaggcccagctcattcctcacaacggcctttccaggccccgtttttcccttctggcagcctcttggcttctaatttgtttatcttttgtgtataaatcccaaaatatggaattttggaatatttccaccattatatattttggtcggtaatttatttggagtgagtttctgcaccatgcccgaactttttgttttattttccttattatttggtgttaaacaggtttaatgacggtcatggcaactttttggcacaatgaaaaatatcgcccatgatcaacgtgttctgttctggggaagggggcaaaggcagggtgaatcactttcttaaaaagtatagctcaagttgggagtgcagagggaatggggagaaaacccttccgctgcctgtgtcgaagtgcaggagcccccacccccatactcacctgagtccagcccctctggggaaagaaggggtgcatgaactccccttagtccacaggcgcctccctgtggcccaaggccctcttcacactccatcttgtagccccagcaggagctattttccgaaaatgctgggattacaggcgtgagccactgtgcccagctgagatctgatggttttaaaaagaggagctcccctgcatgagatctcactttttgcctgctaccatttatgtaagatgtgacttgctccttcttgccttccatcatgactgtgaagcttccccagccatatggaattgtaagttcaattaaacttcttttctttgtaaattcnaaagccctccctttacacttgcaaagggtcccaaaatacttccttgaggggggggccccgtaccccaattcgccctttggtggagtcgttttaacaattccctggcccgccgttttaa

SEQ ID NO: 459393 - DNA, 3336 bp, Homo sapiens
  misc_feature (3218)..(3218): n is a, c, g, or t
agatgatgattattccccaccttctaagagacaaagaccaacgagccaccacagccaccggtcccagaacccgccaatgctggggaacggaaaatgagggagttcaactctggccctcacaatccagtggaggagacgaaactcagctgcctctgtccctctgggcacgcctcatgccaggtgcatctgtggacaggggccatgctcctgggcttccaaagttggagaaagctgccaggctcaggtctgaaggccagaattctacagtaagtcctactcagtcaaggtgggagcagggtcagtggcttccgaggctctgcgggagaatccgtttcctggccgtggaggtggcctgcactcctcagcttgtgctgcccgtctcgaatgactggagtttcctgcttctgtcactacacctcccaccctctccatcacctgctctgctcttataaggatccgaagaaatggaataatcgtatcgctgatctacgtaaacaaattgaagaattgtctgaaagaaaatatgttatgtctaaactggaaaagtcctgtaatcttatgttcatgggcttttacacaatggagttactgttcatcatgggggtaccgtggacaagcccagagctgccggcgagtcatgccatccttacacgtttctccttggaagacgtgaacttatgaattcaacaggtgaagatttacaacttgataaatcagcttcatgagagccacctgagctgaagattcccttgagaacaagtactgtcctgtggtttcatggcctttcttccatttgtggttcttgcgaagtggaatttaaatgacatcttatcaagatggataaaccctagtttcccagtgctggaatatagaaaatggatggacaagtaaatctcactcagcacccatagtccaggcatggggacctcaacacacctgagccccagacatcacctttcattctggacctaccatgaaagacttctgaatccaggaagagagactgactgggaaacatgttattcagatggggtcttcttatgttgcccaggctggtctcaaattcctaggctcaagtgattccgcccacctctgcctcccaaagtgctgggattacagtcatgagccagcgcatctggccaccttattttctattactggctcaatgtaatggctccatctcaggaacagccaatgaaagagatgcacaggacaaggctaccacatactgttgattgtgatgaaatgccagttgaagcacctgtcctgcgagcttaggggtgctacaagttgaccactgcagcagtaaagatgactctgaagaatggcatgggatggatcctttcgaatgcacttgagcagcggtctccaaccacagggccacagagctggagctggatctaccatgaaagacctctgaatccaggaagagagactgactgagcaacatgttattcagggtctccatctgttgtccaaggctggagtgtagtagtgctatcacagctgactgcagcctcaaccttccaggctgaagcgatcctcccatctcaacctcccacgtggctgagactacaggtgcttgccactatgcccaactaatatttggaattttcgtatacgtggattccagaggggtgacagtgaaacgtgggaccatccagttgcaggaaaacaagcttaagacgcccactgattctacattatgctcctacctcccggcagcctctccaggcccagaactttctccagtcagcctctacagaccaagctcatgactcacaatggcctatttaggcccataccctacgtcacggcagtctccgcagatgagcctactgccccacaacagcctccacaggcacagctccatcgttacaatggcctctttagacccagctcctgcctcccagccttctctccaggccctgaactttctcaagtcgacctcaccaggcccagctcatgcttctttgcagcctctccaggcccagctcctgcatcttggtggcccctccaggcccagcctctgcctcccgtcggcctctacagtcccaacatctgcctcacagcagattcttcacgcccagcctctgcctcacagtggaccctccagacccagatggtgtctcactgtggcatcctcagtcgaagctcctgcctttcggcagcctctccaggcccagctcctcctgcctcccagtggcctctttcggcccagcccagctcatgcctcccggcggccttcccaagccccgcttttgacttttggtggcctctgcaggcctcgacaaggcccagcctcctgcctcccgaaggcctgcacaggcccagcctctgcctcacagcggactctccacgcccagctagctctcgcctcactgcggcctccccagtccaaagctcctgcctttcggccacttcggcaggtccagctactgcctgccagtggcctctttaggcccagctcattcctcacaacggcctttccaggccccgtttttcccttctggcagcctcttggcttctaatttgtttatcttttgtgtataaatcccaaaatatggaattttggaatatttccaccattatatattttggtcggtaatttatttggagtgagtttctgcaccatgcccgaactttttgttttattttccttattatttggtgttaaacaggtttaatgacggtcatggcaactttttggcacaatgaaaaatatcgcccatgatcaacgtgttctgttctggggaagggggcaaaggcagggtgaatcactttcttaaaaagtatagctcaagttgggagtgcagagggaatggggagaaaacccttccgctgcctgtgtcgaagtgcaggagcccccacccccatactcacctgagtccagcccctctggggaaagaaggggtgcatgaactccccttagtccacaggcgcctccctgtggcccaaggccctcttcacactccatcttgtagccccagcaggagctattttccgaaaatgctgggattacaggcgtgagccactgtgcccagctgagatctgatggttttaaaaagaggagctcccctgcatgagatctcactttttgcctgctaccatttatgtaagatgtgacttgctccttcttgccttccatcatgactgtgaagcttccccagccatatggaattgtaagttcaattaaacttcttttctttgtaaattcnaaagccctccctttacacttgcaaagggtcccaaaatacttccttgaggggggggccccgtaccccaattcgccctttggtggagtcgttttaacaattccctggcccgccgttttaa

SEQ ID NO: 459394 - DNA, 3200 bp, Homo sapiens
  misc_feature (3082)..(3082): n is a, c, g, or t
ctggggagtcaaagaagtcttccatgaggaggtgatgccaaagcggacaagtgacagagtcgaagctagctaggaagagagtagaggtttaaggggaagcgtattataagcagaggatatcacccacttcagagactcccagaggagaaagtgtgtgtgttcgaactggcttccgaggctctgcgggagaatccgtttcctggccgtggaggtggcctgcactcctcagcttgtgctgcccgtctcgaatgactggagtttcctgcttctgtcactacacctcccaccctctccatcacctgctctgctcttataaggatccgaagaaatggaataatcgtatcgctgatctacgtaaacaaattgaagaattgtctgaaagaaaatatgttatgtctaaactggaaaagtcctgtaatcttatgttcatgggcttttacacaatggagttactgttcatcatgggggtaccgtggacaagcccagagctgccggcgagtcatgccatccttacacgtttctccttggaagacgtgaacttatgaattcaacaggtgaagatttacaacttgataaatcagcttcatgagagccacctgagctgaagattcccttgagaacaagtactgtcctgtggtttcatggcctttcttccatttgtggttcttgcgaagtggaatttaaatgacatcttatcaagatggataaaccctagtttcccagtgctggaatatagaaaatggatggacaagtaaatctcactcagcacccatagtccaggcatggggacctcaacacacctgagccccagacatcacctttcattctggacctaccatgaaagacttctgaatccaggaagagagactgactgggaaacatgttattcagatggggtcttcttatgttgcccaggctggtctcaaattcctaggctcaagtgattccgcccacctctgcctcccaaagtgctgggattacagtcatgagccagcgcatctggccaccttattttctattactggctcaatgtaatggctccatctcaggaacagccaatgaaagagatgcacaggacaaggctaccacatactgttgattgtgatgaaatgccagttgaagcacctgtcctgcgagcttaggggtgctacaagttgaccactgcagcagtaaagatgactctgaagaatggcatgggatggatcctttcgaatgcacttgagcagcggtctccaaccacagggccacagagctggagctggatctaccatgaaagacctctgaatccaggaagagagactgactgagcaacatgttattcagggtctccatctgttgtccaaggctggagtgtagtagtgctatcacagctgactgcagcctcaaccttccaggctgaagcgatcctcccatctcaacctcccacgtggctgagactacaggtgcttgccactatgcccaactaatatttggaattttcgtatacgtggattccagaggggtgacagtgaaacgtgggaccatccagttgcaggaaaacaagcttaagacgcccactgattctacattatgctcctacctcccggcagcctctccaggcccagaactttctccagtcagcctctacagaccaagctcatgactcacaatggcctatttaggcccataccctacgtcacggcagtctccgcagatgagcctactgccccacaacagcctccacaggcacagctccatcgttacaatggcctctttagacccagctcctgcctcccagccttctctccaggccctgaactttctcaagtcgacctcaccaggcccagctcatgcttctttgcagcctctccaggcccagctcctgcatcttggtggcccctccaggcccagcctctgcctcccgtcggcctctacagtcccaacatctgcctcacagcagattcttcacgcccagcctctgcctcacagtggaccctccagacccagatggtgtctcactgtggcatcctcagtcgaagctcctgcctttcggcagcctctccaggcccagctcctcctgcctcccagtggcctctttcggcccagcccagctcatgcctcccggcggccttcccaagccccgcttttgacttttggtggcctctgcaggcctcgacaaggcccagcctcctgcctcccgaaggcctgcacaggcccagcctctgcctcacagcggactctccacgcccagctagctctcgcctcactgcggcctccccagtccaaagctcctgcctttcggccacttcggcaggtccagctactgcctgccagtggcctctttaggcccagctcattcctcacaacggcctttccaggccccgtttttcccttctggcagcctcttggcttctaatttgtttatcttttgtgtataaatcccaaaatatggaattttggaatatttccaccattatatattttggtcggtaatttatttggagtgagtttctgcaccatgcccgaactttttgttttattttccttattatttggtgttaaacaggtttaatgacggtcatggcaactttttggcacaatgaaaaatatcgcccatgatcaacgtgttctgttctggggaagggggcaaaggcagggtgaatcactttcttaaaaagtatagctcaagttgggagtgcagagggaatggggagaaaacccttccgctgcctgtgtcgaagtgcaggagcccccacccccatactcacctgagtccagcccctctggggaaagaaggggtgcatgaactccccttagtccacaggcgcctccctgtggcccaaggccctcttcacactccatcttgtagccccagcaggagctattttccgaaaatgctgggattacaggcgtgagccactgtgcccagctgagatctgatggttttaaaaagaggagctcccctgcatgagatctcactttttgcctgctaccatttatgtaagatgtgacttgctccttcttgccttccatcatgactgtgaagcttccccagccatatggaattgtaagttcaattaaacttcttttctttgtaaattcnaaagccctccctttacacttgcaaagggtcccaaaatacttccttgaggggggggccccgtaccccaattcgccctttggtggagtcgttttaacaattccctggcccgccgttttaa

SEQ ID NO: 459395 - DNA, 3161 bp, Homo sapiens
  misc_feature (3043)..(3043): n is a, c, g, or t
tgacctgcactaccagcacaacctgggtgtcctcagcttgtgctgcccgtctcgaatgactggagtttcctgcttctgtcactacacctcccaccctctccatcacctgctctgctcttataaggatccgagtggagtcttgctctgtcatccaggctggcagtggcgtggtcttggctcactgcaacgtctgcctcctgggttcaagtgattctcctgcctcagcctcctgagtagctgggactacaggcgcctgccaccatgccctgctgttttgtatttttgagaaatggaataatcgtatcgctgatctacgtaaacaaattgaagaattgtctgaaagaaaatatgttatgtctaaactggaaaagtcctgtaatcttatgttcatgggcttttacacaatggagttactgttcatcatgggggtaccgtggacaagcccagagctgccggcgagtcatgccatccttacacgtttctccttggaagacgtgaacttatgaattcaacaggtgaagatttacaacttgataaatcagcttcatgagagccacctgagctgaagattcccttgagaacaagtactgtcctgtggtttcatggcctttcttccatttgtggttcttgcgaagtggaatttaaatgacatcttatcaagatggataaaccctagtttcccagtgctggaatatagaaaatggatggacaagtaaatctcactcagcacccatagtccaggcatggggacctcaacacacctgagccccagacatcacctttcattctggacctaccatgaaagacttctgaatccaggaagagagactgactgggaaacatgttattcagatggggtcttcttatgttgcccaggctggtctcaaattcctaggctcaagtgattccgcccacctctgcctcccaaagtgctgggattacagtcatgagccagcgcatctggccaccttattttctattactggctcaatgtaatggctccatctcaggaacagccaatgaaagagatgcacaggacaaggctaccacatactgttgattgtgatgaaatgccagttgaagcacctgtcctgcgagcttaggggtgctacaagttgaccactgcagcagtaaagatgactctgaagaatggcatgggatggatcctttcgaatgcacttgagcagcggtctccaaccacagggccacagagctggagctggatctaccatgaaagacctctgaatccaggaagagagactgactgagcaacatgttattcagggtctccatctgttgtccaaggctggagtgtagtagtgctatcacagctgactgcagcctcaaccttccaggctgaagcgatcctcccatctcaacctcccacgtggctgagactacaggtgcttgccactatgcccaactaatatttggaattttcgtatacgtggattccagaggggtgacagtgaaacgtgggaccatccagttgcaggaaaacaagcttaagacgcccactgattctacattatgctcctacctcccggcagcctctccaggcccagaactttctccagtcagcctctacagaccaagctcatgactcacaatggcctatttaggcccataccctacgtcacggcagtctccgcagatgagcctactgccccacaacagcctccacaggcacagctccatcgttacaatggcctctttagacccagctcctgcctcccagccttctctccaggccctgaactttctcaagtcgacctcaccaggcccagctcatgcttctttgcagcctctccaggcccagctcctgcatcttggtggcccctccaggcccagcctctgcctcccgtcggcctctacagtcccaacatctgcctcacagcagattcttcacgcccagcctctgcctcacagtggaccctccagacccagatggtgtctcactgtggcatcctcagtcgaagctcctgcctttcggcagcctctccaggcccagctcctcctgcctcccagtggcctctttcggcccagcccagctcatgcctcccggcggccttcccaagccccgcttttgacttttggtggcctctgcaggcctcgacaaggcccagcctcctgcctcccgaaggcctgcacaggcccagcctctgcctcacagcggactctccacgcccagctagctctcgcctcactgcggcctccccagtccaaagctcctgcctttcggccacttcggcaggtccagctactgcctgccagtggcctctttaggcccagctcattcctcacaacggcctttccaggccccgtttttcccttctggcagcctcttggcttctaatttgtttatcttttgtgtataaatcccaaaatatggaattttggaatatttccaccattatatattttggtcggtaatttatttggagtgagtttctgcaccatgcccgaactttttgttttattttccttattatttggtgttaaacaggtttaatgacggtcatggcaactttttggcacaatgaaaaatatcgcccatgatcaacgtgttctgttctggggaagggggcaaaggcagggtgaatcactttcttaaaaagtatagctcaagttgggagtgcagagggaatggggagaaaacccttccgctgcctgtgtcgaagtgcaggagcccccacccccatactcacctgagtccagcccctctggggaaagaaggggtgcatgaactccccttagtccacaggcgcctccctgtggcccaaggccctcttcacactccatcttgtagccccagcaggagctattttccgaaaatgctgggattacaggcgtgagccactgtgcccagctgagatctgatggttttaaaaagaggagctcccctgcatgagatctcactttttgcctgctaccatttatgtaagatgtgacttgctccttcttgccttccatcatgactgtgaagcttccccagccatatggaattgtaagttcaattaaacttcttttctttgtaaattcnaaagccctccctttacacttgcaaagggtcccaaaatacttccttgaggggggggccccgtaccccaattcgccctttggtggagtcgttttaacaattccctggcccgccgttttaa

SEQ ID NO: 459396 - DNA, 2454 bp, Homo sapiens
  misc_feature (2336)..(2336): n is a, c, g, or t
ggtcctgccttgttgctcaggctggagtgcaatcatttttcacggtaaccttgaactcctggggccaagtgatccacccaccttggcctcccaaagtgctgggattacaggtgtgagccaccttgctcattctagtttaaactttggagtggtttgtgtctcctgattggactcctgcaaatacagaattgatgctaggaagggtaccaggagatagacgcacacagatgggatttgggaataggtttggttatccaaggagcagtgctgagctccttgctaatgggatatgggatgctggtgatttccagtaagtgacctcaaaattactcaaggctaccacatactgttgattgtgatgaaatgccagttgaagcacctgtcctgcgagcttaggggtgctacaagttgaccactgcagcagtaaagatgactctgaagaatggcatgggatggatcctttcgaatgcacttgagcagcggtctccaaccacagggccacagagctggagctggatctaccatgaaagacctctgaatccaggaagagagactgactgagcaacatgttattcagggtctccatctgttgtccaaggctggagtgtagtagtgctatcacagctgactgcagcctcaaccttccaggctgaagcgatcctcccatctcaacctcccacgtggctgagactacaggtgcttgccactatgcccaactaatatttggaattttcgtatacgtggattccagaggggtgacagtgaaacgtgggaccatccagttgcaggaaaacaagcttaagacgcccactgattctacattatgctcctacctcccggcagcctctccaggcccagaactttctccagtcagcctctacagaccaagctcatgactcacaatggcctatttaggcccataccctacgtcacggcagtctccgcagatgagcctactgccccacaacagcctccacaggcacagctccatcgttacaatggcctctttagacccagctcctgcctcccagccttctctccaggccctgaactttctcaagtcgacctcaccaggcccagctcatgcttctttgcagcctctccaggcccagctcctgcatcttggtggcccctccaggcccagcctctgcctcccgtcggcctctacagtcccaacatctgcctcacagcagattcttcacgcccagcctctgcctcacagtggaccctccagacccagatggtgtctcactgtggcatcctcagtcgaagctcctgcctttcggcagcctctccaggcccagctcctcctgcctcccagtggcctctttcggcccagcccagctcatgcctcccggcggccttcccaagccccgcttttgacttttggtggcctctgcaggcctcgacaaggcccagcctcctgcctcccgaaggcctgcacaggcccagcctctgcctcacagcggactctccacgcccagctagctctcgcctcactgcggcctccccagtccaaagctcctgcctttcggccacttcggcaggtccagctactgcctgccagtggcctctttaggcccagctcattcctcacaacggcctttccaggccccgtttttcccttctggcagcctcttggcttctaatttgtttatcttttgtgtataaatcccaaaatatggaattttggaatatttccaccattatatattttggtcggtaatttatttggagtgagtttctgcaccatgcccgaactttttgttttattttccttattatttggtgttaaacaggtttaatgacggtcatggcaactttttggcacaatgaaaaatatcgcccatgatcaacgtgttctgttctggggaagggggcaaaggcagggtgaatcactttcttaaaaagtatagctcaagttgggagtgcagagggaatggggagaaaacccttccgctgcctgtgtcgaagtgcaggagcccccacccccatactcacctgagtccagcccctctggggaaagaaggggtgcatgaactccccttagtccacaggcgcctccctgtggcccaaggccctcttcacactccatcttgtagccccagcaggagctattttccgaaaatgctgggattacaggcgtgagccactgtgcccagctgagatctgatggttttaaaaagaggagctcccctgcatgagatctcactttttgcctgctaccatttatgtaagatgtgacttgctccttcttgccttccatcatgactgtgaagcttccccagccatatggaattgtaagttcaattaaacttcttttctttgtaaattcnaaagccctccctttacacttgcaaagggtcccaaaatacttccttgaggggggggccccgtaccccaattcgccctttggtggagtcgttttaacaattccctggcccgccgttttaa

SEQ ID NO: 459397 - DNA, 2202 bp, Homo sapiens
  misc_feature (2084)..(2084): n is a, c, g, or t
cgctatctcggctcagcgcaacctccacctgccgggttcaagcgattctcctgcctcagcctcccgagtaattgggattacaggctaccacatactgttgattgtgatgaaatgccagttgaagcacctgtcctgcgagcttaggggtgctacaagttgaccactgcagcagtaaagatgactctgaagaatggcatgggatggatcctttcgaatgcacttgagcagcggtctccaaccacagggccacagagctggagctggatctaccatgaaagacctctgaatccaggaagagagactgactgagcaacatgttattcagggtctccatctgttgtccaaggctggagtgtagtagtgctatcacagctgactgcagcctcaaccttccaggctgaagcgatcctcccatctcaacctcccacgtggctgagactacaggtgcttgccactatgcccaactaatatttggaattttcgtatacgtggattccagaggggtgacagtgaaacgtgggaccatccagttgcaggaaaacaagcttaagacgcccactgattctacattatgctcctacctcccggcagcctctccaggcccagaactttctccagtcagcctctacagaccaagctcatgactcacaatggcctatttaggcccataccctacgtcacggcagtctccgcagatgagcctactgccccacaacagcctccacaggcacagctccatcgttacaatggcctctttagacccagctcctgcctcccagccttctctccaggccctgaactttctcaagtcgacctcaccaggcccagctcatgcttctttgcagcctctccaggcccagctcctgcatcttggtggcccctccaggcccagcctctgcctcccgtcggcctctacagtcccaacatctgcctcacagcagattcttcacgcccagcctctgcctcacagtggaccctccagacccagatggtgtctcactgtggcatcctcagtcgaagctcctgcctttcggcagcctctccaggcccagctcctcctgcctcccagtggcctctttcggcccagcccagctcatgcctcccggcggccttcccaagccccgcttttgacttttggtggcctctgcaggcctcgacaaggcccagcctcctgcctcccgaaggcctgcacaggcccagcctctgcctcacagcggactctccacgcccagctagctctcgcctcactgcggcctccccagtccaaagctcctgcctttcggccacttcggcaggtccagctactgcctgccagtggcctctttaggcccagctcattcctcacaacggcctttccaggccccgtttttcccttctggcagcctcttggcttctaatttgtttatcttttgtgtataaatcccaaaatatggaattttggaatatttccaccattatatattttggtcggtaatttatttggagtgagtttctgcaccatgcccgaactttttgttttattttccttattatttggtgttaaacaggtttaatgacggtcatggcaactttttggcacaatgaaaaatatcgcccatgatcaacgtgttctgttctggggaagggggcaaaggcagggtgaatcactttcttaaaaagtatagctcaagttgggagtgcagagggaatggggagaaaacccttccgctgcctgtgtcgaagtgcaggagcccccacccccatactcacctgagtccagcccctctggggaaagaaggggtgcatgaactccccttagtccacaggcgcctccctgtggcccaaggccctcttcacactccatcttgtagccccagcaggagctattttccgaaaatgctgggattacaggcgtgagccactgtgcccagctgagatctgatggttttaaaaagaggagctcccctgcatgagatctcactttttgcctgctaccatttatgtaagatgtgacttgctccttcttgccttccatcatgactgtgaagcttccccagccatatggaattgtaagttcaattaaacttcttttctttgtaaattcnaaagccctccctttacacttgcaaagggtcccaaaatacttccttgaggggggggccccgtaccccaattcgccctttggtggagtcgttttaacaattccctggcccgccgttttaa

SEQ ID NO: 459398 - DNA, 2646 bp, Homo sapiens
  misc_feature (2528)..(2528): n is a, c, g, or t
caacgatttttcaacaatgtaatttctcttttacagagccacctgagctgaagattcccttgagaacaagtactgtcctgtggtttcatggcctttcttccatttgtggttcttgcgaagtggaatttaaatgacatcttatcaagatggataaaccctagtttcccagtgctggaatatagaaaatggatggacaagtaaatctcactcagcacccatagtccaggcatggggacctcaacacacctgagccccagacatcacctttcattctggacctaccatgaaagacttctgaatccaggaagagagactgactgggaaacatgttattcagatggggtcttcttatgttgcccaggctggtctcaaattcctaggctcaagtgattccgcccacctctgcctcccaaagtgctgggattacagtcatgagccagcgcatctggccaccttattttctattactggctcaatgtaatggctccatctcaggaacagccaatgaaagagatgcacaggacaaggctaccacatactgttgattgtgatgaaatgccagttgaagcacctgtcctgcgagcttaggggtgctacaagttgaccactgcagcagtaaagatgactctgaagaatggcatgggatggatcctttcgaatgcacttgagcagcggtctccaaccacagggccacagagctggagctggatctaccatgaaagacctctgaatccaggaagagagactgactgagcaacatgttattcagggtctccatctgttgtccaaggctggagtgtagtagtgctatcacagctgactgcagcctcaaccttccaggctgaagcgatcctcccatctcaacctcccacgtggctgagactacaggtgcttgccactatgcccaactaatatttggaattttcgtatacgtggattccagaggggtgacagtgaaacgtgggaccatccagttgcaggaaaacaagcttaagacgcccactgattctacattatgctcctacctcccggcagcctctccaggcccagaactttctccagtcagcctctacagaccaagctcatgactcacaatggcctatttaggcccataccctacgtcacggcagtctccgcagatgagcctactgccccacaacagcctccacaggcacagctccatcgttacaatggcctctttagacccagctcctgcctcccagccttctctccaggccctgaactttctcaagtcgacctcaccaggcccagctcatgcttctttgcagcctctccaggcccagctcctgcatcttggtggcccctccaggcccagcctctgcctcccgtcggcctctacagtcccaacatctgcctcacagcagattcttcacgcccagcctctgcctcacagtggaccctccagacccagatggtgtctcactgtggcatcctcagtcgaagctcctgcctttcggcagcctctccaggcccagctcctcctgcctcccagtggcctctttcggcccagcccagctcatgcctcccggcggccttcccaagccccgcttttgacttttggtggcctctgcaggcctcgacaaggcccagcctcctgcctcccgaaggcctgcacaggcccagcctctgcctcacagcggactctccacgcccagctagctctcgcctcactgcggcctccccagtccaaagctcctgcctttcggccacttcggcaggtccagctactgcctgccagtggcctctttaggcccagctcattcctcacaacggcctttccaggccccgtttttcccttctggcagcctcttggcttctaatttgtttatcttttgtgtataaatcccaaaatatggaattttggaatatttccaccattatatattttggtcggtaatttatttggagtgagtttctgcaccatgcccgaactttttgttttattttccttattatttggtgttaaacaggtttaatgacggtcatggcaactttttggcacaatgaaaaatatcgcccatgatcaacgtgttctgttctggggaagggggcaaaggcagggtgaatcactttcttaaaaagtatagctcaagttgggagtgcagagggaatggggagaaaacccttccgctgcctgtgtcgaagtgcaggagcccccacccccatactcacctgagtccagcccctctggggaaagaaggggtgcatgaactccccttagtccacaggcgcctccctgtggcccaaggccctcttcacactccatcttgtagccccagcaggagctattttccgaaaatgctgggattacaggcgtgagccactgtgcccagctgagatctgatggttttaaaaagaggagctcccctgcatgagatctcactttttgcctgctaccatttatgtaagatgtgacttgctccttcttgccttccatcatgactgtgaagcttccccagccatatggaattgtaagttcaattaaacttcttttctttgtaaattcnaaagccctccctttacacttgcaaagggtcccaaaatacttccttgaggggggggccccgtaccccaattcgccctttggtggagtcgttttaacaattccctggcccgccgttttaa

SEQ ID NO: 459399 - DNA, 3455 bp, Homo sapiens
  misc_feature (3337)..(3337): n is a, c, g, or t
agatgatgattattccccaccttctaagagacaaagaccaacgagccaccacagccaccggtcccagaacccgccaatgctggggaacggaaaatgagggagttcaactctggccctcacaatccagtggaggagacgaaactcagctgcctctgtccctctgggcacgcctcatgccaggtgcatctgtggacaggggccatgctcctgggcttccaaagttggagaaagctgccaggctcaggtctgaaggccagaattctacagtaagtcctactcagtcaaggtgggagcagggtcagtggcttccgaggctctgcgggagaatccgtttcctggccgtggaggtggcctgcactcctcagcttgtgctgcccgtctcgaatgactggagtttcctgcttctgtcactacacctcccaccctctccatcacctgctctgctcttataaggatccgaagaaatggaataatcgtatcgctgatctacgtaaacaaattgaagaattgtctgaaagaaaatatgttatgtctaaactggaaaagtcctgtaatcttatgttcatgggcttttacacaatggagttactgttcatcatgggggtaccgtggacaagcccagagctgccggcgagtcatgccatccttacacgtttctccttggaagacgtgaacttatgaattcaacaggtgaagatttacaacttgataaatcagcttcatgagagccacctgagctgaagattcccttgagaacaagtactgtcctgtggtttcatggcctttcttccatttgtggttcttgcgaagtggaatttaaatgacatcttatcaagatggataaaccctagtttcccagtgctggaatatagaaaatggatggacaagtaaatctcactcagcacccatagtccaggcatggggacctcaacacacctgagccccagacatcacctttcattctggacctaccatgaaagacttctgaatccaggaagagagactgactgggaaacatgttattcagatggggtcttcttatgttgcccaggctggtctcaaattcctaggctcaagtgattccgcccacctctgcctcccaaagtgctgggattacagtcatgagccagcgcatctggccaccttattttctattactggctcaatgtaatggctccatctcaggaacagccaatgaaagagatgcacaggacaaggctaccacatactgttgattgtgatgaaatgccagttgaagcacctgtcctgcgagcttaggggtgctacaagttgaccactgcagcagtaaagatgactctgaagaatggcatgggatggatcctttcgaatgcacttgagcagcggtctccaaccacagggccacagagctggagctggatctaccatgaaagacctctgaatccaggaagagagactgactgagcaacatgttattcaggagatggggtctcaccctgtcacccaggcttgactacagtagtgctatcacagctcactgcagccttgaactcctgggctaaggatcctcctacctgagcctcctgagtagctaggactggtctccatctgttgtccaaggctggagtgtagtagtgctatcacagctgactgcagcctcaaccttccaggctgaagcgatcctcccatctcaacctcccacgtggctgagactacaggtgcttgccactatgcccaactaatatttggaattttcgtatacgtggattccagaggggtgacagtgaaacgtgggaccatccagttgcaggaaaacaagcttaagacgcccactgattctacattatgctcctacctcccggcagcctctccaggcccagaactttctccagtcagcctctacagaccaagctcatgactcacaatggcctatttaggcccataccctacgtcacggcagtctccgcagatgagcctactgccccacaacagcctccacaggcacagctccatcgttacaatggcctctttagacccagctcctgcctcccagccttctctccaggccctgaactttctcaagtcgacctcaccaggcccagctcatgcttctttgcagcctctccaggcccagctcctgcatcttggtggcccctccaggcccagcctctgcctcccgtcggcctctacagtcccaacatctgcctcacagcagattcttcacgcccagcctctgcctcacagtggaccctccagacccagatggtgtctcactgtggcatcctcagtcgaagctcctgcctttcggcagcctctccaggcccagctcctcctgcctcccagtggcctctttcggcccagcccagctcatgcctcccggcggccttcccaagccccgcttttgacttttggtggcctctgcaggcctcgacaaggcccagcctcctgcctcccgaaggcctgcacaggcccagcctctgcctcacagcggactctccacgcccagctagctctcgcctcactgcggcctccccagtccaaagctcctgcctttcggccacttcggcaggtccagctactgcctgccagtggcctctttaggcccagctcattcctcacaacggcctttccaggccccgtttttcccttctggcagcctcttggcttctaatttgtttatcttttgtgtataaatcccaaaatatggaattttggaatatttccaccattatatattttggtcggtaatttatttggagtgagtttctgcaccatgcccgaactttttgttttattttccttattatttggtgttaaacaggtttaatgacggtcatggcaactttttggcacaatgaaaaatatcgcccatgatcaacgtgttctgttctggggaagggggcaaaggcagggtgaatcactttcttaaaaagtatagctcaagttgggagtgcagagggaatggggagaaaacccttccgctgcctgtgtcgaagtgcaggagcccccacccccatactcacctgagtccagcccctctggggaaagaaggggtgcatgaactccccttagtccacaggcgcctccctgtggcccaaggccctcttcacactccatcttgtagccccagcaggagctattttccgaaaatgctgggattacaggcgtgagccactgtgcccagctgagatctgatggttttaaaaagaggagctcccctgcatgagatctcactttttgcctgctaccatttatgtaagatgtgacttgctccttcttgccttccatcatgactgtgaagcttccccagccatatggaattgtaagttcaattaaacttcttttctttgtaaattcnaaagccctccctttacacttgcaaagggtcccaaaatacttccttgaggggggggccccgtaccccaattcgccctttggtggagtcgttttaacaattccctggcccgccgttttaa

SEQ ID NO: 459400 - DNA, 1331 bp, Homo sapiens
tgggattacaggtaagtgccaccacacccagctgatttttgtgttttttgtagagacgaggtttcgccatgtttcccagactgttctcaaactcctgagctcaaagcagtccacccaccttggcctcccaaagtgctgggattacaggtgtgagccaccttgctcattctagtttaaactttggagtggtttgtgtctcctgattggactcctgcaaatacagaattgatgctaggaagggtaccaggagatagacgcacacagatgggatttgggaataggtttggttatccaaggagcagtgctgagctccttgctaatgggatatgggatgctggtgatttccagtaagtgacctcaaaattactcaaggctaccacatactgttgattgtgatgaaatgccagttgaagcacctgtcctgcgagcttaggggtgctacaagttgaccactgcagcagtaaagatgactctgaagaatggcatgggatggatcctttcgaatgcacttgagcagcggtctccaaccacagggccacagagctggagctggatctaccatgaaagacctctgaatccaggaagagagactgactgagcaacatgttattcagggtctccatctgttgtccaaggctggagtgtagtagtgctatcacagctgactgcagcctcaaccttccaggctgaagcgatcctcccatctcaacctcccacgtggctgagactacaggtgcttgccactatgcccaactaatatttggaattttcgtatacgtggattccagaggggtgacagtgaaacgtgggaccatccagttgcaggaaaacaagcttaagacgcccactgattctacattatgctcctacctcccggcagcctctccaggcccagaactttctccagtcagcctctacagaccaagctcatgactcacaatggcctatttaggcccataccctacgtcacggcagtctccgcagatgagcctactgccccacaacagcctccacaggcacagctccatcgttacaatggcctctttagacccagctcctgcctcccagccttctctccaggccctgaactttctcaagtcgacctcaccaggcccagctcatgcttctttgcagcctctccaggcccagctcctgcatcttggtggcccctccaggcccagcctctgcctcccgtcggcctctacagtcccaacatctgcctcacagcagattcttcacgcccagcatctgcctcactgtggaccccccaagccaagctcccaacctttcagcagcttctacacacccagctcctgccacccagtggcctc

SEQ ID NO: 459401 - DNA, 3283 bp, Homo sapiens
  misc_feature (3165)..(3165): n is a, c, g, or t
agatgatgattattccccaccttctaagagacaaagaccaacgagccaccacagccaccggtcccagaacccgccaatgctggggaacggaaaatgagggagttcaactctggccctcacaatccagtggaggagacgaaactcagctgcctctgtccctctgggcacgcctcatgccaggtgcatctgtggacaggggccatgctcctgggcttccaaagttggagaaagctgccaggctcaggtctgaaggccagaattctacagtaagtcctactcagtcaaggtgggagcagggtcagtggcttccgaggctctgcgggagaatccgtttcctggccgtggaggtggcctgcactcctcagcttgtgctgcccgtctcgaatgactggagtttcctgcttctgtcactacacctcccaccctctccatcacctgctctgctcttataaggatccgaagaaatggaataatcgtatcgctgatctacgtaaacaaattgaagaattgtctgaaagaaaatatgttatgtctaaactggaaaagtcctgtaatcttatgttcatgggcttttacacaatggagttactgttcatcatgggggtaccgtggacaagcccagagctgccggcgagtcatgccatccttacacgtttctccttggaagacgtgaacttatgaattcaacaggtgaagatttacaacttgataaatcagcttcatgagagccacctgagctgaagattcccttgagaacaagtactgtcctgtggtttcatggcctttcttccatttgtggttcttgcgaagtggaatttaaatgacatcttatcaagatggataaaccctagtttcccagtgctggaatatagaaaatggatggacaagtaaatctcactcagcacccatagtccaggcatggggacctcaacacacctgagccccagacatcacctttcattctggacctaccatgaaagacttctgaatccaggaagagagactgactgggaaacatgttattcagatggggtcttcttatgttgcccaggctggtctcaaattcctaggctcaagtgattccgcccacctctgcctcccaaagtgctgggattacagtcatgagccagcgcatctggccaccttattttctattactggctcaatgtaatggctccatctcaggaacagccaatgaaagagatgcacaggacaagaaacaggaccttgccctgtcactcaggatggagttcagtggtccaattatggctcattgtagcctcaaactcccaggctcaagcagtcctaccatgtcagccttcccagtagctgggaccacagctggatctaccatgaaagacctctgaatccaggaagagagactgactgagcaacatgttattcagggtctccatctgttgtccaaggctggagtgtagtagtgctatcacagctgactgcagcctcaaccttccaggctgaagcgatcctcccatctcaacctcccacgtggctgagactacaggtgcttgccactatgcccaactaatatttggaattttcgtatacgtggattccagaggggtgacagtgaaacgtgggaccatccagttgcaggaaaacaagcttaagacgcccactgattctacattatgctcctacctcccggcagcctctccaggcccagaactttctccagtcagcctctacagaccaagctcatgactcacaatggcctatttaggcccataccctacgtcacggcagtctccgcagatgagcctactgccccacaacagcctccacaggcacagctccatcgttacaatggcctctttagacccagctcctgcctcccagccttctctccaggccctgaactttctcaagtcgacctcaccaggcccagctcatgcttctttgcagcctctccaggcccagctcctgcatcttggtggcccctccaggcccagcctctgcctcccgtcggcctctacagtcccaacatctgcctcacagcagattcttcacgcccagcctctgcctcacagtggaccctccagacccagatggtgtctcactgtggcatcctcagtcgaagctcctgcctttcggcagcctctccaggcccagctcctcctgcctcccagtggcctctttcggcccagcccagctcatgcctcccggcggccttcccaagccccgcttttgacttttggtggcctctgcaggcctcgacaaggcccagcctcctgcctcccgaaggcctgcacaggcccagcctctgcctcacagcggactctccacgcccagctagctctcgcctcactgcggcctccccagtccaaagctcctgcctttcggccacttcggcaggtccagctactgcctgccagtggcctctttaggcccagctcattcctcacaacggcctttccaggccccgtttttcccttctggcagcctcttggcttctaatttgtttatcttttgtgtataaatcccaaaatatggaattttggaatatttccaccattatatattttggtcggtaatttatttggagtgagtttctgcaccatgcccgaactttttgttttattttccttattatttggtgttaaacaggtttaatgacggtcatggcaactttttggcacaatgaaaaatatcgcccatgatcaacgtgttctgttctggggaagggggcaaaggcagggtgaatcactttcttaaaaagtatagctcaagttgggagtgcagagggaatggggagaaaacccttccgctgcctgtgtcgaagtgcaggagcccccacccccatactcacctgagtccagcccctctggggaaagaaggggtgcatgaactccccttagtccacaggcgcctccctgtggcccaaggccctcttcacactccatcttgtagccccagcaggagctattttccgaaaatgctgggattacaggcgtgagccactgtgcccagctgagatctgatggttttaaaaagaggagctcccctgcatgagatctcactttttgcctgctaccatttatgtaagatgtgacttgctccttcttgccttccatcatgactgtgaagcttccccagccatatggaattgtaagttcaattaaacttcttttctttgtaaattcnaaagccctccctttacacttgcaaagggtcccaaaatacttccttgaggggggggccccgtaccccaattcgccctttggtggagtcgttttaacaattccctggcccgccgttttaa

SEQ ID NO: 459402 - DNA, 2005 bp, Homo sapiens
  misc_feature (1887)..(1887): n is a, c, g, or t
cccgcgtgatctagagatcccccggtacgagcggtctcaccacagtgccacagatgctgtgagctggatctaccatgaaagacctctgaatccaggaagagagactgactgagcaacatgttattcagggtctccatctgttgtccaaggctggagtgtagtagtgctatcacagctgactgcagcctcaaccttccaggctgaagcgatcctcccatctcaacctcccacgtggctgagactacaggtgcttgccactatgcccaactaatatttggaattttcgtatacgtggattccagaggggtgacagtgaaacgtgggaccatccagttgcaggaaaacaagcttaagacgcccactgattctacattatgctcctacctcccggcagcctctccaggcccagaactttctccagtcagcctctacagaccaagctcatgactcacaatggcctatttaggcccataccctacgtcacggcagtctccgcagatgagcctactgccccacaacagcctccacaggcacagctccatcgttacaatggcctctttagacccagctcctgcctcccagccttctctccaggccctgaactttctcaagtcgacctcaccaggcccagctcatgcttctttgcagcctctccaggcccagctcctgcatcttggtggcccctccaggcccagcctctgcctcccgtcggcctctacagtcccaacatctgcctcacagcagattcttcacgcccagcctctgcctcacagtggaccctccagacccagatggtgtctcactgtggcatcctcagtcgaagctcctgcctttcggcagcctctccaggcccagctcctcctgcctcccagtggcctctttcggcccagcccagctcatgcctcccggcggccttcccaagccccgcttttgacttttggtggcctctgcaggcctcgacaaggcccagcctcctgcctcccgaaggcctgcacaggcccagcctctgcctcacagcggactctccacgcccagctagctctcgcctcactgcggcctccccagtccaaagctcctgcctttcggccacttcggcaggtccagctactgcctgccagtggcctctttaggcccagctcattcctcacaacggcctttccaggccccgtttttcccttctggcagcctcttggcttctaatttgtttatcttttgtgtataaatcccaaaatatggaattttggaatatttccaccattatatattttggtcggtaatttatttggagtgagtttctgcaccatgcccgaactttttgttttattttccttattatttggtgttaaacaggtttaatgacggtcatggcaactttttggcacaatgaaaaatatcgcccatgatcaacgtgttctgttctggggaagggggcaaaggcagggtgaatcactttcttaaaaagtatagctcaagttgggagtgcagagggaatggggagaaaacccttccgctgcctgtgtcgaagtgcaggagcccccacccccatactcacctgagtccagcccctctggggaaagaaggggtgcatgaactccccttagtccacaggcgcctccctgtggcccaaggccctcttcacactccatcttgtagccccagcaggagctattttccgaaaatgctgggattacaggcgtgagccactgtgcccagctgagatctgatggttttaaaaagaggagctcccctgcatgagatctcactttttgcctgctaccatttatgtaagatgtgacttgctccttcttgccttccatcatgactgtgaagcttccccagccatatggaattgtaagttcaattaaacttcttttctttgtaaattcnaaagccctccctttacacttgcaaagggtcccaaaatacttccttgaggggggggccccgtaccccaattcgccctttggtggagtcgttttaacaattccctggcccgccgttttaa

SEQ ID NO: 459403 - DNA, 2101 bp, Homo sapiens
  misc_feature (1983)..(1983): n is a, c, g, or t
aagcacaaactgttgtgaagtgtgcatgcgagggatctaggttgtgtactccttatgagaatctaatgcctgatattctgttactgtttcccatcaccccagatggacagtctagttgcaggaaaacaagctcagagatcccactgagtctacgttatactggatctaccatgaaagacctctgaatccaggaagagagactgactgagcaacatgttattcagggtctccatctgttgtccaaggctggagtgtagtagtgctatcacagctgactgcagcctcaaccttccaggctgaagcgatcctcccatctcaacctcccacgtggctgagactacaggtgcttgccactatgcccaactaatatttggaattttcgtatacgtggattccagaggggtgacagtgaaacgtgggaccatccagttgcaggaaaacaagcttaagacgcccactgattctacattatgctcctacctcccggcagcctctccaggcccagaactttctccagtcagcctctacagaccaagctcatgactcacaatggcctatttaggcccataccctacgtcacggcagtctccgcagatgagcctactgccccacaacagcctccacaggcacagctccatcgttacaatggcctctttagacccagctcctgcctcccagccttctctccaggccctgaactttctcaagtcgacctcaccaggcccagctcatgcttctttgcagcctctccaggcccagctcctgcatcttggtggcccctccaggcccagcctctgcctcccgtcggcctctacagtcccaacatctgcctcacagcagattcttcacgcccagcctctgcctcacagtggaccctccagacccagatggtgtctcactgtggcatcctcagtcgaagctcctgcctttcggcagcctctccaggcccagctcctcctgcctcccagtggcctctttcggcccagcccagctcatgcctcccggcggccttcccaagccccgcttttgacttttggtggcctctgcaggcctcgacaaggcccagcctcctgcctcccgaaggcctgcacaggcccagcctctgcctcacagcggactctccacgcccagctagctctcgcctcactgcggcctccccagtccaaagctcctgcctttcggccacttcggcaggtccagctactgcctgccagtggcctctttaggcccagctcattcctcacaacggcctttccaggccccgtttttcccttctggcagcctcttggcttctaatttgtttatcttttgtgtataaatcccaaaatatggaattttggaatatttccaccattatatattttggtcggtaatttatttggagtgagtttctgcaccatgcccgaactttttgttttattttccttattatttggtgttaaacaggtttaatgacggtcatggcaactttttggcacaatgaaaaatatcgcccatgatcaacgtgttctgttctggggaagggggcaaaggcagggtgaatcactttcttaaaaagtatagctcaagttgggagtgcagagggaatggggagaaaacccttccgctgcctgtgtcgaagtgcaggagcccccacccccatactcacctgagtccagcccctctggggaaagaaggggtgcatgaactccccttagtccacaggcgcctccctgtggcccaaggccctcttcacactccatcttgtagccccagcaggagctattttccgaaaatgctgggattacaggcgtgagccactgtgcccagctgagatctgatggttttaaaaagaggagctcccctgcatgagatctcactttttgcctgctaccatttatgtaagatgtgacttgctccttcttgccttccatcatgactgtgaagcttccccagccatatggaattgtaagttcaattaaacttcttttctttgtaaattcnaaagccctccctttacacttgcaaagggtcccaaaatacttccttgaggggggggccccgtaccccaattcgccctttggtggagtcgttttaacaattccctggcccgccgttttaa

SEQ ID NO: 459404 - DNA, 3383 bp, Homo sapiens
  misc_feature (3265)..(3265): n is a, c, g, or t
agatgatgattattccccaccttctaagagacaaagaccaacgagccaccacagccaccggtcccagaacccgccaatgctggggaacggaaaatgagggagttcaactctggccctcacaatccagtggaggagacgaaactcagctgcctctgtccctctgggcacgcctcatgccaggtgcatctgtggacaggggccatgctcctgggcttccaaagttggagaaagctgccaggctcaggtctgaaggccagaattctacagtaagtcctactcagtcaaggtgggagcagggtcagtggcttccgaggctctgcgggagaatccgtttcctggccgtggaggtggcctgcactcctcagcttgtgctgcccgtctcgaatgactggagtttcctgcttctgtcactacacctcccaccctctccatcacctgctctgctcttataaggatccgaagaaatggaataatcgtatcgctgatctacgtaaacaaattgaagaattgtctgaaagaaaatatgttatgtctaaactggaaaagtcctgtaatcttatgttcatgggcttttacacaatggagttactgttcatcatgggggtaccgtggacaagcccagagctgccggcgagtcatgccatccttacacgtttctccttggaagacgtgaacttatgaattcaacaggtgaagatttacaacttgataaatcagcttcatgagagccacctgagctgaagattcccttgagaacaagtactgtcctgtggtttcatggcctttcttccatttgtggttcttgcgaagtggaatttaaatgacatcttatcaagatggataaaccctagtttcccagtgctggaatatagaaaatggatggacaagtaaatctcactcagcacccatagtccaggcatggggacctcaacacacctgagccccagacatcacctttcattctggacctaccatgaaagacttctgaatccaggaagagagactgactgggaaacatgttattcagatggggtcttcttatgttgcccaggctggtctcaaattcctaggctcaagtgattccgcccacctctgcctcccaaagtgctgggattacagtcatgagccagcgcatctggccaccttattttctattactggctcaatgtaatggctccatctcaggaacagccaatgaaagagatgcacaggacaaggctaccacatactgttgattgtgatgaaatgccagttgaagcacctgtcctgcgagcttaggggtgctacaagttgaccactgcagcagtaaagatgactctgaagaatggcatgggatggatcctttcgaatgcacttgagcagcggtctccaaccacagggccacagagctggagctggatctaccatgaaagacctctgaatccaggaagagagactgactgagcaacatgttattcaggagatggggtctcaccctgtcacccaggcttgactacagtagtgctatcacagctcactgcagccttgaactcctgggctaaggatcctcctacctgagcctcctgagtagctaggactggtctccatctgttgtccaaggctggagtgtagtagtgctatcacagctgactgcagcctcaaccttccaggctgaagcgatcctcccatctcaacctcccacgtggctgagactacaggtgggaccatccagttgcaggaaaacaagcttaagacgcccactgattctacattatgctcctacctcccggcagcctctccaggcccagaactttctccagtcagcctctacagaccaagctcatgactcacaatggcctatttaggcccataccctacgtcacggcagtctccgcagatgagcctactgccccacaacagcctccacaggcacagctccatcgttacaatggcctctttagacccagctcctgcctcccagccttctctccaggccctgaactttctcaagtcgacctcaccaggcccagctcatgcttctttgcagcctctccaggcccagctcctgcatcttggtggcccctccaggcccagcctctgcctcccgtcggcctctacagtcccaacatctgcctcacagcagattcttcacgcccagcctctgcctcacagtggaccctccagacccagatggtgtctcactgtggcatcctcagtcgaagctcctgcctttcggcagcctctccaggcccagctcctcctgcctcccagtggcctctttcggcccagcccagctcatgcctcccggcggccttcccaagccccgcttttgacttttggtggcctctgcaggcctcgacaaggcccagcctcctgcctcccgaaggcctgcacaggcccagcctctgcctcacagcggactctccacgcccagctagctctcgcctcactgcggcctccccagtccaaagctcctgcctttcggccacttcggcaggtccagctactgcctgccagtggcctctttaggcccagctcattcctcacaacggcctttccaggccccgtttttcccttctggcagcctcttggcttctaatttgtttatcttttgtgtataaatcccaaaatatggaattttggaatatttccaccattatatattttggtcggtaatttatttggagtgagtttctgcaccatgcccgaactttttgttttattttccttattatttggtgttaaacaggtttaatgacggtcatggcaactttttggcacaatgaaaaatatcgcccatgatcaacgtgttctgttctggggaagggggcaaaggcagggtgaatcactttcttaaaaagtatagctcaagttgggagtgcagagggaatggggagaaaacccttccgctgcctgtgtcgaagtgcaggagcccccacccccatactcacctgagtccagcccctctggggaaagaaggggtgcatgaactccccttagtccacaggcgcctccctgtggcccaaggccctcttcacactccatcttgtagccccagcaggagctattttccgaaaatgctgggattacaggcgtgagccactgtgcccagctgagatctgatggttttaaaaagaggagctcccctgcatgagatctcactttttgcctgctaccatttatgtaagatgtgacttgctccttcttgccttccatcatgactgtgaagcttccccagccatatggaattgtaagttcaattaaacttcttttctttgtaaattcnaaagccctccctttacacttgcaaagggtcccaaaatacttccttgaggggggggccccgtaccccaattcgccctttggtggagtcgttttaacaattccctggcccgccgttttaa

SEQ ID NO: 459405 - DNA, 3264 bp, Homo sapiens
  misc_feature (3146)..(3146): n is a, c, g, or t
agatgatgattattccccaccttctaagagacaaagaccaacgagccaccacagccaccggtcccagaacccgccaatgctggggaacggaaaatgagggagttcaactctggccctcacaatccagtggaggagacgaaactcagctgcctctgtccctctgggcacgcctcatgccaggtgcatctgtggacaggggccatgctcctgggcttccaaagttggagaaagctgccaggctcaggtctgaaggccagaattctacagtaagtcctactcagtcaaggtgggagcagggtcagtggcttccgaggctctgcgggagaatccgtttcctggccgtggaggtggcctgcactcctcagcttgtgctgcccgtctcgaatgactggagtttcctgcttctgtcactacacctcccaccctctccatcacctgctctgctcttataaggatccgaagaaatggaataatcgtatcgctgatctacgtaaacaaattgaagaattgtctgaaagaaaatatgttatgtctaaactggaaaagtcctgtaatcttatgttcatgggcttttacacaatggagttactgttcatcatgggggtaccgtggacaagcccagagctgccggcgagtcatgccatccttacacgtttctccttggaagacgtgaacttatgaattcaacaggtgaagatttacaacttgataaatcagcttcatgagagccacctgagctgaagattcccttgagaacaagtactgtcctgtggtttcatggcctttcttccatttgtggttcttgcgaagtggaatttaaatgacatcttatcaagatggataaaccctagtttcccagtgctggaatatagaaaatggatggacaagtaaatctcactcagcacccatagtccaggcatggggacctcaacacacctgagccccagacatcacctttcattctggacctaccatgaaagacttctgaatccaggaagagagactgactgggaaacatgttattcagatggggtcttcttatgttgcccaggctggtctcaaattcctaggctcaagtgattccgcccacctctgcctcccaaagtgctgggattacagtcatgagccagcgcatctggccaccttattttctattactggctcaatgtaatggctccatctcaggaacagccaatgaaagagatgcacaggacaaggctaccacatactgttgattgtgatgaaatgccagttgaagcacctgtcctgcgagcttaggggtgctacaagttgaccactgcagcagtaaagatgactctgaagaatggcatgggatggatcctttcgaatgcacttgagcagcggtctccaaccacagggccacagagctggagctggatctaccatgaaagacctctgaatccaggaagagagactgactgagcaacatgttattcagggtctccatctgttgtccaaggctggagtgtagtagtgctatcacagctgactgcagcctcaaccttccaggctgaagcgatcctcccatctcaacctcccacgtggctgagactacaggtgggaccatccagttgcaggaaaacaagcttaagacgcccactgattctacattatgctcctacctcccggcagcctctccaggcccagaactttctccagtcagcctctacagaccaagctcatgactcacaatggcctatttaggcccataccctacgtcacggcagtctccgcagatgagcctactgccccacaacagcctccacaggcacagctccatcgttacaatggcctctttagacccagctcctgcctcccagccttctctccaggccctgaactttctcaagtcgacctcaccaggcccagctcatgcttctttgcagcctctccaggcccagctcctgcatcttggtggcccctccaggcccagcctctgcctcccgtcggcctctacagtcccaacatctgcctcacagcagattcttcacgcccagcctctgcctcacagtggaccctccagacccagatggtgtctcactgtggcatcctcagtcgaagctcctgcctttcggcagcctctccaggcccagctcctcctgcctcccagtggcctctttcggcccagcccagctcatgcctcccggcggccttcccaagccccgcttttgacttttggtggcctctgcaggcctcgacaaggcccagcctcctgcctcccgaaggcctgcacaggcccagcctctgcctcacagcggactctccacgcccagctagctctcgcctcactgcggcctccccagtccaaagctcctgcctttcggccacttcggcaggtccagctactgcctgccagtggcctctttaggcccagctcattcctcacaacggcctttccaggccccgtttttcccttctggcagcctcttggcttctaatttgtttatcttttgtgtataaatcccaaaatatggaattttggaatatttccaccattatatattttggtcggtaatttatttggagtgagtttctgcaccatgcccgaactttttgttttattttccttattatttggtgttaaacaggtttaatgacggtcatggcaactttttggcacaatgaaaaatatcgcccatgatcaacgtgttctgttctggggaagggggcaaaggcagggtgaatcactttcttaaaaagtatagctcaagttgggagtgcagagggaatggggagaaaacccttccgctgcctgtgtcgaagtgcaggagcccccacccccatactcacctgagtccagcccctctggggaaagaaggggtgcatgaactccccttagtccacaggcgcctccctgtggcccaaggccctcttcacactccatcttgtagccccagcaggagctattttccgaaaatgctgggattacaggcgtgagccactgtgcccagctgagatctgatggttttaaaaagaggagctcccctgcatgagatctcactttttgcctgctaccatttatgtaagatgtgacttgctccttcttgccttccatcatgactgtgaagcttccccagccatatggaattgtaagttcaattaaacttcttttctttgtaaattcnaaagccctccctttacacttgcaaagggtcccaaaatacttccttgaggggggggccccgtaccccaattcgccctttggtggagtcgttttaacaattccctggcccgccgttttaa

SEQ ID NO: 459406 - DNA, 1786 bp, Homo sapiens
  misc_feature (1668)..(1668): n is a, c, g, or t
gttctagaggtcccgggcagtcgtgctggtgcttgccactatgcccaactaatatttggaattttcgtatacgtggattccagaggggtgacagtgaaacgtgggaccatccagttgcaggaaaacaagcttaagacgcccactgattctacattatgctcctacctcccggcagcctctccaggcccagaactttctccagtcagcctctacagaccaagctcatgactcacaatggcctatttaggcccataccctacgtcacggcagtctccgcagatgagcctactgccccacaacagcctccacaggcacagctccatcgttacaatggcctctttagacccagctcctgcctcccagccttctctccaggccctgaactttctcaagtcgacctcaccaggcccagctcatgcttctttgcagcctctccaggcccagctcctgcatcttggtggcccctccaggcccagcctctgcctcccgtcggcctctacagtcccaacatctgcctcacagcagattcttcacgcccagcctctgcctcacagtggaccctccagacccagatggtgtctcactgtggcatcctcagtcgaagctcctgcctttcggcagcctctccaggcccagctcctcctgcctcccagtggcctctttcggcccagcccagctcatgcctcccggcggccttcccaagccccgcttttgacttttggtggcctctgcaggcctcgacaaggcccagcctcctgcctcccgaaggcctgcacaggcccagcctctgcctcacagcggactctccacgcccagctagctctcgcctcactgcggcctccccagtccaaagctcctgcctttcggccacttcggcaggtccagctactgcctgccagtggcctctttaggcccagctcattcctcacaacggcctttccaggccccgtttttcccttctggcagcctcttggcttctaatttgtttatcttttgtgtataaatcccaaaatatggaattttggaatatttccaccattatatattttggtcggtaatttatttggagtgagtttctgcaccatgcccgaactttttgttttattttccttattatttggtgttaaacaggtttaatgacggtcatggcaactttttggcacaatgaaaaatatcgcccatgatcaacgtgttctgttctggggaagggggcaaaggcagggtgaatcactttcttaaaaagtatagctcaagttgggagtgcagagggaatggggagaaaacccttccgctgcctgtgtcgaagtgcaggagcccccacccccatactcacctgagtccagcccctctggggaaagaaggggtgcatgaactccccttagtccacaggcgcctccctgtggcccaaggccctcttcacactccatcttgtagccccagcaggagctattttccgaaaatgctgggattacaggcgtgagccactgtgcccagctgagatctgatggttttaaaaagaggagctcccctgcatgagatctcactttttgcctgctaccatttatgtaagatgtgacttgctccttcttgccttccatcatgactgtgaagcttccccagccatatggaattgtaagttcaattaaacttcttttctttgtaaattcnaaagccctccctttacacttgcaaagggtcccaaaatacttccttgaggggggggccccgtaccccaattcgccctttggtggagtcgttttaacaattccctggcccgccgttttaa

SEQ ID NO: 459407 - DNA, 2223 bp, Homo sapiens
agatgatgattattccccaccttctaagagacaaagaccaacgagccaccacagccaccggtcccagaacccgccaatgctggggaacggaaaatgagggagttcaactctggccctcacaatccagtggaggagacgaaactcagctgcctctgtccctctgggcacgcctcatgccaggtgcatctgtggacaggggccatgctcctgggcttccaaagttggagaaagctgccaggctcaggtctgaaggccagaattctacagtaagtcctactcagtcaaggtgggagcagggtcagtggcttccgaggctctgcgggagaatccgtttcctggccgtggaggtggcctgcactcctcagcttgtgctgcccgtctcgaatgactggagtttcctgcttctgtcactacacctcccaccctctccatcacctgctctgctcttataaggatccgaagaaatggaataatcgtatcgctgatctacgtaaacaaattgaagaattgtctgaaagaaaatatgttatgtctaaactggaaaagtcctgtaatcttatgttcatgggcttttacacaatggagttactgttcatcatgggggtaccgtggacaagcccagagctgccggcgagtcatgccatccttacacgtttctccttggaagacgtgaacttatgaattcaacaggtgaagatttacaacttgataaatcagcttcatgagagccacctgagctgaagattcccttgagaacaagtactgtcctgtggtttcatggcctttcttccatttgtggttcttgcgaagtggaatttaaatgacatcttatcaagatggataaaccctagtttcccagtgctggaatatagaaaatggatggacaagtaaatctcactcagcacccatagtccaggcatggggacctcaacacacctgagccccagacatcacctttcattctggacctaccatgaaagacttctgaatccaggaagagagactgactgggaaacatgttattcagatggggtcttcttatgttgcccaggctggtctcaaattcctaggctcaagtgattccgcccacctctgcctcccaaagtgctgggattacagtcatgagccagcgcatctggccaccttattttctattactggctcaatgtaatggctccatctcaggaacagccaatgaaagagatgcacaggacaaggctaccacatactgttgattgtgatgaaatgccagttgaagcacctgtcctgcgagcttaggggtgctacaagttgaccactgcagcagtaaagatgactctgaagaatggcatgggatggatcctttcgaatgcacttgagcagcggtctccaaccacagggccacagagctggagctggatctaccatgaaagacctctgaatccaggaagagagactgactgagcaacatgttattcaggagatggggtctcaccctgtcacccaggcttgactacagtagtgctatcacagctcactgcagccttgaactcctgggctaaggatcctcctacctgagcctcctgagtagctaggactggtctccatctgttgtccaaggctggagtgtagtagtgctatcacagctgactgcagcctcaaccttccaggctgaagcgatcctcccatctcaacctcccacgtggctgagactacaggtgggaccatccagttgcaggaaaacaagcttaagacgcccactgattctacattatgctcctacctcccggcagcctctccaggcccagaactttctccagtcagcctctacagaccaagctcatgactcacaatggcctatttaggcccataccctacgtcacggcagtctccgcagatgagcctactgccccacaacagcctccacaggcacagctccatcgttacaatggcctctttagacccagctcctgcctcccagccttctctccaggccctgaactttctcaagtcgacctcaccaggcccagctcatgcttctttgcagcctctccaggcccagctcctgcatcttggtggcccctccaggcccagcctctgcctcccgtcggcctctacagtcccaacatctgcctcacagcagattcttcacgcccagcatctgcctcactgtggaccccccaagccaagctcccaacctttcagcagcttctacacacccagctcctgccacccagtggcctc

SEQ ID NO: 459408 - DNA, 1888 bp, Homo sapiens
agatgatgattattccccaccttctaagagacaaagaccaacgagccaccacagccaccggtcccagaacccgccaatgctggggaacggaaaatgagggagttcaactctggccctcacaatccagtggaggagacgaaactcagctgcctctgtccctctgggcacgcctcatgccaggtgcatctgtggacaggggccatgctcctgggcttccaaagttggagaaagctgccaggctcaggtctgaaggccagaattctacagtaagtcctactcagtcaaggtgggagcagggtcagtggcttccgaggctctgcgggagaatccgtttcctggccgtggaggtggcctgcactcctcagcttgtgctgcccgtctcgaatgactggagtttcctgcttctgtcactacacctcccaccctctccatcacctgctctgctcttataaggatccgaagaaatggaataatcgtatcgctgatctacgtaaacaaattgaagaattgtctgaaagaaaatatgttatgtctaaactggaaaagtcctgtaatcttatgttcatgggcttttacacaatggagttactgttcatcatgggggtaccgtggacaagcccagagctgccggcgagtcatgccatccttacacgtttctccttggaagacgtgaacttatgaattcaacaggtgaagatttacaacttgataaatcagcttcatgagagccacctgagctgaagattcccttgagaacaagtactgtcctgtggtttcatggcctttcttccatttgtggttcttgcgaagtggaatttaaatgacatcttatcaagatggataaaccctagtttcccagtgctggaatatagaaaatggatggacaagtaaatctcactcagcacccatagtccaggcatggggacctcaacacacctgagccccagacatcacctttcattctggacctaccatgaaagacttctgaatccaggaagagagactgactgggaaacatgttattcagatggggtcttcttatgttgcccaggctggtctcaaattcctaggctcaagtgattccgcccacctctgcctcccaaagtgctgggattacagtcatgagccagcgcatctggccaccttattttctattactggctcaatgtaatggctccatctcaggaacagccaatgaaagagatgcacaggacaaggctaccacatactgttgattgtgatgaaatgccagttgaagcacctgtcctgcgagcttaggggtgctacaagttgaccactgcagcagtaaagatgactctgaagaatggcatgggatggatcctttcgaatgcacttgagcagcggtctccaaccacagggccacagagctggagctggatctaccatgaaagacctctgaatccaggaagagagactgactgagcaacatgttattcaggagatggggtctcaccctgtcacccaggcttgactacagtagtgctatcacagctcactgcagccttgaactcctgggctaaggatcctcctacctgagcctcctgagtagctaggactggtctccatctgttgtccaaggctggagtgtagtagtgctatcacagctgactgcagcctcaaccttccaggctgaagcgatcctcccatctcaacctcccacgtggctgagactacaggtgcttgccactatgcccaactaatatttggaattttcgtatacgtggattccagaggggtgacagtgaaacgtgggaccatccagttgcaggaaaacaagcttaagacgcccactgattctacattatgtcctaccctcacggcagcatctccagtccggggatcctctataatcatcgcagacattttt

SEQ ID NO: 459409 - DNA, 2145 bp, Homo sapiens
  misc_feature (2027)..(2027): n is a, c, g, or t
tcagcctgagccccttgcctcacaccggcccctcccacgcggacagaggtcagcctgagccccttgcctcacaccggcccctcccacgctgagagaggtcagtgtgagcccctgcctcaacaggccaccgtgagggaggagcagggtcgcacgcgggctgctgggaggtaggcagggacttgggcctgggaggtcgcggtggggcgagagctgggcctggagactcccctgggaggcaacagcggggtctgcagacacccttctccagctggagctgggactgttcagtcactgggagaagggatgtgggtctgaagagcttggttgcagaaacttcggggtctacaaaggccggcgggagctgagccaaaagagcttgtttgctgggaggcgggagatgcagccgggaggaacagctgggccatgcgggaggcagaggccgggcctcctcaagtcggcctctcagacccacttgcagcctcccagcgtcctctccgggcccagctcttcctcccggctgcgtctccaggccggactctggcccgactccaggtcccaacaacgtctttggactcagctcctgcccagctcccagaggccctggtaggcccacaacttccctaagccaagctccccaggcccagctcaggcctcacggtggcctctccaggctcagctcctgccctccgatggcatctgcaggccccaaacggcctccggtcggtgggcttctctaggcccagcttgggcctcccggtggcctctgcaggcccaaatcgtcccgaagtcggcctctccaggcccagctccggcctcccggcggcctctgcaggcccaagtcgtcctcaagtcggcctggaagtgggcctggaagagcagcaagtcggcctccccgggcccagctccgtcctctcggcggcctctccaggtgcaaaacttcctcgagtcagcctctccaggcccagctcttcctgcctcccagtggcctctttcggcccagcccagttcatggctctcggcggccttcccaggccccgcttttgacttttggcagcctcttcaggcgcagaacttgatctccagtcggcctttgcaggcccggcctcctgcctctcaaaggcctgcacgggcccggccttggccttggcctcacagtggactctccacgcccagctctagctctcgcctcactgcggcctccccagtccaaagctcctgcctttcggccacttcggcaggtccagctactgcctgccagtggcctctttaggcccagctcattcctcacaacggcctttccaggccccgtttttcccttctggcagcctcttggcttctaatttgtttatcttttgtgtataaatcccaaaatatggaattttggaatatttccaccattatatattttggtcggtaatttatttggagtgagtttctgcaccatgcccgaactttttgttttattttccttattatttggtgttaaacaggtttaatgacggtcatggcaactttttggcacaatgaaaaatatcgcccatgatcaacgtgttctgttctggggaagggggcaaaggcagggtgaatcactttcttaaaaagtatagctcaagttgggagtgcagagggaatggggagaaaacccttccgctgcctgtgtcgaagtgcaggagcccccacccccatactcacctgagtccagcccctctggggaaagaaggggtgcatgaactccccttagtccacaggcgcctccctgtggcccaaggccctcttcacactccatcttgtagccccagcaggagctattttccgaaaatgctgggattacaggcgtgagccactgtgcccagctgagatctgatggttttaaaaagaggagctcccctgcatgagatctcactttttgcctgctaccatttatgtaagatgtgacttgctccttcttgccttccatcatgactgtgaagcttccccagccatatggaattgtaagttcaattaaacttcttttctttgtaaattcnaaagccctccctttacacttgcaaagggtcccaaaatacttccttgaggggggggccccgtaccccaattcgccctttggtggagtcgttttaacaattccctggcccgccgttttaa

SEQ ID NO: 459410 - DNA, 1618 bp, Homo sapiens
  misc_feature (1500)..(1500): n is a, c, g, or t
tggcggccaatgtaggcccaaaacttcctcaagtcaaactctccaggcccaccttctgcttcccagtggcatgaacaggcccagctttgacttgagaacagcctctgcaggccctgctcttgcctcccaggggctttttccaggcccagctcttgcctcatggcagctgccccaggccaaatttctgcctgcctgccagcagcctcaacaggcatagctcctccctcacagtggcccatttaggcccaactcatgactgtcgggccatttccaggcctagtgcctgcctcgtggctgactcttgaagcccaaaacttcctcaaatcagccttttgcccaacttctgtctactgtcggactctacaggccaggcctctgcctcacagtggaccctccagacccagatggtgtctcactgtggcatcctcagtcgaagctcctgcctttcggcagcctctccaggcccagctcctcctgcctcccagtggcctctttcggcccagcccagctcatgcctcccggcggccttcccaagccccgcttttgacttttggtggcctctgcaggcctcgacaaggcccagcctcctgcctcccgaaggcctgcacaggcccagcctctgcctcacagcggactctccacgcccagctagctctcgcctcactgcggcctccccagtccaaagctcctgcctttcggccacttcggcaggtccagctactgcctgccagtggcctctttaggcccagctcattcctcacaacggcctttccaggccccgtttttcccttctggcagcctcttggcttctaatttgtttatcttttgtgtataaatcccaaaatatggaattttggaatatttccaccattatatattttggtcggtaatttatttggagtgagtttctgcaccatgcccgaactttttgttttattttccttattatttggtgttaaacaggtttaatgacggtcatggcaactttttggcacaatgaaaaatatcgcccatgatcaacgtgttctgttctggggaagggggcaaaggcagggtgaatcactttcttaaaaagtatagctcaagttgggagtgcagagggaatggggagaaaacccttccgctgcctgtgtcgaagtgcaggagcccccacccccatactcacctgagtccagcccctctggggaaagaaggggtgcatgaactccccttagtccacaggcgcctccctgtggcccaaggccctcttcacactccatcttgtagccccagcaggagctattttccgaaaatgctgggattacaggcgtgagccactgtgcccagctgagatctgatggttttaaaaagaggagctcccctgcatgagatctcactttttgcctgctaccatttatgtaagatgtgacttgctccttcttgccttccatcatgactgtgaagcttccccagccatatggaattgtaagttcaattaaacttcttttctttgtaaattcnaaagccctccctttacacttgcaaagggtcccaaaatacttccttgaggggggggccccgtaccccaattcgccctttggtggagtcgttttaacaattccctggcccgccgttttaa

SEQ ID NO: 459411 - DNA, 1707 bp, Homo sapiens
agatgatgattattccccaccttctaagagacaaagaccaacgagccaccacagccaccggtcccagaacccgccaatgctggggaacggaaaatgagggagttcaactctggccctcacaatccagtggaggagacgaaactcagctgcctctgtccctctgggcacgcctcatgccaggtgcatctgtggacaggggccatgctcctgggcttccaaagttggagaaagctgccaggctcaggtctgaaggccagaattctacagtaagtcctactcagtcaaggtgggagcagggtcagtggcttccgaggctctgcgggagaatccgtttcctggccgtggaggtggcctgcactcctcagcttgtgctgcccgtctcgaatgactggagtttcctgcttctgtcactacacctcccaccctctccatcacctgctctgctcttataaggatccgaagaaatggaataatcgtatcgctgatctacgtaaacaaattgaagaattgtctgaaagaaaatatgttatgtctaaactggaaaagtcctgtaatcttatgttcatgggcttttacacaatggagttactgttcatcatgggggtaccgtggacaagcccagagctgccggcgagtcatgccatccttacacgtttctccttggaagacgtgaacttatgaattcaacaggtgaagatttacaacttgataaatcagcttcatgagagccacctgagctgaagattcccttgagaacaagtactgtcctgtggtttcatggcctttcttccatttgtggttcttgcgaagtggaatttaaatgacatcttatcaagatggataaaccctagtttcccagtgctggaatatagaaaatggatggacaagtaaatctcactcagcacccatagtccaggcatggggacctcaacacacctgagccccagacatcacctttcattctggacctaccatgaaagacttctgaatccaggaagagagactgactgggaaacatgttattcagatggggtcttcttatgttgcccaggctggtctcaaattcctaggctcaagtgattccgcccacctctgcctcccaaagtgctgggattacagtcatgagccagcgcatctggccaccttattttctattactggctcaatgtaatggctccatctcaggaacagccaatgaaagagatgcacaggacaaggctaccacatactgttgattgtgatgaaatgccagttgaagcacctgtcctgcgagcttaggggtgctacaagttgaccactgcagcagtaaagatgactctgaagaatggcatgggatggatcctttcgaatgcacttgagcagcggtctccaaccacagggccacagagctggagctggatctaccatgaaagacctctgaatccaggaagagagactgactgagcaacatgttattcagggtctccatctgttgtccaaggctggagtgtagtagtgctatcacagctgactgcagcctcaaccttccaggctgaagcgatcctcccatctcaacctcccacgtggctgagactacaggtgcttgccactatgcccaactaatatttggaattttcgtatacgtggattccagaggggtgacagtgaaactaggtgacctcacagtgactcaagctaccacttactgttgattgtgacgaaatgcca

SEQ ID NO: 459412 - DNA, 1596 bp, Homo sapiens
agatgatgattattccccaccttctaagagacaaagaccaacgagccaccacagccaccggtcccagaacccgccaatgctggggaacggaaaatgagggagttcaactctggccctcacaatccagtggaggagacgaaactcagctgcctctgtccctctgggcacgcctcatgccaggtgcatctgtggacaggggccatgctcctgggcttccaaagttggagaaagctgccaggctcaggtctgaaggccagaattctacagtaagtcctactcagtcaaggtgggagcagggtcagtggcttccgaggctctgcgggagaatccgtttcctggccgtggaggtggcctgcactcctcagcttgtgctgcccgtctcgaatgactggagtttcctgcttctgtcactacacctcccaccctctccatcacctgctctgctcttataaggatccgaagaaatggaataatcgtatcgctgatctacgtaaacaaattgaagaattgtctgaaagaaaatatgttatgtctaaactggaaaagtcctgtaatcttatgttcatgggcttttacacaatggagttactgttcatcatgggggtaccgtggacaagcccagagctgccggcgagtcatgccatccttacacgtttctccttggaagacgtgaacttatgaattcaacaggtgaagatttacaacttgataaatcagcttcatgagagccacctgagctgaagattcccttgagaacaagtactgtcctgtggtttcatggcctttcttccatttgtggttcttgcgaagtggaatttaaatgacatcttatcaagatggataaaccctagtttcccagtgctggaatatagaaaatggatggacaagtaaatctcactcagcacccatagtccaggcatggggacctcaacacacctgagccccagacatcacctttcattctggacctaccatgaaagacttctgaatccaggaagagagactgactgggaaacatgttattcagatggggtcttcttatgttgcccaggctggtctcaaattcctaggctcaagtgattccgcccacctctgcctcccaaagtgctgggattacagtcatgagccagcgcatctggccaccttattttctattactggctcaatgtaatggctccatctcaggaacagccaatgaaagagatgcacaggacaagaaacaggaccttgccctgtcactcaggatggagttcagtggtccaattatggctcattgtagcctcaaactcccaggctcaagcagtcctaccatgtcagccttcccagtagctgggaccacaggtaagcatcgtgacactcagtgaattttgtttttatttttttgtagagatggggcctcagtatgttgccacggctgaccttgaactcctgcactcaagggattttcctgccctggcctcccaaagtattggtattacaggcatgagccattgtgcccaccgtctctggttcttaaccttctacttccctcttccagttttaaagaatgcttgtaattacatgggctctcctagatactccaggacaatcttgttt

SEQ ID NO: 459413 - DNA, 1406 bp, Homo sapiens
agatgatgattattccccaccttctaagagacaaagaccaacgagccaccacagccaccggtcccagaacccgccaatgctggggaacggaaaatgagggagttcaactctggccctcacaatccagtggaggagacgaaactcagctgcctctgtccctctgggcacgcctcatgccaggtgcatctgtggacaggggccatgctcctgggcttccaaagttggagaaagctgccaggctcaggtctgaaggccagaattctacagtaagtcctactcagtcaaggtgggagcagggtcagtggcttccgaggctctgcgggagaatccgtttcctggccgtggaggtggcctgcactcctcagcttgtgctgcccgtctcgaatgactggagtttcctgcttctgtcactacacctcccaccctctccatcacctgctctgctcttataaggatccgaagaaatggaataatcgtatcgctgatctacgtaaacaaattgaagaattgtctgaaagaaaatatgttatgtctaaactggaaaagtcctgtaatcttatgttcatgggcttttacacaatggagttactgttcatcatgggggtaccgtggacaagcccagagctgccggcgagtcatgccatccttacacgtttctccttggaagacgtgaacttatgaattcaacaggtgaagatttacaacttgataaatcagcttcatgagagccacctgagctgaagattcccttgagaacaagtactgtcctgtggtttcatggcctttcttccatttgtggttcttgcgaagtggaatttaaatgacatcttatcaagatggataaaccctagtttcccagtgctggaatatagaaaatggatggacaagtaaatctcactcagcacccatagtccaggcatggggacctcaacacacctgagccccagacatcacctttcattctggacctaccatgaaagacttctgaatccaggaagagagactgactgggaaacatgttattcagaaacaggaccttgccctgtcactcaggatggagttcagtggtccaattatggctcattgtagcctcaaactcccaggctcaagcagtcctaccatgtcagccttcccagtagctgggaccacaggtaagcatcgtgacactcagtgaattttgtttttatttttttgtagagatggggcctcagtatgttgccacggctgaccttgaactcctgcactcaagggattttcctgccctggcctcccaaagtattggtattacaggcatgagccattgtgcccaccgtctctggttcttaaccttctacttccctcttccagttttaaagaatgcttgtaattacatgggctctcctagatactccaggacaatcttgttt

SEQ ID NO: 459414 - DNA, 1236 bp, Homo sapiens
agatgatgattattccccaccttctaagagacaaagaccaacgagccaccacagccaccggtcccagaacccgccaatgctggggaacggaaaatgagggagttcaactctggccctcacaatccagtggaggagacgaaactcagctgcctctgtccctctgggcacgcctcatgccaggtgcatctgtggacaggggccatgctcctgggcttccaaagttggagaaagctgccaggctcaggtctgaaggccagaattctacagtaagtcctactcagtcaaggtgggagcagggtcagtggcttccgaggctctgcgggagaatccgtttcctggccgtggaggtggcctgcactcctcagcttgtgctgcccgtctcgaatgactggagtttcctgcttctgtcactacacctcccaccctctccatcacctgctctgctcttataaggatccgaagaaatggaataatcgtatcgctgatctacgtaaacaaattgaagaattgtctgaaagaaaatatgttatgtctaaactggaaaagtcctgtaatcttatgttcatgggcttttacacaatggagttactgttcatcatgggggtaccgtggacaagcccagagctgccggcgagtcatgccatccttacacgtttctccttggaagacgtgaacttatgaattcaacaggtgaagatttacaacttgataaatcagcttcatgagagccacctgagctgaagattcccttgagaacaagtactgtcctgtggtttcatggcctttcttccatttgtggttcttgcgaagtggaatttaaatgacatcttatcaagatggataaaccctagtttcccagtgctggaatatagaaaatggatggacaagtaaatctcactcagcacccatagtccaggcatggggacctcaacacacctgagccccagacatcacctttcattctggacctaccatgaaagacttctgaatccaggaagagagactgactgggaaacatgttattcagagatggggcctcagtatgttgccacggctgaccttgaactcctgcactcaagggattttcctgccctggcctcccaaagtattggtattacaggcatgagccattgtgcccaccgtctctggttcttaaccttctacttccctcttccagttttaaagaatgcttgtaattacatgggctctcctagatactccaggacaatcttgttt

SEQ ID NO: 459415 - DNA, 698 bp, Homo sapiens
  misc_feature (580)..(580): n is a, c, g, or t
acccacgtgaagagttttcccagggacacccacgaccagtctgtggatctctggggaacccgtatctccttcgtaattagatagccctcccgtctttcttagaacccacctttgtttgttttttttgagacagagtctcgctctgtcacccaggctggtgtgaagtggtgcaatctcggctcactgcagcctctgcctcccgggttcaagtgattctcctgtctcagcctcccaagtagttgggattacagttgcctgccaccatgcctggctaatttttgtatttttagtagagaggggatttcaccatgttggccaggctggccttgaagtcctgacttcagataatctgcctgtctcagcttcccaaagtgctgggattacaggcgtgagccactgtgcccagctgagatctgatggttttaaaaagaggagctcccctgcatgagatctcactttttgcctgctaccatttatgtaagatgtgacttgctccttcttgccttccatcatgactgtgaagcttccccagccatatggaattgtaagttcaattaaacttcttttctttgtaaattcnaaagccctccctttacacttgcaaagggtcccaaaatacttccttgaggggggggccccgtaccccaattcgccctttggtggagtcgttttaacaattccctggcccgccgttttaa

SEQ ID NO: 459416 - DNA, 382 bp, Homo sapiens
tgcgaagtggaatttaaatgacatcttatcaagatggataaaccctagtttcccagtgctggaatatagaaaatggatggacaagtaaatctcactcagcacccatagtccaggcatggggacctcaacacacctgagccccagacatcacctttcattgtgagtagctctgagatgacacttctgctgttcccaattccagcattaattggattagatagttattttatgaagaattttcatatgccacaatcctgaccatatcttcaagtgaacagaaaaattctattaaaaagtcaaccttctgtctcactctgttgcccagactggagtgcagtggtgcaattatggctcactgcagcctcaacctcctgggctcaag

SEQ ID NO: 459417 - DNA, 325 bp, Homo sapiens
aatgtcttgagaattaatatgcactttaagattaaacataggtagtctaatcaaaatgtcaggattcctgtaatgctcataatttaaactgcttagttattggagtataaaaaaatttaaactctagactttagttttctgaaaatgaacattttctataatttgcatgaacttgagtcatatattgaatttaaaagctagttatatggtaataaaagcagaataacagtcaagttagagcatgagttctttcatttgtgaaggcaattaaaagtgtttccaaccagaaaagaataaatttatttttgcacagagaaggttttta

SEQ ID NO: 459418 - DNA, 2285 bp, Homo sapiens
atgggccccaaaaaatcttggcgaagtcacttttttccactgcctgaggtttggctgttgctcctgttatcccaagctctaagcccttcccatggtccccagacccaggcaggggtaggtctcgtctggagtgtcccgctgccaagtgccctgagaagccagtcctgccttggtgctccactgagggacgcttcggagttaaccaccgtgcacttgttcccgacgcggggctggggcgcgcgcagggcattgtgggtgcatagttcagccagcgcgtcgtcggctgctagccgccgtcgcctgcgcgctcaggcctctgggattagtagttttagcctcgtggatggcggggcgcctcgcgaagatggtggcgcgcgcggcgtgtggctcccgtcgtctggccaagtctcagcgcagcgcaccggccggcgtctcgttggcctggagcccacacccaccgggtccctgaccccgcgccccccgcgcccggttcccggcatgcctcgcgcccgtaagggcaacacgctccggaagggtggtcagcgccgtggaggaggtgcccggagcagtgcccaagctgactcgggttccagtgacgatgaggcagccagtgaggcccgcagcaccgccagtgaatgccccagccttctcagcaccactgcagaggacagccttgggggggatgtcgtggatgagcagggccagcaggaagaccttgaggaaaagctgaaggagtatgtggactgtctcacagacaagagtgccaagacccggcagggtgctcttgagagcctgcgcctggccctagcgtcccgcctactccccgacttcttgctggagcgccgcctcacgctagccgatgccctggaaaagtgcctcaagaaagggaagggcgaggaacaagccctggctgctgctgtgctaggcctgctctgcgtgcagctgggccctggacctaagggtgaggagctgtttcacagcctgcagcctctgctggtctctgtgctcagtgacagcacagctagccctgctgcccggctccactgtgcttctgcccttggcctgggctgctacgtggctgccgctgacatccaggacctggtctcttgccttgcctgcttagaaagtgttttcagccggttctatggcttggggggcagctccacaagtcctgtggttcctgccagcctgcacggcctgctctctgctgccctgcaggcctgggcattgctgctcaccatctgccctagcacccaaatcagccacatccttgacaggcagctgccccggctgccccagctcttgtccagtgaaagtgtgaacctgcggatcgctgccggtgaaaccattgcactgctctttgagcttgcccgggaccttgaggaggagtttgtttacgaggacatggaggccctctgcagtgtcctgcgcactctggccactgacagtaacaagtaccgtgccaaggctgatcgtcggcgccagcgctctactttccgcgccgtgctgcactccgtggagggcggtgaatgcgaagaagagatagtgcgcttcggctttgaggtgctctacatggacagctgggctcggcaccggatctacgctgccttcaaggaagtgctgggttcgggcatgcaccaccacctccagaacaatgagctactccgtgacatctttggcctgggccctgtgctgttgctggatgccactgccctgaaggcctgcaaggttccacgctttgagaagcacctgtacaatgctgctgccttcaaagcccggaccaaggctcgaagccgtgtgcgggacaagcgggcagacatcctgtgaagcaggacctgctgaagaggagactttctatgcccttggtccgtatttttaacagaagacagtgcaacaactggtctccaccagtatttgtcactttattttttttaatgacaaaaccaaaaacagacatggggtgggtagctgggggcccggacacttgggaccctgacccctttgtccctgcactcagccctgtggccccttcctgtcctgtctcaggccaggctaaatatgtgccttcctcagggctgtggggcaggcactagggggcctttcccttcctttcctttctcaggccttgctcccccaggatgacccactcttaggggggtggtggcatctggacaaatgccaccacagcaggtggggtggcaaagctacctggaatggatttgtgtgctgatttttaaggattattacagataattaaacagaacggtcagccttctgtggtctta

SEQ ID NO: 459419 - DNA, 2386 bp, Homo sapiens
atgggccccaaaaaatcttggcgaagtcacttttttccactgcctgaggtttggctgttgctcctgttatcccaagctctaagcccttcccatggtccccagacccaggcaggggtaggtctcgtctggagtgtcccgctgccaagtgccctgagaagccagtcctgccttggtgctccactgagggacgcttcggagttaaccaccgtgcacttgttcccgacgcggggctggggcgcgcgcagggcattgtgggtgcatagttcagccagcgcgtcgtcggctggtgggccccaggcgtggactaccattcccatggtgctctacgcgcagctagccgccgtcgcctgcgcgctcaggcctctgggattagtagttttagcctcgtggatgtgggcctgaatcggatggcctggaactcgccttcccggcgacctgtttggcagggcggggcgcctcgcgaagatggtggcgcgcgcggcgtgtggctcccgtcgtctggccaagtctcagcgcagcgcaccggccggcgtctcgttggcctggagcccacacccaccgggtccctgaccccgcgccccccgcgcccggttcccggcatgcctcgcgcccgtaagggcaacacgctccggaagggtggtcagcgccgtggaggaggtgcccggagcagtgcccaagctgactcgggttccagtgacgatgaggcagccagtgaggcccgcagcaccgccagtgaatgccccagccttctcagcaccactgcagaggacagccttgggggggatgtcgtggatgagcagggccagcaggaagaccttgaggaaaagctgaaggagtatgtggactgtctcacagacaagagtgccaagacccggcagggtgctcttgagagcctgcgcctggccctagcgtcccgcctactccccgacttcttgctggagcgccgcctcacgctagccgatgccctggaaaagtgcctcaagaaagggaagggcgaggaacaagccctggctgctgctgtgctaggcctgctctgcgtgcagctgggccctggacctaagggtgaggagctgtttcacagcctgcagcctctgctggtctctgtgctcagtgacagcacagctagccctgctgcccggctccactgtgcttctgcccttggcctgggctgctacgtggctgccgctgacatccaggacctggtctcttgccttgcctgcttagaaagtgttttcagccggttctatggcttggggggcagctccacaagtcctgtggttcctgccagcctgcacggcctgctctctgctgccctgcaggcctgggcattgctgctcaccatctgccctagcacccaaatcagccacatccttgacaggcagctgccccggctgccccagctcttgtccagtgaaagtgtgaacctgcggatcgctgccggtgaaaccattgcactgctctttgagcttgcccgggaccttgaggaggagtttgtttacgaggacatggaggccctctgcagtgtcctgcgcactctggccactgacagtaacaagtaccgtgccaaggctgatcgtcggcgccagcgctctactttccgcgccgtgctgcactccgtggagggcggtgaatgcgaagaagagatagtgcgcttcggctttgaggtgctctacatggacagctgggctcggcaccggatctacgctgccttcaaggaagtgctgggttcgggcatgcaccaccacctccagaacaatgagctactccgtgacatctttggcctgggccctgtgctgttgctggatgccactgccctgaaggcctgcaaggttccacgctttgagaagcacctgtacaatgctgctgccttcaaagcccggaccaaggctcgaagccgtgtgcgggacaagcgggcagacatcctgtgaagcaggacctgctgaagaggagactttctatgcccttggtccgtatttttaacagaagacagtgcaacaactggtctccaccagtatttgtcactttattttttttaatgacaaaaccaaaaacagacatggggtgggtagctgggggcccggacacttgggaccctgacccctttgtccctgcactcagccctgtggccccttcctgtcctgtctcaggccaggctaaatatgtgccttcctcagggctgtggggcaggcactagggggcctttcccttcctttcctttctcaggccttgctcccccaggatgacccactcttaggggggtggtggcatctggacaaatgccaccacagcaggtggggtggcaaagctacctggaatggatttgtgtgctgatttttaaggattattacagataattaaacagaacggtcagccttctgtggtctta

SEQ ID NO: 459420 - DNA, 2532 bp, Homo sapiens
atgggccccaaaaaatcttggcgaagtcacttttttccactgcctgaggtttggctgttgctcctgttatcccaagctctaagcccttcccatggtccccagacccaggcaggggtaggtctcgtctggagtgtcccgctgccaagtgccctgagaagccagtcctgccttggtgctccactgagggacgcttcggagttaaccaccgtgcacttgttcccgacgcggggctggggcgcgcgcagggcattgtgggtgcatagttcagccagcgcgtcgtcggctggtgggccccaggcgtggactaccattcccatggtgctctacgcgcagctagccgccgtcgcctgcgcgctcaggcctctgggattagtagttttagcctcgtggatgtgggcctgaatcggatggcctggaactcgccttcccggcgacctgtttggcagggcggggcgcctcgcgaagatggtggcgcgcgcggcgtgtggctcccgtcgtctggccaagtctcagcgcagcgcaccggccggcgtctcgttggcctggagcccacacccaccgggtccctgaccccgcgccccccgcgcccggttcccggcatgcctcgcgcccgtaagggcaacacgctccggaagggtggtcagcgccgtggaggaggtgcccggagcagtgcccaagctgactcgggttccagtgacgatgaggcagccagtgaggcccgcagcaccgccagtgaatgccccagccttctcagcaccactgcagaggacagccttgggggggatgtcgtggatgagcagggccagcaggaagaccttgaggaaaagctgaaggagtatgtggactgtctcacagacaagagtgccaagacccggcagggtgctcttgagagcctgcgcctggccctagcgtcccgcctactccccgacttcttgctggagcgccgcctcacgctagccgatgccctggaaaagtgcctcaagaaagggaagggcgaggaacaagccctggctgctgctgtgctaggcctgctctgcgtgcagctgggccctggacctaagggtgaggagctgtttcacagcctgcagcctctgctggtctctgtgctcagtgacagcacagctagccctgctgcccggctccactgtgcttctgcccttggcctgggctgctacgtggctgccgctgacatccaggacctggtctcttgccttgcctgcttagaaagtgttttcagccggttctatggcttggggggcagctccacaagtcctgtggttcctgccagcctgcacggcctgctctctgctgccctgcaggcctgggcattgctgctcaccatctgccctagcacccaaatcagccacatccttgacaggcagctgccccggctgccccagctcttgtccagtgaaagtgtgaacctgcggatcgctgccggtgaaaccattgcactgctctttgagcttgcccgggaccttgaggaggagtttgtttacgaggacatggaggccctctgcagtgtcctgcgcactctggccactgacagtaacaagtaccgtgccaaggctgatcgtcggcgccagcgctctactttccgcgccgtgctgcactccgtggagggcggtgaatgcgaagaagagatagtgcgcttcggctttgaggtgctctacatggacagctgggctcggcaccggatctacgctgccttcaaggaagtgctgggttcgggcatgcaccaccacctccagaacaatgagctactccgtgacatctttggcctgggccctgtgctgttgctggatgccactgccctgaaggcctgcaaggttccacgctttgagaagcacctgtacaatgctgctgccttcaaagcccggaccaaggctcgaagccgtgtgcgggacaagcgggcagacatcctgtgaagcaggacctgctgaagaggagactttctatgcccttggtccgtatttttaacagaagacagtgcaacaactggtctccaccagtatttgtcactttattttttttaatgacaaaaccaaaaacagacatggggtgggtagctgggggcccggacacttgggaccctgacccctttgtccctgcactcagccctgtggccccttcctgtcctgtctcaggccaggctaaatatgtgccttcctcagggctgtggggcaggcactagggggcctttcccttcctttcctttctcaggccttgctcccccaggatgacccactcttaggggggtggtggcatctggacaaatgccaccacagcaggtggggtggcaaagctacctggaatggatttgtgtgctgatttttaaggattattacagataattaaacagaacggtcagccttctgtggtcttaacccctgggtatttttctgttctccctccccatctactatcccaggcttgggcccaactggtcttccacgatgtcacctttgccctccaaggcagtcttccccaggtggtgcctctccccctactcagagcccagcctgtctttaa

SEQ ID NO: 459421 - DNA, 2703 bp, Homo sapiens
atgggccccaaaaaatcttggcgaagtcacttttttccactgcctgaggtttggctgttgctcctgttatcccaagctctaagcccttcccatggtccccagacccaggcaggggtaggtctcgtctggagtgtcccgctgccaagtgccctgagaagccagtcctgccttggtgctccactgagggacgcttcggagttaaccaccgtgcacttgttcccgacgcggggctggggcgcgcgcagggcattgtgggtgcatagttcagccagcgcgtcgtcggctggtgggccccaggcgtggactaccattcccatggtgctctacgcgcagctagccgccgtcgcctgcgcgctcaggcctctgggattagtagttttagcctcgtggatgtgggcctgaatcggatggcctggaactcgccttcccggcgacctgtttggcagggcggggcgcctcgcgaagatggtggcgcgcgcggcgtgtggctcccgtcgtctggccaagtctcagcgcagcgcaccggccggcgtctcgttggcctggagcccacacccaccgggtccctgaccccgcgccccccgcgcccggttcccggcatgcctcgcgcccgtaagggcaacacgctccggaagggtggtcagcgccgtggaggaggtgcccggagcagtgcccaagctgactcgggttccagtgacgatgaggcagccagtgaggcccgcagcaccgccagtgaatgccccagccttctcagcaccactgcagaggacagccttgggggggatgtcgtggatgagcagggccagcaggaagaccttgaggaaaagctgaaggagtatgtggactgtctcacagacaagagtgccaagacccggcagggtgctcttgagagcctgcgcctggccctagcgtcccgcctactccccgacttcttgctggagcgccgcctcacgctagccgatgccctggaaaagtgcctcaagaaagggaagggcgaggaacaagccctggctgctgctgtgctaggcctgctctgcgtgcagctgggccctggacctaagggtgaggagctgtttcacagcctgcagcctctgctggtctctgtgctcagtgacagcacagctagccctgctgcccggctccactgtgcttctgcccttggcctgggctgctacgtggctgccgctgacatccaggacctggtctcttgccttgcctgcttagaaagtgttttcagccggttctatggcttggggggcagctccacaagtcctgtggttcctgccagcctgcacggcctgctctctgctgccctgcaggcctgggcattgctgctcaccatctgccctagcacccaaatcagccacatccttgacaggcagctgccccggctgccccagctcttgtccagtgaaagtgtgaacctgcggatcgctgccggtgaaaccattgcactgctctttgagcttgcccgggaccttgaggtgcgagggacaaggatggggggtgcttggtgacaccacctgcccatcacaggctggatgcagggggtgccacacaaaacagaacagctttaggtcattatgcagaggaggtggccccaaaacagatttatctcctagatgtcatgatgggtgccctcagcagtggtgtcctggcctgacagaggccaaggaggggtcaaaggggccaggcagagaagagagggtctctcagtgaaaggaggggtttgggcagtgccctgttcagagccagcagagctcaagcatctaccacacaccctccaatgctcccattgcaggaggagtttgtttacgaggacatggaggccctctgcagtgtcctgcgcactctggccactgacagtaacaagtaccgtgccaaggctgatcgtcggcgccagcgctctactttccgcgccgtgctgcactccgtggagggcggtgaatgcgaagaagagatagtgcgcttcggctttgaggtgctctacatggacagctgggctcggcaccggatctacgctgccttcaaggaagtgctgggttcgggcatgcaccaccacctccagaacaatgagctactccgtgacatctttggcctgggccctgtgctgttgctggatgccactgccctgaaggcctgcaaggttccacgctttgagaagcacctgtacaatgctgctgccttcaaagcccggaccaaggctcgaagccgtgtgcgggacaagcgggcagacatcctgtgaagcaggacctgctgaagaggagactttctatgcccttggtccgtatttttaacagaagacagtgcaacaactggtctccaccagtatttgtcactttattttttttaatgacaaaaccaaaaacagacatggggtgggtagctgggggcccggacacttgggaccctgacccctttgtccctgcactcagccctgtggccccttcctgtcctgtctcaggccaggctaaatatgtgccttcctcagggctgtggggcaggcactagggggcctttcccttcctttcctttctcaggccttgctcccccaggatgacccactcttaggggggtggtggcatctggacaaatgccaccacagcaggtggggtggcaaagctacctggaatggatttgtgtgctgatttttaaggattattacagataattaaacagaacggtcagccttctgtggtctta

SEQ ID NO: 459422 - DNA, 2292 bp, Homo sapiens
  misc_feature (2228)..(2228): n is a, c, g, or t
atgggccccaaaaaatcttggcgaagtcacttttttccactgcctgaggtttggctgttgctcctgttatcccaagctctaagcccttcccatggtccccagacccaggcaggggtaggtctcgtctggagtgtcccgctgccaagtgccctgagaagccagtcctgccttggtgctccactgagggacgcttcggagttaaccaccgtgcacttgttcccgacgcggggctggggcgcgcgcagggcattgtgggtgcatagttcagccagcgcgtcgtcggctggtgggccccaggcgtggactaccattcccatggtgctctacgcgcagctagccgccgtcgcctgcgcgctcaggcctctgggattagtagttttagcctcgtggatgtgggcctgaatcggatggcctggaactcgccttcccggcgacctgtttggcagggcggggcgcctcgcgaagatggtggcgcgcgcggcgtgtggctcccgtcgtctggccaagtctcagcgcagcgcaccggccggcgtctcgttggcctggagcccacacccaccgggtccctgaccccgcgccccccgcgcccggttcccggcatgcctcgcgcccgtaagggcaacacgctccggaagggtggtcagcgccgtggaggaggtgcccggagcagtgcccaagctgactcgggttccagtgacgatgaggcagccagtgaggcccgcagcaccgccagtgaatgccccagccttctcagcaccactgcagaggacagccttgggggggatgtcgtggatgagcagggccagcaggaagaccttgaggaaaagctgaaggagtatgtggactgtctcacagacaagagtgccaagacccggcagggtgctcttgagagcctgcgcctggccctagcgtcccgcctactccccgacttcttgctggagcgccgcctcacgctagccgatgccctggaaaagtgcctcaagaaagggaagggcgaggaacaagccctggctgctgctgtgctaggcctgctctgcgtgcagctgggccctggacctaagggtgaggagctgtttcacagcctgcagcctctgctggtctctgtgctcagtgacagcacagctagccctgctgcccggctccactgtgcttctgcccttggcctgggctgctacgtggctgccgctgacatccaggacctggtctcttgccttgcctgcttagaaagtgttttcagccggttctatggcttggggggcagctccacaagtcctgtggttcctgccagcctgcacggcctgctctctgctgccctgcaggcctgggcattgctgctcaccatctgccctagcacccaaatcagccacatccttgacaggcagctgccccggctgccccagctcttgtccagtgaaagtgtgaacctgcggatcgctgccggtgaaaccattgcactgctctttgagcttgcccgggaccttgaggaggagtttgtttacgaggacatggaggccctctgcagtgtcctgcgcactctggccactgacagtaacaagtaccgtgccaaggctgatcgtcggcgccagcgctctactttccgcgccgtgctgcactccgtggagggcggtgaatgcgaagaagagatagtgcgcttcggctttgaggtgctctacatggacagctgggctcggcaccggatctacgctgccttcaaggaagtgctgggttcgggcatgcaccaccacctccagaacaatgagctactccgtgacatctttggcctgggccctgtgctgttgctggatgccactgccctgaaggcctgcaaggttccacgctttgagaagcacctgtacaatgctgctgccttcaaagcccggaccaaggctcgaagccgtgtgcgggacaagcgggcagacatcctgtgaagcaggacctgctgaagaggagactttctatgcccttggtccgtatttttaacagaagacagtgcaacaactggtctccaccagtatttgtcactttattttttttaatgacaaaaccaaaaacagacatggggtgggtagctgggggcccggacacttgggaccctgacccctttgtccctgcactcagccctgtggccccttcctgtcctgtctcaggccaggctaaatatgtgccttcctcagggctgtggggcaggcactaggggtttccttctttcttttaagctgtcccagatnccctagggggggggtctcgactgccacgggcgggggacctgcggtgcggcctcggttacataag

SEQ ID NO: 459423 - DNA, 2523 bp, Homo sapiens
atgggccccaaaaaatcttggcgaagtcacttttttccactgcctgaggtttggctgttgctcctgttatcccaagctctaagcccttcccatggtccccagacccaggcaggggtaggtctcgtctggagtgtcccgctgccaagtgccctgagaagccagtcctgccttggtgctccactgagggacgcttcggagttaaccaccgtgcacttgttcccgacgcggggctggggcgcgcgcagggcattgtgggtgcatagttcagccagcgcgtcgtcggctggtgggccccaggcgtggactaccattcccatggtgctctacgcgcagctagccgccgtcgcctgcgcgctcaggcctctgggattagtagttttagcctcgtggatgtgggcctgaatcggatggcctggaactcgccttcccggcgacctgtttggcagggcggggcgcctcgcgaagatggtggcgcgcgcggcgtgtggctcccgtcgtctggccaagtctcagcgcagcgcaccggccggcgtctcgttggcctggagcccacacccaccgggtccctgaccccgcgccccccgcgcccggttcccggcatgcctcgcgcccgtaagggcaacacgctccggaagggtggtcagcgccgtggaggaggtgcccggagcagtgcccaagctgactcgggttccagtgacgatgaggcagccagtgaggcccgcagcaccgccagtgaatgccccagccttctcagcaccactgcagaggacagccttgggggggatgtcgtggatgagcagggccagcaggaagaccttgaggaaaagctgaaggagtatgtggactgtctcacagacaagagtgccaagacccggcagggtgctcttgagagcctgcgcctggccctagcgtcccgcctactccccgacttcttgctggagcgccgcctcacgctagccgatgccctggaaaagtgcctcaagaaagggaagggcgaggaacaagccctggctgctgctgtgctaggcctgctctgcgtgcagctgggccctggacctaagggtgaggagctgtttcacagcctgcagcctctgctggtctctgtgctcagtgacagcacagctagccctgctgcccggctccactgtgcttctgcccttggcctgggctgctacgtggctgccgctgacatccaggacctggtctcttgccttgcctgcttagaaagtgttttcagccggttctatggcttggggggcagctccacaagtcctgtggttcctgccagcctgcacggcctgctctctgctgccctgcaggcctgggcattgctgctcaccatctgccctagcacccaaatcagccacatccttgacaggcagctgccccggctgccccagctcttgtccagtgaaagtgtgaacctgcggatcgctgccggtgaaaccattgcactgctctttgagcttgcccgggaccttgaggaggagtttgtttacgaggacatggaggccctctgcagtgtcctgcgcactctggccactgacagtaacaagtaccgtgccaaggctgatcgtcggcgccagcgctctactttccgcgccgtgctgcactccgtggagggcggtgaatgcgaagaagagatagtgcgcttcggctttgaggtgctctacatggacagctgggctcggcaccggatctacgctgccttcaaggaagtgctgggttcgggcatgcaccaccacctccagaacaatgagctactccgtgacatctttggcctgggccctgtgctgttgctggatgccactgccctgaaggcctgcaaggttccacgctttgagaaggtttgcacccttgggcacctttctcttccccctattcccatttcctggaggcctggaattctgtagaggccggaagaggacccccagccctttcccttcccagctccccagggtgtcactctctgtccccactctagcacctgtacaatgctgctgccttcaaagcccggaccaaggctcgaagccgtgtgcgggacaagcgggcagacatcctgtgaagcaggacctgctgaagaggagactttctatgcccttggtccgtatttttaacagaagacagtgcaacaactggtctccaccagtatttgtcactttattttttttaatgacaaaaccaaaaacagacatggggtgggtagctgggggcccggacacttgggaccctgacccctttgtccctgcactcagccctgtggccccttcctgtcctgtctcaggccaggctaaatatgtgccttcctcagggctgtggggcaggcactagggggcctttcccttcctttcctttctcaggccttgctcccccaggatgacccactcttaggggggtggtggcatctggacaaatgccaccacagcaggtggggtggcaaagctacctggaatggatttgtgtgctgatttttaaggattattacagataattaaacagaacggtcagccttctgtggtctta

SEQ ID NO: 459424 - DNA, 2129 bp, Homo sapiens
atgggccccaaaaaatcttggcgaagtcacttttttccactgcctgaggtttggctgttgctcctgttatcccaagctctaagcccttcccatggtccccagacccaggcaggggtaggtctcgtctggagtgtcccgctgccaagtgccctgagaagccagtcctgccttggtgctccactgagggacgcttcggagttaaccaccgtgcacttgttcccgacgcggggctggggcgcgcgcagggcattgtgggtgcatagttcagccagcgcgtcgtcggctggtgggccccaggcgtggactaccattcccatggtgctctacgcgcagctagccgccgtcgcctgcgcgctcaggcctctgggattagtagttttagcctcgtggatgtgggcctgaatcggatggcctggaactcgccttcccggcgacctgtttggcagggcggggcgcctcgcgaagatggtggcgcgcgcggcgtgtggctcccgtcgtctggccaagtctcagcgcagcgcaccggccggcgtctcgttggcctggagcccacacccaccgggtccctgaccccgcgccccccgcgcccggttcccggcatgcctcgcgcccgtaagggcaacacgctccggaagggtggtcagcgccgtggaggaggtgcccggagcagtgcccaagctgactcgggttccagtgacgatgaggcagccagtgaggcccgcagcaccgccagtgaatgccccagccttctcagcaccactgcagaggacagccttgggggggatgtcgtggatgagcagggccagcaggaagaccttgaggaaaagctgaaggagtatgtggactgtctcacagacaagagtgccaagacccggcagggtgctcttgagagcctgcgcctggccctagcgtcccgcctactccccgacttcttgctggagcgccgcctcacgctagccgatgccctggaaaagtgcctcaagaaagggaagggcgaggaacaagccctggctgctgctgtgctaggcctgctctgcgtgcagctgggccctggacctaagggtgaggagctgtttcacagcctgcagcctctgctggtctctgtgctcagtgacagcacagctagccctgctgcccggctccactgtgcttctgcccttggcctgggctgctacgtggctgccgctgacatccaggacctggtctcttgccttgcctgcttagaaagtgttttcagccggttctatggcttggggggcagctccacaagtcctgtggttcctgccagcctgcacggcctgctctctgctgccctgcaggcctgggcattgctgctcaccatctgccctagcacccaaatcagccacatccttgacaggcagctgccccggctgccccagctcttgtccagtgaaagtgtgaacctgcggatcgctgccggtgaaaccattgcactgctctttgagcttgcccgggaccttgaggaggagtttgtttacgaggacatggaggccctctgcagtgtcctgcgcactctggccactgacagtaacaagtaccgtgccaaggctgatcgtcggcgccagcgctctactttccgcgccgtgctgcactccgtggagggcggtgaatgcgaagaagagatagtgcgcttcggctttgaggtgctctacatggacagctgggctcggcaccggatctacgctgccttcaaggaagtgctgggttcgggcatgcaccaccacctccagaacaatgagctactccgtgacatctttggcctgggccctgtgctgttgctggatgccactgccctgaaggcctgcaaggttccacgctttgagaagcacctgtacaatgctgctgccttcaaagcccggaccaaggctcgaagccgtgtgcgggacaagcgggcagacatcctgtgaagcaggacctgctgaagaggagactttctatgcccttggccttgctcccccaggatgacccactcttaggggggtggtggcatctggacaaatgccaccacagcaggtggggtggcaaagctacctggaatggatttgtgtgctgatttttaaggattattacagataattaaacagaacggtcagccttctgtggtctta

SEQ ID NO: 459425 - DNA, 2669 bp, Homo sapiens
atgggccccaaaaaatcttggcgaagtcacttttttccactgcctgaggtttggctgttgctcctgttatcccaagctctaagcccttcccatggtccccagacccaggcaggggtaggtctcgtctggagtgtcccgctgccaagtgccctgagaagccagtcctgccttggtgctccactgagggacgcttcggagttaaccaccgtgcacttgttcccgacgcggggctggggcgcgcgcagggcattgtgggtgcatagttcagccagcgcgtcgtcggctggtgggccccaggcgtggactaccattcccatggtgctctacgcgcagctagccgccgtcgcctgcgcgctcaggcctctgggattagtagttttagcctcgtggatgtgggcctgaatcggatggcctggaactcgccttcccggcgacctgtttggcagggcggggcgcctcgcgaagatggtggcgcgcgcggcgtgtggctcccgtcgtctggccaagtctcagcgcagcgcaccggccggcgtctcgttggcctggagcccacacccaccgggtccctgaccccgcgccccccgcgcccggttcccggcatgcctcgcgcccgtaagggcaacacgctccggaagggtggtcagcgccgtggaggaggtgcccggagcagtgcccaagctgactcgggttccagtgacgatgaggcagccagtgaggcccgcagcaccgccagtgaatgccccagccttctcagcaccactgcagaggacagccttgggggggatgtcgtggatgagcagggccagcaggaagaccttgaggaaaagctgaaggagtatgtggactgtctcacagacaagagtgccaagacccggcagggtgctcttgagagcctgcgcctggccctagcgtcccgcctactccccgacttcttgctggagcgccgcctcacgctagccgatgccctggaaaagtgcctcaagaaagggaagggcgaggaacaagccctggctgctgctgtgctaggcctgctctgcgtgcagctgggccctggacctaagggtgaggagctgtttcacagcctgcagcctctgctggtctctgtgctcagtgacagcacagctagccctgctgcccggctccactgtgcttctgcccttggcctgggctgctacgtggctgccgctgacatccaggacctggtctcttgccttgcctgcttagaaagtgttttcagccggttctatggcttggggggcagctccacaagtcctgtggttcctgccagcctgcacggcctgctctctgctgccctgcaggcctgggcattgctgctcaccatctgccctagcacccaaatcagccacatccttgacaggcagctgccccggctgccccagctcttgtccagtgaaagtgtgaacctgcggatcgctgccggtgaaaccattgcactgctctttgagcttgcccgggaccttgaggaggagtttgtttacgaggacatggaggccctctgcagtgtcctgcgcactctggccactgacagtaacaagtaccgtgccaaggctgatcgtcggcgccagcgctctactttccgcgccgtgctgcactccgtggagggcggtgaatgcgaagaagagatagtgcgcttcggctttgaggtgctctacatggacagctgggctcggcaccggatctacgctgccttcaaggaagtgctgggttcgggcatgcaccaccacctccagaacaatgagctactccgtgacatctttggcctgggccctgtgctgttgctggatgccactgccctgaaggcctgcaaggttccacgctttgagaaggtttgcacccttgggcacctttctcttccccctattcccatttcctggaggcctggaattctgtagaggccggaagaggacccccagccctttcccttcccagctccccagggtgtcactctctgtccccactctagcacctgtacaatgctgctgccttcaaagcccggaccaaggctcgaagccgtgtgcgggacaagcgggcagacatcctgtgaagcaggacctgctgaagaggagactttctatgcccttggtccgtatttttaacagaagacagtgcaacaactggtctccaccagtatttgtcactttattttttttaatgacaaaaccaaaaacagacatggggtgggtagctgggggcccggacacttgggaccctgacccctttgtccctgcactcagccctgtggccccttcctgtcctgtctcaggccaggctaaatatgtgccttcctcagggctgtggggcaggcactagggggcctttcccttcctttcctttctcaggccttgctcccccaggatgacccactcttaggggggtggtggcatctggacaaatgccaccacagcaggtggggtggcaaagctacctggaatggatttgtgtgctgatttttaaggattattacagataattaaacagaacggtcagccttctgtggtcttaacccctgggtatttttctgttctccctccccatctactatcccaggcttgggcccaactggtcttccacgatgtcacctttgccctccaaggcagtcttccccaggtggtgcctctccccctactcagagcccagcctgtctttaa

SEQ ID NO: 459426 - DNA, 2469 bp, Homo sapiens
atgggccccaaaaaatcttggcgaagtcacttttttccactgcctgaggtttggctgttgctcctgttatcccaagctctaagcccttcccatggtccccagacccaggcaggggtaggtctcgtctggagtgtcccgctgccaagtgccctgagaagccagtcctgccttggtgctccactgagggacgcttcggagttaaccaccgtgcacttgttcccgacgcggggctggggcgcgcgcagggcattgtgggtgcatagttcagccagcgcgtcgtcggctggtgggccccaggcgtggactaccattcccatggtgctctacgcgcagctagccgccgtcgcctgcgcgctcaggcctctgggattagtagttttagcctcgtggatgtgggcctgaatcggatggcctggaactcgccttcccggcgacctgtttggcagggcggggcgcctcgcgaagatggtggcgcgcgcggcgtgtggctcccgtcgtctggccaagtctcagcgcagcgcaccggccggcgtctcgttggcctggagcccacacccaccgggtccctgaccccgcgccccccgcgcccggttcccggcatgcctcgcgcccgtaagggcaacacgctccggaagggtggtcagcgccgtggaggaggtgcccggagcagtgcccaagctgactcgggttccagtgacgatgaggcagccagtgaggcccgcagcaccgccagtgaatgccccagccttctcagcaccactgcagaggacagccttgggggggatgtcgtggatgagcagggccagcaggaagaccttgaggaaaagctgaaggagtatgtggactgtctcacagacaagagtgccaagacccggcagggtgctcttgagagcctgcgcctggccctagcgtcccgcctactccccgacttcttgctggagcgccgcctcacgctagccgatgccctggaaaagtgcctcaagaaagggaagggcgaggaacaagccctggctgctgctgtgctaggcctgctctgcgtgcagctgggccctggacctaagggtgaggagctgtttcacagcctgcagcctctgctggtctctgtgctcagtgacagcacagctagccctgctgcccggctccactgtgcttctgcccttggcctgggctgctacgtggctgccgctgacatccaggtgaggggtctttgggcacaggtggtagagcatctagggctgtaactctgcctctgagctcccctgcctctctgtgctcctaggacctggtctcttgccttgcctgcttagaaagtgttttcagccggttctatggcttggggggcagctccacaagtcctgtggttcctgccagcctgcacggcctgctctctgctgccctgcaggcctgggcattgctgctcaccatctgccctagcacccaaatcagccacatccttgacaggcagctgccccggctgccccagctcttgtccagtgaaagtgtgaacctgcggatcgctgccggtgaaaccattgcactgctctttgagcttgcccgggaccttgaggaggagtttgtttacgaggacatggaggccctctgcagtgtcctgcgcactctggccactgacagtaacaagtaccgtgccaaggctgatcgtcggcgccagcgctctactttccgcgccgtgctgcactccgtggagggcggtgaatgcgaagaagagatagtgcgcttcggctttgaggtgctctacatggacagctgggctcggcaccggatctacgctgccttcaaggaagtgctgggttcgggcatgcaccaccacctccagaacaatgagctactccgtgacatctttggcctgggccctgtgctgttgctggatgccactgccctgaaggcctgcaaggttccacgctttgagaagcacctgtacaatgctgctgccttcaaagcccggaccaaggctcgaagccgtgtgcgggacaagcgggcagacatcctgtgaagcaggacctgctgaagaggagactttctatgcccttggtccgtatttttaacagaagacagtgcaacaactggtctccaccagtatttgtcactttattttttttaatgacaaaaccaaaaacagacatggggtgggtagctgggggcccggacacttgggaccctgacccctttgtccctgcactcagccctgtggccccttcctgtcctgtctcaggccaggctaaatatgtgccttcctcagggctgtggggcaggcactagggggcctttcccttcctttcctttctcaggccttgctcccccaggatgacccactcttaggggggtggtggcatctggacaaatgccaccacagcaggtggggtggcaaagctacctggaatggatttgtgtgctgatttttaaggattattacagataattaaacagaacggtcagccttctgtggtctta

SEQ ID NO: 459427 - DNA, 2840 bp, Homo sapiens
atgggccccaaaaaatcttggcgaagtcacttttttccactgcctgaggtttggctgttgctcctgttatcccaagctctaagcccttcccatggtccccagacccaggcaggggtaggtctcgtctggagtgtcccgctgccaagtgccctgagaagccagtcctgccttggtgctccactgagggacgcttcggagttaaccaccgtgcacttgttcccgacgcggggctggggcgcgcgcagggcattgtgggtgcatagttcagccagcgcgtcgtcggctggtgggccccaggcgtggactaccattcccatggtgctctacgcgcagctagccgccgtcgcctgcgcgctcaggcctctgggattagtagttttagcctcgtggatgtgggcctgaatcggatggcctggaactcgccttcccggcgacctgtttggcagggcggggcgcctcgcgaagatggtggcgcgcgcggcgtgtggctcccgtcgtctggccaagtctcagcgcagcgcaccggccggcgtctcgttggcctggagcccacacccaccgggtccctgaccccgcgccccccgcgcccggttcccggcatgcctcgcgcccgtaagggcaacacgctccggaagggtggtcagcgccgtggaggaggtgcccggagcagtgcccaagctgactcgggttccagtgacgatgaggcagccagtgaggcccgcagcaccgccagtgaatgccccagccttctcagcaccactgcagaggacagccttgggggggatgtcgtggatgagcagggccagcaggaagaccttgaggaaaagctgaaggagtatgtggactgtctcacagacaagagtgccaagacccggcagggtgctcttgagagcctgcgcctggccctagcgtcccgcctactccccgacttcttgctggagcgccgcctcacgctagccgatgccctggaaaagtgcctcaagaaagggaagggcgaggaacaagccctggctgctgctgtgctaggcctgctctgcgtgcagctgggccctggacctaagggtgaggagctgtttcacagcctgcagcctctgctggtctctgtgctcagtgacagcacagctagccctgctgcccggctccactgtgcttctgcccttggcctgggctgctacgtggctgccgctgacatccaggacctggtctcttgccttgcctgcttagaaagtgttttcagccggttctatggcttggggggcagctccacaagtcctgtggttcctgccagcctgcacggcctgctctctgctgccctgcaggcctgggcattgctgctcaccatctgccctagcacccaaatcagccacatccttgacaggcagctgccccggctgccccagctcttgtccagtgaaagtgtgaacctgcggatcgctgccggtgaaaccattgcactgctctttgagcttgcccgggaccttgaggtgcgagggacaaggatggggggtgcttggtgacaccacctgcccatcacaggctggatgcagggggtgccacacaaaacagaacagctttaggtcattatgcagaggaggtggccccaaaacagatttatctcctagatgtcatgatgggtgccctcagcagtggtgtcctggcctgacagaggccaaggaggggtcaaaggggccaggcagagaagagagggtctctcagtgaaaggaggggtttgggcagtgccctgttcagagccagcagagctcaagcatctaccacacaccctccaatgctcccattgcaggaggagtttgtttacgaggacatggaggccctctgcagtgtcctgcgcactctggccactgacagtaacaagtaccgtgccaaggctgatcgtcggcgccagcgctctactttccgcgccgtgctgcactccgtggagggcggtgaatgcgaagaagagatagtgcgcttcggctttgaggtgctctacatggacagctgggctcggcaccggatctacgctgccttcaaggaagtgctgggttcgggcatgcaccaccacctccagaacaatgagctactccgtgacatctttggcctgggccctgtgctgttgctggatgccactgccctgaaggcctgcaaggttccacgctttgagaaggtttgcacccttgggcacctttctcttccccctattcccatttcctggaggcctggaattctgtagaggccggaagaggacccccagccctttcccttcccagctccccagggtgtcactctctgtccccactctagcacctgtacaatgctgctgccttcaaagcccggaccaaggctcgaagccgtgtgcgggacaagcgggcagacatcctgtgaagcaggacctgctgaagaggagactttctatgcccttggtccgtatttttaacagaagacagtgcaacaactggtctccaccagtatttgtcactttattttttttaatgacaaaaccaaaaacagacatggggtgggtagctgggggcccggacacttgggaccctgacccctttgtccctgcactcagccctgtggccccttcctgtcctgtctcaggccaggctaaatatgtgccttcctcagggctgtggggcaggcactagggggcctttcccttcctttcctttctcaggccttgctcccccaggatgacccactcttaggggggtggtggcatctggacaaatgccaccacagcaggtggggtggcaaagctacctggaatggatttgtgtgctgatttttaaggattattacagataattaaacagaacggtcagccttctgtggtctta

SEQ ID NO: 459428 - DNA, 1813 bp, Homo sapiens
atgggccccaaaaaatcttggcgaagtcacttttttccactgcctgaggtttggctgttgctcctgttatcccaagctctaagcccttcccatggtccccagacccaggcaggggtaggtctcgtctggagtgtcccgctgccaagtgccctgagaagccagtcctgccttggtgctccactgagggacgcttcggagttaaccaccgtgcacttgttcccgacgcggggctggggcgcgcgcagggcattgtgggtgcatagttcagccagcgcgtcgtcggctggtgggccccaggcgtggactaccattcccatggtgctctacgcgcagctagccgccgtcgcctgcgcgctcaggcctctgggattagtagttttagcctcgtggatgtgggcctgaatcggatggcctggaactcgccttcccggcgacctgtttggcagggcggggcgcctcgcgaagatggtggcgcgcgcggcgtgtggctcccgtcgtctggccaagtctcagcgcagcgcaccggccggcgtctcgttggcctggagcccacacccaccgggtccctgaccccgcgccccccgcgcccggttcccggcatgcctcgcgcccgtaagggcaacacgctccggaagggtggtcagcgccgtggaggaggtgcccggagcagtgcccaagctgactcgggttccagtgacgatgaggcagccagtgaggcccgcagcaccgccagtgaatgccccagccttctcagcaccactgcagaggacagccttgggggggatgtcgtggatgagcagggccagcaggaagaccttgaggaaaagctgaaggagtatgtggactgtctcacagacaagagtgccaagacccggcagggtgctcttgagagcctgcgcctggccctagcgtcccgcctactccccgacttcttgctggagcgccgcctcacgctagccgatgccctggaaaagtgcctcaagaaagggaagggcgaggaacaagccctggctgctgctgtgctaggcctgctctgcgtgcagctgggccctggacctaagggtgaggagctgtttcacagcctgcagcctctgctggtctctgtgctcagtgacagcacagctagccctgctgcccggctccactgtgcttctgcccttggcctgggctgctacgtggctgccgctgacatccaggacctggtctcttgccttgcctgcttagaaagtgttttcagccggttctatggcttggggggcagctccacaagtcctgtggttcctgccagcctgcacggcctgctctctgctgccctgcaggcctgggcattgctgctcaccatctgccctagcacccaaatcagccacatccttgacaggcagctgccccggctgccccagctcttgtccagtgaaagtgtgaacctgcggatcgctgccggtgaaaccattgcactgctctttgagcttgcccgggaccttgaggaggagtttgtttacgaggacatggaggccctctgcagtgtcctgcgcactctggccactgacagtaacaagtaccgtgccaaggctgatcgtcggcgccagcgctctactttccgcgccgtgctgcactccgtggagggcggtgaatgcgaagaagagatagtgcgcttcggctttgaggtgctctacatggacagctgggctcggcaccggatctacgctgccttcaaggaagtgctgggttcgggcatgcaccaccacctccagactatgagctactccctacatctctgcctggcctgtctgttctcgtattactacacgacctg

SEQ ID NO: 459429 - DNA, 2552 bp, Homo sapiens
atgggccccaaaaaatcttggcgaagtcacttttttccactgcctgaggtttggctgttgctcctgttatcccaagctctaagcccttcccatggtccccagacccaggcaggggtaggtctcgtctggagtgtcccgctgccaagtgccctgagaagccagtcctgccttggtgctccactgagggacgcttcggagttaaccaccgtgcacttgttcccgacgcggggctggggcgcgcgcagggcattgtgggtgcatagttcagccagcgcgtcgtcggctggtgggccccaggcgtggactaccattcccatggtgctctacgcgcagctagccgccgtcgcctgcgcgctcaggcctctgggattagtagttttagcctcgtggatgtgggcctgaatcggatggcctggaactcgccttcccggcgacctgtttggcagggcggggcgcctcgcgaagatggtggcgcgcgcggcgtgtggctcccgtcgtctggccaagtctcagcgcagcgcaccggccggcgtctcgttggcctggagcccacacccaccgggtccctgaccccgcgccccccgcgcccggttcccggcatgcctcgcgcccgtaagggcaacacgctccggaagggtggtcagcgccgtggaggaggtgcccggagcagtgcccaagctgactcgggttccagtgacgatgaggcagccagtgaggcccgcagcaccgccagtgaatgccccagccttctcagcaccactgcagaggacagccttgggggggatgtcgtggatgagcagggccagcaggaagaccttgaggaaaagctgaaggagtatgtggactgtctcacagacaagagtgccaagacccggcagggtgctcttgagagcctgcgcctggccctagcgtcccgcctactccccgacttcttgctggagcgccgcctcacgctagccgatgccctggaaaagtgcctcaagaaagggaagggcgaggaacaagccctggctgctgctgtgctaggcctgctctgcgtgcagctgggccctggacctaagggtgaggagctgtttcacagcctgcagcctctgctggtctctgtgctcagtgacagcacagctagccctgctgcccggctccacgtgagtgtgcctgtgccccatgaaacccttcctgcaccttatccctcagcagagtggtgggttccccctatcttcagcctcctttactctgaggggagtgagctccagggctgggaacccaggttcacccgctgaccgtggcattgcattgcccttctcccaacagtgtgcttctgcccttggcctgggctgctacgtggctgccgctgacatccaggacctggtctcttgccttgcctgcttagaaagtgttttcagccggttctatggcttggggggcagctccacaagtcctgtggttcctgccagcctgcacggcctgctctctgctgccctgcaggcctgggcattgctgctcaccatctgccctagcacccaaatcagccacatccttgacaggcagctgccccggctgccccagctcttgtccagtgaaagtgtgaacctgcggatcgctgccggtgaaaccattgcactgctctttgagcttgcccgggaccttgaggaggagtttgtttacgaggacatggaggccctctgcagtgtcctgcgcactctggccactgacagtaacaagtaccgtgccaaggctgatcgtcggcgccagcgctctactttccgcgccgtgctgcactccgtggagggcggtgaatgcgaagaagagatagtgcgcttcggctttgaggtgctctacatggacagctgggctcggcaccggatctacgctgccttcaaggaagtgctgggttcgggcatgcaccaccacctccagaacaatgagctactccgtgacatctttggcctgggccctgtgctgttgctggatgccactgccctgaaggcctgcaaggttccacgctttgagaagcacctgtacaatgctgctgccttcaaagcccggaccaaggctcgaagccgtgtgcgggacaagcgggcagacatcctgtgaagcaggacctgctgaagaggagactttctatgcccttggtccgtatttttaacagaagacagtgcaacaactggtctccaccagtatttgtcactttattttttttaatgacaaaaccaaaaacagacatggggtgggtagctgggggcccggacacttgggaccctgacccctttgtccctgcactcagccctgtggccccttcctgtcctgtctcaggccaggctaaatatgtgccttcctcagggctgtggggcaggcactagggggcctttcccttcctttcctttctcaggccttgctcccccaggatgacccactcttaggggggtggtggcatctggacaaatgccaccacagcaggtggggtggcaaagctacctggaatggatttgtgtgctgatttttaaggattattacagataattaaacagaacggtcagccttctgtggtctta

SEQ ID NO: 459430 - DNA, 2002 bp, Homo sapiens
tgcccaacttgagctcgctgcccactgcctgttgggagtccgcgctcccagcggtgacccggccagcccctccgggcctcagttgcctgctgggtggacaaactcaccggacagggcaggaagccagtcctcttgccaaaccctgatcctttcctggactggtcaaggaagttggcgggagtcctggcctgctccggtgaagagagggagggggctctgttgggaagctacctggttagggccttggcagcttggcaggcctgactccacaaggtgcccggagcagtgcccaagctgactcgggttccagtgacgatgaggcagccagtgaggcccgcagcaccgccagtgaatgccccagccttctcagcaccactgcagaggacagccttgggggggatgtcgtggatgagcagggccagcaggaagaccttgaggaaaagctgaaggagtatgtggactgtctcacagacaagagtgccaagacccggcagggtgctcttgagagcctgcgcctggccctagcgtcccgcctactccccgacttcttgctggagcgccgcctcacgctagccgatgccctggaaaagtgcctcaagaaagggaagggcgaggaacaagccctggctgctgctgtgctaggcctgctctgcgtgcagctgggccctggacctaagggtgaggagctgtttcacagcctgcagcctctgctggtctctgtgctcagtgacagcacagctagccctgctgcccggctccactgtgcttctgcccttggcctgggctgctacgtggctgccgctgacatccaggacctggtctcttgccttgcctgcttagaaagtgttttcagccggttctatggcttggggggcagctccacaagtcctgtggttcctgccagcctgcacggcctgctctctgctgccctgcaggcctgggcattgctgctcaccatctgccctagcacccaaatcagccacatccttgacaggcagctgccccggctgccccagctcttgtccagtgaaagtgtgaacctgcggatcgctgccggtgaaaccattgcactgctctttgagcttgcccgggaccttgaggaggagtttgtttacgaggacatggaggccctctgcagtgtcctgcgcactctggccactgacagtaacaagtaccgtgccaaggctgatcgtcggcgccagcgctctactttccgcgccgtgctgcactccgtggagggcggtgaatgcgaagaagagatagtgcgcttcggctttgaggtgctctacatggacagctgggctcggcaccggatctacgctgccttcaaggaagtgctgggttcgggcatgcaccaccacctccagaacaatgagctactccgtgacatctttggcctgggccctgtgctgttgctggatgccactgccctgaaggcctgcaaggttccacgctttgagaagcacctgtacaatgctgctgccttcaaagcccggaccaaggctcgaagccgtgtgcgggacaagcgggcagacatcctgtgaagcaggacctgctgaagaggagactttctatgcccttggtccgtatttttaacagaagacagtgcaacaactggtctccaccagtatttgtcactttattttttttaatgacaaaaccaaaaacagacatggggtgggtagctgggggcccggacacttgggaccctgacccctttgtccctgcactcagccctgtggccccttcctgtcctgtctcaggccaggctaaatatgtgccttcctcagggctgtggggcaggcactagggggcctttcccttcctttcctttctcaggccttgctcccccaggatgacccactcttaggggggtggtggcatctggacaaatgccaccacagcaggtggggtggcaaagctacctggaatggatttgtgtgctgatttttaaggattattacagataattaaacagaacggtcagccttctgtggtctta

SEQ ID NO: 459431 - DNA, 2301 bp, Homo sapiens
atgggccccaaaaaatcttggcgaagtcacttttttccactgcctgaggtttggctgttgctcctgttatcccaagctctaagcccttcccatggtccccagacccaggcaggggtaggtctcgtctggagtgtcccgctgccaagtgccctgagaagccagtcctgccttggtgctccactgagggacgcttcggagttaaccaccgtgcacttgttcccgacgcggggctggggcgcgcgcagggcattgtgggtgcatagttcagccagcgcgtcgtcggctggtgggccccaggcgtggactaccattcccatggtgctctacgcgcagctagccgccgtcgcctgcgcgctcaggcctctgggattagtagttttagcctcgtggatgtgggcctgaatcggatggcctggaactcgccttcccggcgacctgtttggcagggcggggcgcctcgcgaagatggtggcgcgcgcggcgtgtggctcccgtcgtctggccaagtctcagcgcagcgcaccggccggcgtctcgttggcctggagcccacacccaccgggtccctgaccccgcgccccccgcgcccggttcccggcatgcctcgcgcccgtaagggcaacacgctccggaagggtggtcagcgccgtggaggaggtgcccggagcagtgcccaagctgactcgggttccagtgacgatgaggcagccagtgaggcccgcagcaccgccagtgaatgccccagccttctcagcaccactgcagaggacagccttgtgccaagacccggcagggtgctcttgagagcctgcgcctggccctagcgtcccgcctactccccgacttcttgctggagcgccgcctcacgctagccgatgccctggaaaagtgcctcaagaaagggaagggcgaggaacaagccctggctgctgctgtgctaggcctgctctgcgtgcagctgggccctggacctaagggtgaggagctgtttcacagcctgcagcctctgctggtctctgtgctcagtgacagcacagctagccctgctgcccggctccactgtgcttctgcccttggcctgggctgctacgtggctgccgctgacatccaggacctggtctcttgccttgcctgcttagaaagtgttttcagccggttctatggcttggggggcagctccacaagtcctgtggttcctgccagcctgcacggcctgctctctgctgccctgcaggcctgggcattgctgctcaccatctgccctagcacccaaatcagccacatccttgacaggcagctgccccggctgccccagctcttgtccagtgaaagtgtgaacctgcggatcgctgccggtgaaaccattgcactgctctttgagcttgcccgggaccttgaggaggagtttgtttacgaggacatggaggccctctgcagtgtcctgcgcactctggccactgacagtaacaagtaccgtgccaaggctgatcgtcggcgccagcgctctactttccgcgccgtgctgcactccgtggagggcggtgaatgcgaagaagagatagtgcgcttcggctttgaggtgctctacatggacagctgggctcggcaccggatctacgctgccttcaaggaagtgctgggttcgggcatgcaccaccacctccagaacaatgagctactccgtgacatctttggcctgggccctgtgctgttgctggatgccactgccctgaaggcctgcaaggttccacgctttgagaagcacctgtacaatgctgctgccttcaaagcccggaccaaggctcgaagccgtgtgcgggacaagcgggcagacatcctgtgaagcaggacctgctgaagaggagactttctatgcccttggtccgtatttttaacagaagacagtgcaacaactggtctccaccagtatttgtcactttattttttttaatgacaaaaccaaaaacagacatggggtgggtagctgggggcccggacacttgggaccctgacccctttgtccctgcactcagccctgtggccccttcctgtcctgtctcaggccaggctaaatatgtgccttcctcagggctgtggggcaggcactagggggcctttcccttcctttcctttctcaggccttgctcccccaggatgacccactcttaggggggtggtggcatctggacaaatgccaccacagcaggtggggtggcaaagctacctggaatggatttgtgtgctgatttttaaggattattacagataattaaacagaacggtcagccttctgtggtctta

SEQ ID NO: 459432 - DNA, 2566 bp, Homo sapiens
atgggccccaaaaaatcttggcgaagtcacttttttccactgcctgaggtttggctgttgctcctgttatcccaagctctaagcccttcccatggtccccagacccaggcaggggtaggtctcgtctggagtgtcccgctgccaagtgccctgagaagccagtcctgccttggtgctccactgagggacgcttcggagttaaccaccgtgcacttgttcccgacgcggggctggggcgcgcgcagggcattgtgggtgcatagttcagccagcgcgtcgtcggctggtgggccccaggcgtggactaccattcccatggtgctctacgcgcagctagccgccgtcgcctgcgcgctcaggcctctgggattagtagttttagcctcgtggatgtgggcctgaatcggatggcctggaactcgccttcccggcgacctgtttggcagggcggggcgcctcgcgaagatggtggcgcgcgcggcgtgtggctcccgtcgtctggccaagtctcagcgcagcgcaccggccggcgtctcgttggcctggagcccacacccaccgggtccctgaccccgcgccccccgcgcccggttcccggcatgcctcgcgcccgtaagggcaacacgctccggaagggtggtcagcgccgtggaggaggtgcccggagcagtgcccaagctgactcgggttccagtgacgatgaggcagccagtgaggcccgcagcaccgccagtgaatgccccagccttctcagcaccactgcagaggacagccttggtgagagcgggtggaagtttgacaggggcttggtgagggctccatgggctgaggacaagaagcggtgctgaccaggtggccttgcagggggggatgtcgtggatgagcagggccagcaggaagaccttgaggaaaagctgaaggagtatgtggactgtctcacagacaagaggtacccctggctgccagccaactcctacacccagctccaagtgtgatcaagggagggctggcccatatgaccccccttctcgacctcccccagtgccaagacccggcagggtgctcttgagagcctgcgcctggccctagcgtcccgcctactccccgacttcttgctggagcgccgcctcacgctagccgatgccctggaaaagtgcctcaagaaagggaagggcgaggaacaagccctggctgctgctgtgctaggcctgctctgcgtgcagctgggccctggacctaagggtgaggagctgtttcacagcctgcagcctctgctggtctctgtgctcagtgacagcacagctagccctgctgcccggctccactgtgcttctgcccttggcctgggctgctacgtggctgccgctgacatccaggacctggtctcttgccttgcctgcttagaaagtgttttcagccggttctatggcttggggggcagctccacaagtcctgtggttcctgccagcctgcacggcctgctctctgctgccctgcaggcctgggcattgctgctcaccatctgccctagcacccaaatcagccacatccttgacaggcagctgccccggctgccccagctcttgtccagtgaaagtgtgaacctgcggatcgctgccggtgaaaccattgcactgctctttgagcttgcccgggaccttgaggaggagtttgtttacgaggacatggaggccctctgcagtgtcctgcgcactctggccactgacagtaacaagtaccgtgccaaggctgatcgtcggcgccagcgctctactttccgcgccgtgctgcactccgtggagggcggtgaatgcgaagaagagatagtgcgcttcggctttgaggtgctctacatggacagctgggctcggcaccggatctacgctgccttcaaggaagtgctgggttcgggcatgcaccaccacctccagaacaatgagctactccgtgacatctttggcctgggccctgtgctgttgctggatgccactgccctgaaggcctgcaaggttccacgctttgagaagcacctgtacaatgctgctgccttcaaagcccggaccaaggctcgaagccgtgtgcgggacaagcgggcagacatcctgtgaagcaggacctgctgaagaggagactttctatgcccttggtccgtatttttaacagaagacagtgcaacaactggtctccaccagtatttgtcactttattttttttaatgacaaaaccaaaaacagacatggggtgggtagctgggggcccggacacttgggaccctgacccctttgtccctgcactcagccctgtggccccttcctgtcctgtctcaggccaggctaaatatgtgccttcctcagggctgtggggcaggcactagggggcctttcccttcctttcctttctcaggccttgctcccccaggatgacccactcttaggggggtggtggcatctggacaaatgccaccacagcaggtggggtggcaaagctacctggaatggatttgtgtgctgatttttaaggattattacagataattaaacagaacggtcagccttctgtggtctta

SEQ ID NO: 459433 - DNA, 2869 bp, Homo sapiens
atgggccccaaaaaatcttggcgaagtcacttttttccactgcctgaggtttggctgttgctcctgttatcccaagctctaagcccttcccatggtccccagacccaggcaggggtaggtctcgtctggagtgtcccgctgccaagtgccctgagaagccagtcctgccttggtgctccactgagggacgcttcggagttaaccaccgtgcacttgttcccgacgcggggctggggcgcgcgcagggcattgtgggtgcatagttcagccagcgcgtcgtcggctggtgggccccaggcgtggactaccattcccatggtgctctacgcgcagctagccgccgtcgcctgcgcgctcaggcctctgggattagtagttttagcctcgtggatgtgggcctgaatcggatggcctggaactcgccttcccggcgacctgtttggcagggcggggcgcctcgcgaagatggtggcgcgcgcggcgtgtggctcccgtcgtctggccaagtctcagcgcagcgcaccggccggcgtctcgttggcctggagcccacacccaccgggtccctgaccccgcgccccccgcgcccggttcccggcatgcctcgcgcccgtaagggcaacacgctccggaagggtggtcagcgccgtggaggaggtgcccggagcagtgcccaagctgactcgggttccagtgacgatgaggcagccagtgaggcccgcagcaccgccagtgaatgccccagccttctcagcaccactgcagaggacagccttgggggggatgtcgtggatgagcagggccagcaggaagaccttgaggaaaagctgaaggagtatgtggactgtctcacagacaagagtgccaagacccggcagggtgctcttgagagcctgcgcctggccctagcgtcccgcctactccccgacttcttgctggagcgccgcctcacgctagccgatgccctggaaaagtgcctcaagaaagggaagggcgaggaacaagccctggctgctgctgtgctaggcctgctctgcgtgcagctgggccctggacctaagggtgaggagctgtttcacagcctgcagcctctgctggtctctgtgctcagtgacagcacagctagccctgctgcccggctccacgtgagtgtgcctgtgccccatgaaacccttcctgcaccttatccctcagcagagtggtgggttccccctatcttcagcctcctttactctgaggggagtgagctccagggctgggaacccaggttcacccgctgaccgtggcattgcattgcccttctcccaacagtgtgcttctgcccttggcctgggctgctacgtggctgccgctgacatccaggacctggtctcttgccttgcctgcttagaaagtgttttcagccggttctatggcttggggggcagctccacaagtcctgtggttcctgccagcctgcacggcctgctctctgctgccctgcaggcctgggcattgctgctcaccatctgccctagcacccaaatcagccacatccttgacaggcagctgccccggctgccccagctcttgtccagtgaaagtgtgaacctgcggatcgctgccggtgaaaccattgcactgctctttgagcttgcccgggaccttgaggtgcgagggacaaggatggggggtgcttggtgacaccacctgcccatcacaggctggatgcagggggtgccacacaaaacagaacagctttaggtcattatgcagaggaggtggccccaaaacagatttatctcctagatgtcatgatgggtgccctcagcagtggtgtcctggcctgacagaggccaaggaggggtcaaaggggccaggcagagaagagagggtctctcagtgaaaggaggggtttgggcagtgccctgttcagagccagcagagctcaagcatctaccacacaccctccaatgctcccattgcaggaggagtttgtttacgaggacatggaggccctctgcagtgtcctgcgcactctggccactgacagtaacaagtaccgtgccaaggctgatcgtcggcgccagcgctctactttccgcgccgtgctgcactccgtggagggcggtgaatgcgaagaagagatagtgcgcttcggctttgaggtgctctacatggacagctgggctcggcaccggatctacgctgccttcaaggaagtgctgggttcgggcatgcaccaccacctccagaacaatgagctactccgtgacatctttggcctgggccctgtgctgttgctggatgccactgccctgaaggcctgcaaggttccacgctttgagaagcacctgtacaatgctgctgccttcaaagcccggaccaaggctcgaagccgtgtgcgggacaagcgggcagacatcctgtgaagcaggacctgctgaagaggagactttctatgcccttggtccgtatttttaacagaagacagtgcaacaactggtctccaccagtatttgtcactttattttttttaatgacaaaaccaaaaacagacatggggtgggtagctgggggcccggacacttgggaccctgacccctttgtccctgcactcagccctgtggccccttcctgtcctgtctcaggccaggctaaatatgtgccttcctcagggctgtggggcaggcactagggggcctttcccttcctttcctttctcaggccttgctcccccaggatgacccactcttaggggggtggtggcatctggacaaatgccaccacagcaggtggggtggcaaagctacctggaatggatttgtgtgctgatttttaaggattattacagataattaaacagaacggtcagccttctgtggtctta

SEQ ID NO: 459434 - DNA, 2384 bp, Homo sapiens
atgggccccaaaaaatcttggcgaagtcacttttttccactgcctgaggtttggctgttgctcctgttatcccaagctctaagcccttcccatggtccccagacccaggcaggggtaggtctcgtctggagtgtcccgctgccaagtgccctgagaagccagtcctgccttggtgctccactgagggacgcttcggagttaaccaccgtgcacttgttcccgacgcggggctggggcgcgcgcagggcattgtgggtgcatagttcagccagcgcgtcgtcggctggtgggccccaggcgtggactaccattcccatggtgctctacgcgcagctagccgccgtcgcctgcgcgctcaggcctctgggattagtagttttagcctcgtggatgtgggcctgaatcggatggcctggaactcgccttcccggcgacctgtttggcagggcggggcgcctcgcgaagatggtggcgcgcgcggcgtgtggctcccgtcgtctggccaagtctcagcgcagcgcaccggccggcgtctcgttggcctggagcccacacccaccgggtccctgaccccgcgccccccgcgcccggttcccggcatgcctcgcgcccgtaagggcaacacgctccggaagggtggtcagcgccgtggaggaggtgcccggagcagtgcccaagctgactcgggttccagtgacgatgaggcagccagtgaggcccgcagcaccgccagtgaatgccccagccttctcagcaccactgcagaggacagccttggtgagagcgggtggaagtttgacaggggcttggtgagggctccatgggctgaggacaagaagcggtgctgaccaggtggccttgcagggggggatgtcgtggatgagcagggccagcaggaagaccttgaggaaaagctgaaggagtatgtggactgtctcacagacaagaggtacccctggctgccagccaactcctacacccagctccaagtgtgatcaagggagggctggcccatatgaccccccttctcgacctcccccagtgccaagacccggcagggtgctcttgagagcctgcgcctggccctagcgtcccgcctactccccgacttcttgctggagcgccgcctcacgctagccgatgccctggaaaagtgcctcaagaaagggaagggcgaggaacaagccctggctgctgctgtgctaggcctgctctgcgtgcagctgggccctggacctaagggtgaggagctgtttcacagcctgcagcctctgctggtctctgtgctcagtgacagcacagctagccctgctgcccggctccactgtgcttctgcccttggcctgggctgctacgtggctgccgctgacatccaggcagctgccccggctgccccagctcttgtccagtgaaagtgtgaacctgcggatcgctgccggtgaaaccattgcactgctctttgagcttgcccgggaccttgaggaggagtttgtttacgaggacatggaggccctctgcagtgtcctgcgcactctggccactgacagtaacaagtaccgtgccaaggctgatcgtcggcgccagcgctctactttccgcgccgtgctgcactccgtggagggcggtgaatgcgaagaagagatagtgcgcttcggctttgaggtgctctacatggacagctgggctcggcaccggatctacgctgccttcaaggaagtgctgggttcgggcatgcaccaccacctccagaacaatgagctactccgtgacatctttggcctgggccctgtgctgttgctggatgccactgccctgaaggcctgcaaggttccacgctttgagaagcacctgtacaatgctgctgccttcaaagcccggaccaaggctcgaagccgtgtgcgggacaagcgggcagacatcctgtgaagcaggacctgctgaagaggagactttctatgcccttggtccgtatttttaacagaagacagtgcaacaactggtctccaccagtatttgtcactttattttttttaatgacaaaaccaaaaacagacatggggtgggtagctgggggcccggacacttgggaccctgacccctttgtccctgcactcagccctgtggccccttcctgtcctgtctcaggccaggctaaatatgtgccttcctcagggctgtggggcaggcactagggggcctttcccttcctttcctttctcaggccttgctcccccaggatgacccactcttaggggggtggtggcatctggacaaatgccaccacagcaggtggggtggcaaagctacctggaatggatttgtgtgctgatttttaaggattattacagataattaaacagaacggtcagccttctgtggtctta

SEQ ID NO: 459435 - DNA, 2110 bp, Homo sapiens
  misc_feature (2046)..(2046): n is a, c, g, or t
atgggccccaaaaaatcttggcgaagtcacttttttccactgcctgaggtttggctgttgctcctgttatcccaagctctaagcccttcccatggtccccagacccaggcaggggtaggtctcgtctggagtgtcccgctgccaagtgccctgagaagccagtcctgccttggtgctccactgagggacgcttcggagttaaccaccgtgcacttgttcccgacgcggggctggggcgcgcgcagggcattgtgggtgcatagttcagccagcgcgtcgtcggctggtgggccccaggcgtggactaccattcccatggtgctctacgcgcagctagccgccgtcgcctgcgcgctcaggcctctgggattagtagttttagcctcgtggatgtgggcctgaatcggatggcctggaactcgccttcccggcgacctgtttggcagggcggggcgcctcgcgaagatggtggcgcgcgcggcgtgtggctcccgtcgtctggccaagtctcagcgcagcgcaccggccggcgtctcgttggcctggagcccacacccaccgggtccctgaccccgcgccccccgcgcccggttcccggcatgcctcgcgcccgtaagggcaacacgctccggaagggtggtcagcgccgtggaggaggtgcccggagcagtgcccaagctgactcgggttccagtgacgatgaggcagccagtgaggcccgcagcaccgccagtgaatgccccagccttctcagcaccactgcagaggacagccttgggggggatgtcgtggatgagcagggccagcaggaagaccttgaggaaaagctgaaggagtatgtggactgtctcacagacaagagtgccaagacccggcagggtgctcttgagagcctgcgcctggccctagcgtcccgcctactccccgacttcttgctggagcgccgcctcacgctagccgatgccctggaaaagtgcctcaagaaagggaagggcgaggaacaagccctggctgctgctgtgctaggcctgctctgcgtgcagctgggccctggacctaagggtgaggagctgtttcacagcctgcagcctctgctggtctctgtgctcagtgacagcacagctagccctgctgcccggctccactgtgcttctgcccttggcctgggctgctacgtggctgccgctgacatccaggcagctgccccggctgccccagctcttgtccagtgaaagtgtgaacctgcggatcgctgccggtgaaaccattgcactgctctttgagcttgcccgggaccttgaggaggagtttgtttacgaggacatggaggccctctgcagtgtcctgcgcactctggccactgacagtaacaagtaccgtgccaaggctgatcgtcggcgccagcgctctactttccgcgccgtgctgcactccgtggagggcggtgaatgcgaagaagagatagtgcgcttcggctttgaggtgctctacatggacagctgggctcggcaccggatctacgctgccttcaaggaagtgctgggttcgggcatgcaccaccacctccagaacaatgagctactccgtgacatctttggcctgggccctgtgctgttgctggatgccactgccctgaaggcctgcaaggttccacgctttgagaagcacctgtacaatgctgctgccttcaaagcccggaccaaggctcgaagccgtgtgcgggacaagcgggcagacatcctgtgaagcaggacctgctgaagaggagactttctatgcccttggtccgtatttttaacagaagacagtgcaacaactggtctccaccagtatttgtcactttattttttttaatgacaaaaccaaaaacagacatggggtgggtagctgggggcccggacacttgggaccctgacccctttgtccctgcactcagccctgtggccccttcctgtcctgtctcaggccaggctaaatatgtgccttcctcagggctgtggggcaggcactaggggtttccttctttcttttaagctgtcccagatnccctagggggggggtctcgactgccacgggcgggggacctgcggtgcggcctcggttacataag

SEQ ID NO: 459436 - DNA, 1415 bp, Homo sapiens
atgggccccaaaaaatcttggcgaagtcacttttttccactgcctgaggtttggctgttgctcctgttatcccaagctctaagcccttcccatggtccccagacccaggcaggggtaggtctcgtctggagtgtcccgctgccaagtgccctgagaagccagtcctgccttggtgctccactgagggacgcttcggagttaaccaccgtgcacttgttcccgacgcggggctggggcgcgcgcagggcattgtgggtgcatagttcagccagcgcgtcgtcggctggtgggccccaggcgtggactaccattcccatggtgctctacgcgcagctagccgccgtcgcctgcgcgctcaggcctctgggattagtagttttagcctcgtggatgtgggcctgaatcggatggcctggaactcgccttcccggcgacctgtttggcagggcggggcgcctcgcgaagatggtggcgcgcgcggcgtgtggctcccgtcgtctggccaagtctcagcgcagcgcaccggccggcgtctcgttggcctggagcccacacccaccgggtccctgaccccgcgccccccgcgcccggttcccggcatgcctcgcgcccgtaagggcaacacgctccggaagggtggtcagcgccgtggaggaggtgcccggagcagtgcccaagctgactcgggttccagtgacgatgaggcagccagtgaggcccgcagcaccgccagtgaatgccccagccttctcagcaccactgcagaggacagccttgggggggatgtcgtggatgagcagggccagcaggaagaccttgaggaaaagctgaaggagtatgtggactgtctcacagacaagagtgccaagacccggcagggtgctcttgagagcctgcgcctggccctagcgtcccgcctactccccgacttcttgctggagcgccgcctcacgctagccgatgccctggaaaagtgcctcaagaaagggaagggcgaggaacaagccctggctgctgctgtgctaggcctgctctgcgtgcagctgggccctggacctaagggtgaggagctgtttcacagcctgcagcctctgctggtctctgtgctcagtgacagcacagctagccctgctgcccggctccactgtgcttctgcctggctggctgtacgtggtgcgttgacatcaggactgttcttgctgctgctagaaggttcagccggctaaaggttgggggagtcacaatctgggtctgcagctgagctgcttgtgctgagctggcatgtggtccatttgcaaaccaatacatcttgaagctgccggccattgccagtgaccgaacggaaacgcttgtgcgcagaataaaccactgctcgggaaagaaagaacgggaaattttcccctatcctctccacc

SEQ ID NO: 459437 - DNA, 343 bp, Homo sapiens
agcagaggccagtgcgcaggctggactttgtcctgcagatgaggggtgtgagtagttcttagaagtagggccagcctggtgatcacaccctgtccaaaactctgccacagcagccaaccttgccaatgtcagcccttggccctggacagaccccacacacaggagtgcaccagccctactgaactgacccttggctttggtttttcatctctgagagggacaccattctatcttttgggattatgaggtcgagtgaggtacccccagccatccctcatcagtagaggcaagttgagtgtcctattccaccttctccaggtgcccggagcagtgcccaagctga

SEQ ID NO: 459438 - DNA, 1954 bp, Homo sapiens
  misc_feature (1472)..(1472): n is a, c, g, or t
tgggaacggcccaccgcagggttggccaccttgagaagctgcgaagatggcggagtaaggcgtgccgctgcaaactggcctctgggccgggggcgagcagcccccgggaggccgagtgcatctgttggaccgtgcgaggagaagaaaaaaaatatcggccagaggagaggaactaaccgaacattcttcctccctaccttatagaggggagtggtcatctacactaaagcaaagtgttaggcgcgtccgtgcgaagagaccaccaaacaggctttgtgttccttatcacaggaagaaaattttccttgacctttaggtgcttttatattcatctcaaaaacaaaattctgaactcaggacttggcaagtgtctctatgttgtctcctagagtgggtagtcctgcttcttttacccagttactttccctgtttttgaaatgtggctatcacttctctacacattacctccatgatttggaatggaaaaggccacttttctttttgttctgcctctcaaattcaacacagaggagctcctaggattccagttatcctgctaacatctccaggaagaaagaagcaactcacatgggtcttttgctgtttgcttaattataaagacatcattttgcaagcagaaggctgagtttcatttgaaacaggtgcttaggtggtggtatttgtgaatacttttcattccaagcaagaagactaaagaagtagcaagtatgaatgacttcagggtttaaaaaaaatgtcttccagtttcagccactaccatgataagcacagttgagactgcagcagtaaattccaaatatgtgtttctaatttgacgtgaaagatactaaaaatttatatttgtatatttaaatcctggctcatcctgtgacatagatttactgaataggaacaaaggcccaattttaaacaaaaacctaggccgggtgtggtggctcacacctgtaatcccaacactttgggaggccaaggcaggcaaatcacctgaggttgggagtttgagaccagcctgaccaacatggagaaaccccatctctactaaaaatagaaaattagccaggtgtggtggtagatacgtgtaatctcagctactcgtgaggctgaggcaggagaattgcttgaatccgggaggcggaggttgcagtgaactgagattgcaccactgcactccagcctgggcgacagagtgagactccgtctcagaaaaataaaaaacaactttggacatagaggagttgggggcagaggggggaggatgagagaattttccatgtaactccttttccttaagaaaaagaagcaaaaatccctcatgcagtgccatctgactttatggtgtttcacattatatagttactttttttaataaacgcataagattaactcttcctgcaacccaaggtggatacttggatgtttgatttttatttatttatttatttattttttgnggcagtctctctctgttgcccaggctggagtgatgcgtgatttctgctcactgcagtctctcccacccgggttcaagcgattctcctgcctcagcctcccaagtagctaggattacaggcgcgcaccaccacgctcagcctgatttctaggctgaaaaggctgggactcaggtactttccccagttgggactgaactttctcatcagagaatgggcctcagaagcaatgttcccaaacttgtggttgggtcatcgtggaaaagaaacctcaaataagaaaaataattacaataagaaatggattttcttttttcccacaacagttatacattataaagaacagactgtcgtagaaaactgtctttgcttccaaatcagcagaggaccattgtatgtattgtcaggtctttatataagagtgaaacctttatttatgcttcttgtgagtagagaataaattttaaaactaattagatgaaatt

SEQ ID NO: 459439 - DNA, 566 bp, Homo sapiens
caagacctttgacaatttcaaagggttttttccgccctggggtttcctaaggaaggggggaaaaaggggccccgttaccaagcccaggaaaattttggattctttagtaaaaaccccatctctactaaaaatagaaaattagccaggtgtggtggtagatacgtgtaatctcagtcagcctcccaagtagctaggattacaggcgcgcaccaccacgctcagcctgatttctaggctgaaaaggctgggactcaggtactttccccagttgggactgaactttctcatcagagaatgggcctcagaagcaatgttcccaaacttgtggttgggtcatcgtggaaaagaaacctcaaataagaaaaataattacaataagaaatggattttcttttttcccacaacagttatacattataaagaacagactgtcgtagaaaactgtctttgcttccaaatcagcagaggaccattgtatgtattgtcaggtctttatataagagtgaaacctttatttatgcttcttgtgagtagagaataaattttaaaactaattagatgaaatt

SEQ ID NO: 459440 - DNA, 8839 bp, Homo sapiens
  misc_feature (1472)..(1472): n is a, c, g, or t
tgggaacggcccaccgcagggttggccaccttgagaagctgcgaagatggcggagtaaggcgtgccgctgcaaactggcctctgggccgggggcgagcagcccccgggaggccgagtgcatctgttggaccgtgcgaggagaagaaaaaaaatatcggccagaggagaggaactaaccgaacattcttcctccctaccttatagaggggagtggtcatctacactaaagcaaagtgttaggcgcgtccgtgcgaagagaccaccaaacaggctttgtgttccttatcacaggaagaaaattttccttgacctttaggtgcttttatattcatctcaaaaacaaaattctgaactcaggacttggcaagtgtctctatgttgtctcctagagtgggtagtcctgcttcttttacccagttactttccctgtttttgaaatgtggctatcacttctctacacattacctccatgatttggaatggaaaaggccacttttctttttgttctgcctctcaaattcaacacagaggagctcctaggattccagttatcctgctaacatctccaggaagaaagaagcaactcacatgggtcttttgctgtttgcttaattataaagacatcattttgcaagcagaaggctgagtttcatttgaaacaggtgcttaggtggtggtatttgtgaatacttttcattccaagcaagaagactaaagaagtagcaagtatgaatgacttcagggtttaaaaaaaatgtcttccagtttcagccactaccatgataagcacagttgagactgcagcagtaaattccaaatatgtgtttctaatttgacgtgaaagatactaaaaatttatatttgtatatttaaatcctggctcatcctgtgacatagatttactgaataggaacaaaggcccaattttaaacaaaaacctaggccgggtgtggtggctcacacctgtaatcccaacactttgggaggccaaggcaggcaaatcacctgaggttgggagtttgagaccagcctgaccaacatggagaaaccccatctctactaaaaatagaaaattagccaggtgtggtggtagatacgtgtaatctcagctactcgtgaggctgaggcaggagaattgcttgaatccgggaggcggaggttgcagtgaactgagattgcaccactgcactccagcctgggcgacagagtgagactccgtctcagaaaaataaaaaacaactttggacatagaggagttgggggcagaggggggaggatgagagaattttccatgtaactccttttccttaagaaaaagaagcaaaaatccctcatgcagtgccatctgactttatggtgtttcacattatatagttactttttttaataaacgcataagattaactcttcctgcaacccaaggtggatacttggatgtttgatttttatttatttatttatttattttttgnggcagtctctctctgttgcccaggctggagtgatgcgtgatttctgctcactgcagtctctcccacccgggttcaagcgattctcctgcctcagcctcccaagtagctaggattacaggcgcgcaccaccacgctcagcctgatttctaggctgaaaaggctgggactcaggtactttccccagttgggactgaactttctcatcagagaatgggcctcagaagcaatgttcccaaacttgtggttgggtcatcgtggaaaagaaacctcaaataagaaaaataattacaataagaaatggattttcttttttcccacaacagttatacattataaagaacagactgtcgtagaaaactgtctttgcttccaaatcagcagaggaccattgtatgtattgtcaggtctttatataagagtgaaacctttatttatgcttcttgtgagtagagaataaattttaaaactaattagatgaaattaagaacagagtattggaacatctctgtgttttccggaatgtttactcaggtccatgaatgctgtgatgctgggaacttagggaagattcaccaaaatttgagagtgataaaaatggcctaaaatgggaaatggtgagcactcttattattagtgagattggtcaatcagcccatttgaaatgggtaaaaaatactttcagtaaaataattacatattatatataaaatatttctttttttgagggcagctactgagtgataaaagcatagtagaaatcactttggttaaaagtaactcaaatttttctcttaagtaatctaccaacttcctgatgtttttctttaatattttggaactgttcaagacagaatggagcctacatatatggtgttccactagtatgttgaaaatgtcatatcatggagaatggagacaccttccaggtgtctgttaaacccatcttctctgtgtacttctggcatcttttttggtaggatcatttggcagggggtagagtacctgtacttttggcaccattgaaaccagctctggcccacttgtttgaatagctatcagactcagcgtctctatatgctttatatacagttgagagaaccagtgtttaatgctcttgaaattgtatcttccatgcttcagaccagatgcatttaacaaaatggatatattccagctgtagttgcccagtgtttacttaacacatctacatttttttcttgtctattttggtccccttgataggaaaagctataattttaggcaggactatacgtcgatttgtagccatgcttccttcctttcccttgctcatccatgttagctggcagtttttcttttgaaaagttaaaaccgggatatgtgcaatagaaatatatatatatatatgtatattttaatacttgtggacaaatgttacaagttgtttaagaacaacaaaatcaccaatgtcttccattttgagatgtgtatagttttgtaagcattagtgcttggtagcatattgtagtgccatgttaggggttagtgcatgagtctagtgattttaaacttcaggatgaattattgataataacaaatagtgtaaaaagagtggaaaatctaaaccttttctttttccataatgtctaaatctgttatattcttcctggggaaaagagattaaggcccaaaagactcatttatgaatagaaatgtggggtcaaaatctgagatactatatttgaggacatttcagctttccataaggtatctggaaaccagctgtctttgtgtcttatgaaacctcaagtcaaaatgagaccgcatttaattattctgctttgctctttttttggggtgggggggagatagagtttcactctgtcacccaggctggagtgcagtggcacaatctttgctcactgtaacctctgcctcttgggttcaagtgattctcgtgccccagcctcccgagtagctgggactacaggcacgtgccaccacgcccagctaatttttatatttttagtagagacggggtttgctgtgttggccaggctggtctcaaactcctgacctcaagtaatccacctggcctgctcttttcatgtcttaacatggcatgtcttttagtttcattattttcctactccttgtatgtcaagaaattacattttgcatgtcttatggagatgctgttaattgcttcagtgagtgcttttctaatctgcagaccatttacatttcctgtttgcagcatgctgtgtgcaaacactcagtaatttggagtattcaattatttgttagggctcttcctatttccaaatgtgctgaattgtctattgatgggattttcagatcttttcatgagaactggaaatgtagctgggtggcacctacctaggttgctacgtagtgagtagactttctcttgggtatagtaagcctcagacagctttcacttttatctactttacttgtggaaataaaacagtcattttgttctgaaagaataagatagctttctgtagagaaggaattcctacctctaaaagctgccttgagaactcagaactggcagttttctgaggtgatttttaaatttcagtattagggagagtccagcatttgctgacacagattctacataactaatgtatgatagcaaatgcaaaactattataatgtggtgtatcttgcgcatacacaggttagaacaagtagactctggcagcagatctccagagacccaagtttaggttctcatagtgtatttgaagtagttatactcctggcttaagtagtttagtgcctgggagaatccattactgaaaagcatttaacttaaaaaaaaaaaaaatgaaaaggtagtgaatacagaatagcacaatatataggaaaggatatttcctgttgaaaaaaaaagccataaaattaatagtaattttcaagaggtagaattttagtagcaataagtttgtgcatgtatagtaatttgcattagcaaggttgtacaatagaataagtgatactactggagtttgtggggctctgcaaccaagagttgcacaagggccaggtgcggtggcttacacctataatcccagcactttgggaggccaaggtgggcggatcacaaggtcaagagatcaggaccatcctggccaacatggtgaaatgccatctctactaaaaatacaaaacttagctgggcatggtggcacatgcctgtaatcccagctactcaggaggctgaggcagtagaatcacttaaacctgagaggcggaggttgcagtgagctgagatcacaccactgtactccagcctggtgacagtaagactccacctcaaacaaacaaaaaatgcacaaaaggaaaaaatgttctggataaagagcatatgaaaggtactttcttttagaacagtatgaatgtatatgaatttatctttatgtgagaaataatcttttttgtaagttaaaggttaaagaccctgcttgtttcctaaatcagagggttagagctgttgaaattaaacctttatagtgcttaacctggaaacaaatgtactacagccccactgaagccgctctatgggttttttgcttacgatgttttagcaacaggcatttattttgtagaatggtatactttctgctttgtctcctcatctttctccactggtttcctgggtacattttttttaaagggagagaagtttgtgagtttaatgttttaaaaaaactcccaagaacatggataagccggatttctctcatgcttatgattagggagttaggatttaaagatgcaaagcagaaggactgaaaggaatagccagtgaatatgtttcagtgggtgaggtgtgaaaccttgtctaatatagatgtgtcctatggcctgtgactgcttattctttatcaatgagaactcagcaaactagtttctttcttgatctgaggaaccacacagctcacatcagaatataatagtggaactagggtgacttcactccctttcacctgatgtctatcttggccttttagcaccttgactatccctgaaaagactgggtctttgttttcccagggaaaaaacgaagtgatgtagatctaagaaatagtgcctctttaatatttaattcttacatgacaactaacacacagggaaaaggctatgttaagttgattatagctcctcttaaaatgtcctatgctgtcagttggtcttagagacatgggaataaccaagcaatattcagacatctgcactatctggggacagcgctacatagtacaatgatgtcagcagttcagttacttggaacaattaaagattacccttaacagccatgttaatacatctaaatgctaaaatatactacgagtttttcatagtcttgaaagtatacagttaattacttttcaaagttactgtggtctcatgtttactcttcttgtatctgtgatatgcaaaaagatgaagactcttggcctccaggagtttacattctcatggtgctgttggttcaagcagattgctttagtttattaatgaacattgcttggctattaattatatcctatttggaaggatcccttggtgaacagttttaaaaagcagagggctgtgctaaatttcagggtattgatagcttgagtttacattgtattagccctgctcgttatcatttttttccccagggagctatgcaggtaatgctcattagcatgaatcagaaaagaaaccattctgcctaagagcatcttaaccatccccctaaaccacctatgctctcctgttatagttgtcagtaaatcacgaagaaaattaacagctccttaagactctacatccctcaattctctttcttttcccagagtttgtacatcattctctactcagatggaccaggatttgcatataagccttttaaaactgactagtggtcctaattttaacatttttgtgtatgactcctatcccttttctgaagcagcattgtgatagatgtggagcttctacctgcatttctaagcaattattaacccaacttttgagttgaaacttgcatggatccttgttatgtcccgtaattcctctgaatcaaggaatttattttgcatgcttattaaactcaaactgggtctgattgaaagtgcaagcaatagtgacaggaccttaactctggttttagagtacgaacattctaatgcatgactcaaaatgtccagtgttgtggttactagttattttatatatgcatttgttaataatgaagcaatagagactaagaccaatagcttgaatatattcagattattttcatgttttaataaaggatttttcttacttccattgaaaatgggaagtagaagataaacaggggcaaccacaagacattcaaactgtcaggactagggcgtagcagtgcccaccctctaaccacttgcctggttccattagtccccaagcatgtttgaaaacaaaagacacaaactaagcatgctgaataaaactagctgctatggctgtaataatcagaaaggtgcagagtttcagaaagagtaggaaagtagggaatgccagtatggagtatgtaaaataactagatatggatatggggtttgtttatgatatgctttatgtagacaaagtttgaggtcttttaaaactgggatttgagttgaaaagagtcaggatgcacatatttccactatttcaggattttcagatgactaggcacatgttgtggatgatactggtaccaactaccaatgaccaactataaagtacccctgcaataagggagacttcctttttgtagaatagtcctgaaaatactgacagatctgtggttagtttgttattttattgcataaaaaacagtttaaacaaattttatagccaaagttttatccttgatgggtttggccagactgcaatttcttgactaaagcttttaatgccaggttaaacaggagaaactttttccactagaagaaaatccttgctatctattttttccaatagaagaaaatccttgctatttattttatttgatgaataaacaaatttattgcagtagcttaaaaaaattttttttttaaacagtctcactctgtcgcccaggctggagtgaagcaatgtgatctcagctcactgcaacctccacctcccgagtagctgggattacagacatgcaccaccaccctcagctaatttttgtatttttagtagagacggggtttcgccatgttggccaggctggtctttaactcctggccttacgtgatccgcccccccttagccttccaaagtgctgggattacaggtgtgagccactgcacctggcctgtagtagcttaaaattttccttgagaaaattcctgactttaaaaataacccttatataagtacaagtgattgtgacaaatgacgtaaaaatggcattcatgatgtctgaaacaagcctaaatagaattcaagattagactaaatgattttcacaaagcacattcaaggttttacattctatgattgaaaaaaattttttgaaaactttttatttcattctttcctgtaggattttgctacaaataactttgggaatgaataaagtggaatggtaactttccagtggttcagaattgaattagacttcttgtgactgtgatgtttggtttccattgaaatatatgaagtgagatgtcatatcctgaatatagtttgtcttccccaattacttgatagcatgtctgtcagccagtaaagattaagaacagagtttctctaaattcctccgattattccactaaggcacattaaaatacttaattttgggaaaccagacatcacagatttctccatgaagtcctaaatcttctttaaagtcagaataggtatcttagttactgacagtattcaggtttttttctcccttggtgatatgtcattccatcagtgaaaaaatattttctcccagggataagaaaggtattctggtaatacattatcatcaatccttaaacagtaacagtcttggcacttatcacaaaaccgacccatttcttataaccagaaagattatcttagactgtccttcacattatactttacctactgccttgtaagaataagagttgctcactgtgtttacttgctgtcctccatattctccattgcaccattggtgtataacgttaagagtttcattgaatattattttaagtattacaaaaggcagcttgcttcttaatctatgcatctttggggtttttgaagaaatttaattctttgatgtaaaaaggaactgttaaaaaagttggaagctctgcacctgtgtatatatatattttagcaataaagcagcatgggctgagaatgca

SEQ ID NO: 459441 - DNA, 8386 bp, Homo sapiens
tgggaacggcccaccgcagggttggccaccttgagaagctgcgaagatggcggagtaaggcgtgccgctgcaaactggcctctgggccgggggcgagcagcccccgggaggccgagtgcatctgttggaccgtgcgaggagaagaaaaaaaatatcggccagaggagaggaactaaccgaacattcttcctccctaccttatagaggggagtggtcatctacactaaagcaaagtgttaggcgcgtccgtgcgaagagaccaccaaacaggctttgtgttccttatcacaggaagaaaattttccttgacctttaggtgcttttatattcatctcaaaaacaaaattctgaactcaggacttggcaagtgtctctatgttgtctcctagagtgggtagtcctgcttcttttacccagttactttccctgtttttgaaatgtggctatcacttctctacacattacctccatgatttggaatggaaaaggccacttttctttttgttctgcctctcaaattcaacacagaggagctcctaggattccagttatcctgctaacatctccaggaagaaagaagcaactcacatgggtcttttgctgtttgcttaattataaagacatcattttgcaagcagaaggctgagtttcatttgaaacaggtgcttaggtggtggtatttgtgaatacttttcattccaagcaagaagactaaagaagtagcaagtatgaatgacttcagggtttaaaaaaaatgtcttccagtttcagccactaccatgataagcacagttgagactgcagcagtaaattccaaatatgtgtttctaatttgacgtgaaagatactaaaaatttatatttgtatatttaaatcctggctcatcctgtgacatagatttactgaataggaacaaaggcccaattttaaacaaaaacctaggccgggtgtggtggctcacacctgtaatcccaacactttgggaggccaaggcaggcaaatcacctgaggttgggagtttgagaccagcctgaccaacatggagaaaccccatctctactaaaaatagaaaattagccaggtgtggtggtagatacgtgtaatctcagtcagcctcccaagtagctaggattacaggcgcgcaccaccacgctcagcctgatttctaggctgaaaaggctgggactcaggtactttccccagttgggactgaactttctcatcagagaatgggcctcagaagcaatgttcccaaacttgtggttgggtcatcgtggaaaagaaacctcaaataagaaaaataattacaataagaaatggattttcttttttcccacaacagttatacattataaagaacagactgtcgtagaaaactgtctttgcttccaaatcagcagaggaccattgtatgtattgtcaggtctttatataagagtgaaacctttatttatgcttcttgtgagtagagaataaattttaaaactaattagatgaaattaagaacagagtattggaacatctctgtgttttccggaatgtttactcaggtccatgaatgctgtgatgctgggaacttagggaagattcaccaaaatttgagagtgataaaaatggcctaaaatgggaaatggtgagcactcttattattagtgagattggtcaatcagcccatttgaaatgggtaaaaaatactttcagtaaaataattacatattatatataaaatatttctttttttgagggcagctactgagtgataaaagcatagtagaaatcactttggttaaaagtaactcaaatttttctcttaagtaatctaccaacttcctgatgtttttctttaatattttggaactgttcaagacagaatggagcctacatatatggtgttccactagtatgttgaaaatgtcatatcatggagaatggagacaccttccaggtgtctgttaaacccatcttctctgtgtacttctggcatcttttttggtaggatcatttggcagggggtagagtacctgtacttttggcaccattgaaaccagctctggcccacttgtttgaatagctatcagactcagcgtctctatatgctttatatacagttgagagaaccagtgtttaatgctcttgaaattgtatcttccatgcttcagaccagatgcatttaacaaaatggatatattccagctgtagttgcccagtgtttacttaacacatctacatttttttcttgtctattttggtccccttgataggaaaagctataattttaggcaggactatacgtcgatttgtagccatgcttccttcctttcccttgctcatccatgttagctggcagtttttcttttgaaaagttaaaaccgggatatgtgcaatagaaatatatatatatatatgtatattttaatacttgtggacaaatgttacaagttgtttaagaacaacaaaatcaccaatgtcttccattttgagatgtgtatagttttgtaagcattagtgcttggtagcatattgtagtgccatgttaggggttagtgcatgagtctagtgattttaaacttcaggatgaattattgataataacaaatagtgtaaaaagagtggaaaatctaaaccttttctttttccataatgtctaaatctgttatattcttcctggggaaaagagattaaggcccaaaagactcatttatgaatagaaatgtggggtcaaaatctgagatactatatttgaggacatttcagctttccataaggtatctggaaaccagctgtctttgtgtcttatgaaacctcaagtcaaaatgagaccgcatttaattattctgctttgctctttttttggggtgggggggagatagagtttcactctgtcacccaggctggagtgcagtggcacaatctttgctcactgtaacctctgcctcttgggttcaagtgattctcgtgccccagcctcccgagtagctgggactacaggcacgtgccaccacgcccagctaatttttatatttttagtagagacggggtttgctgtgttggccaggctggtctcaaactcctgacctcaagtaatccacctggcctgctcttttcatgtcttaacatggcatgtcttttagtttcattattttcctactccttgtatgtcaagaaattacattttgcatgtcttatggagatgctgttaattgcttcagtgagtgcttttctaatctgcagaccatttacatttcctgtttgcagcatgctgtgtgcaaacactcagtaatttggagtattcaattatttgttagggctcttcctatttccaaatgtgctgaattgtctattgatgggattttcagatcttttcatgagaactggaaatgtagctgggtggcacctacctaggttgctacgtagtgagtagactttctcttgggtatagtaagcctcagacagctttcacttttatctactttacttgtggaaataaaacagtcattttgttctgaaagaataagatagctttctgtagagaaggaattcctacctctaaaagctgccttgagaactcagaactggcagttttctgaggtgatttttaaatttcagtattagggagagtccagcatttgctgacacagattctacataactaatgtatgatagcaaatgcaaaactattataatgtggtgtatcttgcgcatacacaggttagaacaagtagactctggcagcagatctccagagacccaagtttaggttctcatagtgtatttgaagtagttatactcctggcttaagtagtttagtgcctgggagaatccattactgaaaagcatttaacttaaaaaaaaaaaaaatgaaaaggtagtgaatacagaatagcacaatatataggaaaggatatttcctgttgaaaaaaaaagccataaaattaatagtaattttcaagaggtagaattttagtagcaataagtttgtgcatgtatagtaatttgcattagcaaggttgtacaatagaataagtgatactactggagtttgtggggctctgcaaccaagagttgcacaagggccaggtgcggtggcttacacctataatcccagcactttgggaggccaaggtgggcggatcacaaggtcaagagatcaggaccatcctggccaacatggtgaaatgccatctctactaaaaatacaaaacttagctgggcatggtggcacatgcctgtaatcccagctactcaggaggctgaggcagtagaatcacttaaacctgagaggcggaggttgcagtgagctgagatcacaccactgtactccagcctggtgacagtaagactccacctcaaacaaacaaaaaatgcacaaaaggaaaaaatgttctggataaagagcatatgaaaggtactttcttttagaacagtatgaatgtatatgaatttatctttatgtgagaaataatcttttttgtaagttaaaggttaaagaccctgcttgtttcctaaatcagagggttagagctgttgaaattaaacctttatagtgcttaacctggaaacaaatgtactacagccccactgaagccgctctatgggttttttgcttacgatgttttagcaacaggcatttattttgtagaatggtatactttctgctttgtctcctcatctttctccactggtttcctgggtacattttttttaaagggagagaagtttgtgagtttaatgttttaaaaaaactcccaagaacatggataagccggatttctctcatgcttatgattagggagttaggatttaaagatgcaaagcagaaggactgaaaggaatagccagtgaatatgtttcagtgggtgaggtgtgaaaccttgtctaatatagatgtgtcctatggcctgtgactgcttattctttatcaatgagaactcagcaaactagtttctttcttgatctgaggaaccacacagctcacatcagaatataatagtggaactagggtgacttcactccctttcacctgatgtctatcttggccttttagcaccttgactatccctgaaaagactgggtctttgttttcccagggaaaaaacgaagtgatgtagatctaagaaatagtgcctctttaatatttaattcttacatgacaactaacacacagggaaaaggctatgttaagttgattatagctcctcttaaaatgtcctatgctgtcagttggtcttagagacatgggaataaccaagcaatattcagacatctgcactatctggggacagcgctacatagtacaatgatgtcagcagttcagttacttggaacaattaaagattacccttaacagccatgttaatacatctaaatgctaaaatatactacgagtttttcatagtcttgaaagtatacagttaattacttttcaaagttactgtggtctcatgtttactcttcttgtatctgtgatatgcaaaaagatgaagactcttggcctccaggagtttacattctcatggtgctgttggttcaagcagattgctttagtttattaatgaacattgcttggctattaattatatcctatttggaaggatcccttggtgaacagttttaaaaagcagagggctgtgctaaatttcagggtattgatagcttgagtttacattgtattagccctgctcgttatcatttttttccccagggagctatgcaggtaatgctcattagcatgaatcagaaaagaaaccattctgcctaagagcatcttaaccatccccctaaaccacctatgctctcctgttatagttgtcagtaaatcacgaagaaaattaacagctccttaagactctacatccctcaattctctttcttttcccagagtttgtacatcattctctactcagatggaccaggatttgcatataagccttttaaaactgactagtggtcctaattttaacatttttgtgtatgactcctatcccttttctgaagcagcattgtgatagatgtggagcttctacctgcatttctaagcaattattaacccaacttttgagttgaaacttgcatggatccttgttatgtcccgtaattcctctgaatcaaggaatttattttgcatgcttattaaactcaaactgggtctgattgaaagtgcaagcaatagtgacaggaccttaactctggttttagagtacgaacattctaatgcatgactcaaaatgtccagtgttgtggttactagttattttatatatgcatttgttaataatgaagcaatagagactaagaccaatagcttgaatatattcagattattttcatgttttaataaaggatttttcttacttccattgaaaatgggaagtagaagataaacaggggcaaccacaagacattcaaactgtcaggactagggcgtagcagtgcccaccctctaaccacttgcctggttccattagtccccaagcatgtttgaaaacaaaagacacaaactaagcatgctgaataaaactagctgctatggctgtaataatcagaaaggtgcagagtttcagaaagagtaggaaagtagggaatgccagtatggagtatgtaaaataactagatatggatatggggtttgtttatgatatgctttatgtagacaaagtttgaggtcttttaaaactgggatttgagttgaaaagagtcaggatgcacatatttccactatttcaggattttcagatgactaggcacatgttgtggatgatactggtaccaactaccaatgaccaactataaagtacccctgcaataagggagacttcctttttgtagaatagtcctgaaaatactgacagatctgtggttagtttgttattttattgcataaaaaacagtttaaacaaattttatagccaaagttttatccttgatgggtttggccagactgcaatttcttgactaaagcttttaatgccaggttaaacaggagaaactttttccactagaagaaaatccttgctatctattttttccaatagaagaaaatccttgctatttattttatttgatgaataaacaaatttattgcagtagcttaaaaaaattttttttttaaacagtctcactctgtcgcccaggctggagtgaagcaatgtgatctcagctcactgcaacctccacctcccgagtagctgggattacagacatgcaccaccaccctcagctaatttttgtatttttagtagagacggggtttcgccatgttggccaggctggtctttaactcctggccttacgtgatccgcccccccttagccttccaaagtgctgggattacaggtgtgagccactgcacctggcctgtagtagcttaaaattttccttgagaaaattcctgactttaaaaataacccttatataagtacaagtgattgtgacaaatgacgtaaaaatggcattcatgatgtctgaaacaagcctaaatagaattcaagattagactaaatgattttcacaaagcacattcaaggttttacattctatgattgaaaaaaattttttgaaaactttttatttcattctttcctgtaggattttgctacaaataactttgggaatgaataaagtggaatggtaactttccagtggttcagaattgaattagacttcttgtgactgtgatgtttggtttccattgaaatatatgaagtgagatgtcatatcctgaatatagtttgtcttccccaattacttgatagcatgtctgtcagccagtaaagattaagaacagagtttctctaaattcctccgattattccactaaggcacattaaaatacttaattttgggaaaccagacatcacagatttctccatgaagtcctaaatcttctttaaagtcagaataggtatcttagttactgacagtattcaggtttttttctcccttggtgatatgtcattccatcagtgaaaaaatattttctcccagggataagaaaggtattctggtaatacattatcatcaatccttaaacagtaacagtcttggcacttatcacaaaaccgacccatttcttataaccagaaagattatcttagactgtccttcacattatactttacctactgccttgtaagaataagagttgctcactgtgtttacttgctgtcctccatattctccattgcaccattggtgtataacgttaagagtttcattgaatattattttaagtattacaaaaggcagcttgcttcttaatctatgcatctttggggtttttgaagaaatttaattctttgatgtaaaaaggaactgttaaaaaagttggaagctctgcacctgtgtatatatatattttagcaataaagcagcatgggctgagaatgca

SEQ ID NO: 459442 - DNA, 9105 bp, Homo sapiens
  misc_feature (1472)..(1472): n is a, c, g, or t
  misc_feature (8983)..(8983): n is a, c, g, or t
tgggaacggcccaccgcagggttggccaccttgagaagctgcgaagatggcggagtaaggcgtgccgctgcaaactggcctctgggccgggggcgagcagcccccgggaggccgagtgcatctgttggaccgtgcgaggagaagaaaaaaaatatcggccagaggagaggaactaaccgaacattcttcctccctaccttatagaggggagtggtcatctacactaaagcaaagtgttaggcgcgtccgtgcgaagagaccaccaaacaggctttgtgttccttatcacaggaagaaaattttccttgacctttaggtgcttttatattcatctcaaaaacaaaattctgaactcaggacttggcaagtgtctctatgttgtctcctagagtgggtagtcctgcttcttttacccagttactttccctgtttttgaaatgtggctatcacttctctacacattacctccatgatttggaatggaaaaggccacttttctttttgttctgcctctcaaattcaacacagaggagctcctaggattccagttatcctgctaacatctccaggaagaaagaagcaactcacatgggtcttttgctgtttgcttaattataaagacatcattttgcaagcagaaggctgagtttcatttgaaacaggtgcttaggtggtggtatttgtgaatacttttcattccaagcaagaagactaaagaagtagcaagtatgaatgacttcagggtttaaaaaaaatgtcttccagtttcagccactaccatgataagcacagttgagactgcagcagtaaattccaaatatgtgtttctaatttgacgtgaaagatactaaaaatttatatttgtatatttaaatcctggctcatcctgtgacatagatttactgaataggaacaaaggcccaattttaaacaaaaacctaggccgggtgtggtggctcacacctgtaatcccaacactttgggaggccaaggcaggcaaatcacctgaggttgggagtttgagaccagcctgaccaacatggagaaaccccatctctactaaaaatagaaaattagccaggtgtggtggtagatacgtgtaatctcagctactcgtgaggctgaggcaggagaattgcttgaatccgggaggcggaggttgcagtgaactgagattgcaccactgcactccagcctgggcgacagagtgagactccgtctcagaaaaataaaaaacaactttggacatagaggagttgggggcagaggggggaggatgagagaattttccatgtaactccttttccttaagaaaaagaagcaaaaatccctcatgcagtgccatctgactttatggtgtttcacattatatagttactttttttaataaacgcataagattaactcttcctgcaacccaaggtggatacttggatgtttgatttttatttatttatttatttattttttgnggcagtctctctctgttgcccaggctggagtgatgcgtgatttctgctcactgcagtctctcccacccgggttcaagcgattctcctgcctcagcctcccaagtagctaggattacaggcgcgcaccaccacgctcagcctgatttctaggctgaaaaggctgggactcaggtactttccccagttgggactgaactttctcatcagagaatgggcctcagaagcaatgttcccaaacttgtggttgggtcatcgtggaaaagaaacctcaaataagaaaaataattacaataagaaatggattttcttttttcccacaacagttatacattataaagaacagactgtcgtagaaaactgtctttgcttccaaatcagcagaggaccattgtatgtattgtcaggtctttatataagagtgaaacctttatttatgcttcttgtgagtagagaataaattttaaaactaattagatgaaattaagaacagagtattggaacatctctgtgttttccggaatgtttactcaggtccatgaatgctgtgatgctgggaacttagggaagattcaccaaaatttgagagtgataaaaatggcctaaaatgggaaatggtgagcactcttattattagtgagattggtcaatcagcccatttgaaatgggtaaaaaatactttcagtaaaataattacatattatatataaaatatttctttttttgagggcagctactgagtgataaaagcatagtagaaatcactttggttaaaagtaactcaaatttttctcttaagtaatctaccaacttcctgatgtttttctttaatattttggaactgttcaagacagaatggagcctacatatatggtgttccactagtatgttgaaaatgtcatatcatggagaatggagacaccttccaggtgtctgttaaacccatcttctctgtgtacttctggcatcttttttggtaggatcatttggcagggggtagagtacctgtacttttggcaccattgaaaccagctctggcccacttgtttgaatagctatcagactcagcgtctctatatgctttatatacagttgagagaaccagtgtttaatgctcttgaaattgtatcttccatgcttcagaccagatgcatttaacaaaatggatatattccagctgtagttgcccagtgtttacttaacacatctacatttttttcttgtctattttggtccccttgataggaaaagctataattttaggcaggactatacgtcgatttgtagccatgcttccttcctttcccttgctcatccatgttagctggcagtttttcttttgaaaagttaaaaccgggatatgtgcaatagaaatatatatatatatatgtatattttaatacttgtggacaaatgttacaagttgtttaagaacaacaaaatcaccaatgtcttccattttgagatgtgtatagttttgtaagcattagtgcttggtagcatattgtagtgccatgttaggggttagtgcatgagtctagtgattttaaacttcaggatgaattattgataataacaaatagtgtaaaaagagtggaaaatctaaaccttttctttttccataatgtctaaatctgttatattcttcctggggaaaagagattaaggcccaaaagactcatttatgaatagaaatgtggggtcaaaatctgagatactatatttgaggacatttcagctttccataaggtatctggaaaccagctgtctttgtgtcttatgaaacctcaagtcaaaatgagaccgcatttaattattctgctttgctctttttttggggtgggggggagatagagtttcactctgtcacccaggctggagtgcagtggcacaatctttgctcactgtaacctctgcctcttgggttcaagtgattctcgtgccccagcctcccgagtagctgggactacaggcacgtgccaccacgcccagctaatttttatatttttagtagagacggggtttgctgtgttggccaggctggtctcaaactcctgacctcaagtaatccacctggcctgctcttttcatgtcttaacatggcatgtcttttagtttcattattttcctactccttgtatgtcaagaaattacattttgcatgtcttatggagatgctgttaattgcttcagtgagtgcttttctaatctgcagaccatttacatttcctgtttgcagcatgctgtgtgcaaacactcagtaatttggagtattcaattatttgttagggctcttcctatttccaaatgtgctgaattgtctattgatgggattttcagatcttttcatgagaactggaaatgtagctgggtggcacctacctaggttgctacgtagtgagtagactttctcttgggtatagtaagcctcagacagctttcacttttatctactttacttgtggaaataaaacagtcattttgttctgaaagaataagatagctttctgtagagaaggaattcctacctctaaaagctgccttgagaactcagaactggcagttttctgaggtgatttttaaatttcagtattagggagagtccagcatttgctgacacagattctacataactaatgtatgatagcaaatgcaaaactattataatgtggtgtatcttgcgcatacacaggttagaacaagtagactctggcagcagatctccagagacccaagtttaggttctcatagtgtatttgaagtagttatactcctggcttaagtagtttagtgcctgggagaatccattactgaaaagcatttaacttaaaaaaaaaaaaaatgaaaaggtagtgaatacagaatagcacaatatataggaaaggatatttcctgttgaaaaaaaaagccataaaattaatagtaattttcaagaggtagaattttagtagcaataagtttgtgcatgtatagtaatttgcattagcaaggttgtacaatagaataagtgatactactggagtttgtggggctctgcaaccaagagttgcacaagggccaggtgcggtggcttacacctataatcccagcactttgggaggccaaggtgggcggatcacaaggtcaagagatcaggaccatcctggccaacatggtgaaatgccatctctactaaaaatacaaaacttagctgggcatggtggcacatgcctgtaatcccagctactcaggaggctgaggcagtagaatcacttaaacctgagaggcggaggttgcagtgagctgagatcacaccactgtactccagcctggtgacagtaagactccacctcaaacaaacaaaaaatgcacaaaaggaaaaaatgttctggataaagagcatatgaaaggtactttcttttagaacagtatgaatgtatatgaatttatctttatgtgagaaataatcttttttgtaagttaaaggttaaagaccctgcttgtttcctaaatcagagggttagagctgttgaaattaaacctttatagtgcttaacctggaaacaaatgtactacagccccactgaagccgctctatgggttttttgcttacgatgttttagcaacaggcatttattttgtagaatggtatactttctgctttgtctcctcatctttctccactggtttcctgggtacattttttttaaagggagagaagtttgtgagtttaatgttttaaaaaaactcccaagaacatggataagccggatttctctcatgcttatgattagggagttaggatttaaagatgcaaagcagaaggactgaaaggaatagccagtgaatatgtttcagtgggtgaggtgtgaaaccttgtctaatatagatgtgtcctatggcctgtgactgcttattctttatcaatgagaactcagcaaactagtttctttcttgatctgaggaaccacacagctcacatcagaatataatagtggaactagggtgacttcactccctttcacctgatgtctatcttggccttttagcaccttgactatccctgaaaagactgggtctttgttttcccagggaaaaaacgaagtgatgtagatctaagaaatagtgcctctttaatatttaattcttacatgacaactaacacacagggaaaaggctatgttaagttgattatagctcctcttaaaatgtcctatgctgtcagttggtcttagagacatgggaataaccaagcaatattcagacatctgcactatctggggacagcgctacatagtacaatgatgtcagcagttcagttacttggaacaattaaagattacccttaacagccatgttaatacatctaaatgctaaaatatactacgagtttttcatagtcttgaaagtatacagttaattacttttcaaagttactgtggtctcatgtttactcttcttgtatctgtgatatgcaaaaagatgaagactcttggcctccaggagtttacattctcatggtgctgttggttcaagcagattgctttagtttattaatgaacattgcttggctattaattatatcctatttggaaggatcccttggtgaacagttttaaaaagcagagggctgtgctaaatttcagggtattgatagcttgagtttacattgtattagccctgctcgttatcatttttttccccagggagctatgcaggtaatgctcattagcatgaatcagaaaagaaaccattctgcctaagagcatcttaaccatccccctaaaccacctatgctctcctgttatagttgtcagtaaatcacgaagaaaattaacagctccttaagactctacatccctcaattctctttcttttcccagagtttgtacatcattctctactcagatggaccaggatttgcatataagccttttaaaactgactagtggtcctaattttaacatttttgtgtatgactcctatcccttttctgaagcagcattgtgatagatgtggagcttctacctgcatttctaagcaattattaacccaacttttgagttgaaacttgcatggatccttgttatgtcccgtaattcctctgaatcaaggaatttattttgcatgcttattaaactcaaactgggtctgattgaaagtgcaagcaatagtgacaggaccttaactctggttttagagtacgaacattctaatgcatgactcaaaatgtccagtgttgtggttactagttattttatatatgcatttgttaataatgaagcaatagagactaagaccaatagcttgaatatattcagattattttcatgttttaataaaggatttttcttacttccattgaaaatgggaagtagaagataaacaggggcaaccacaagacattcaaactgtcaggactagggcgtagcagtgcccaccctctaaccacttgcctggttccattagtccccaagcatgtttgaaaacaaaagacacaaactaagcatgctgaataaaactagctgctatggctgtaataatcagaaaggtgcagagtttcagaaagagtaggaaagtagggaatgccagtatggagtatgtaaaataactagatatggatatggggtttgtttatgatatgctttatgtagacaaagtttgaggtcttttaaaactgggatttgagttgaaaagagtcaggatgcacatatttccactatttcaggattttcagatgactaggcacatgttgtggatgatactggtaccaactaccaatgaccaactataaagtacccctgcaataagggagacttcctttttgtagaatagtcctgaaaatactgacagatctgtggttagtttgttattttattgcataaaaaacagtttaaacaaattttatagccaaagttttatccttgatgggtttggccagactgcaatttcttgactaaagcttttaatgccaggttaaacaggagaaactttttccactagaagaaaatccttgctatctattttttccaatagaagaaaatccttgctatttattttatttgatgaataaacaaatttattgcagtagcttaaaaaaattttttttttaaacagtctcactctgtcgcccaggctggagtgaagcaatgtgatctcagctcactgcaacctccacctcccgagtagctgggattacagacatgcaccaccaccctcagctaatttttgtatttttagtagagacggggtttcgccatgttggccaggctggtctttaactcctggccttacgtgatccgcccccccttagccttccaaagtgctgggattacaggtgtgagccactgcacctggcctgtagtagcttaaaattttccttgagaaaattcctgactttaaaaataacccttatataagtacaagtgattgtgacaaatgacgtaaaaatggcattcatgatgtctgaaacaagcctaaatagaattcaagattagactaaatgattttcacaaagcacattcaaggttttacattctatgattgaaaaaaattttttgaaaactttttatttcattctttcctgtaggattttgctacaaataactttgggaatgaataaagtggaatggtaactttccagtggttcagaattgaattagacttcttgtgactgtgatgtttggtttccattgaaatatatgaagtgagatgtcatatcctgaatatagtttgtcttccccaattacttgatagcatgtctgtcagccagtaaagattaagaacagagtttctctaaattcctccgattattccactaaggcacattaaaatacttaattttgggaaaccagacatcacagatttctccatgaagtcctaaatcttctttaaagtcagaataggtatcttagttactgacagtattcaggtttttttctcccttggtgatatgtcattccatcagtgaaaaaatattttctcccagggataagaaaggtattctggtaatacattatcatcaatccttaaacagtaacagtcttggcacttatcacaaaaccgacccatttcttataaccagaaagattatcttagactgtccttcacattatactttacctactgccttgtaagaataagagttgctcactgtgtttacttgctgtcctccatattctccattgcaccattggtgtataacgttaagagtttcattgaatattattttaagtattacaaaaggcagcttgcttcttaatctatgcatctttggggtttttgaagaaatttaattctttgatgtaaaaaggaactgttaaaaaagttggaagctctgcacctgtgtatatatatattttagcaataaagcagcatgggctgagaatgcaaaaaaaaaaaaaaatgctagtgacttcagcaagtcataatcttcctgcgggtggagggtctcactgcgatgtggatggccgctggggctgaccagggtggtggtggcagaaggctggggcggctgtggcagtttcttaaaatangacaacaatgacatttgccacattgatagacttttcttttcacaaaagaagtctctgtagcacgtggttgctgttggtgcactttacccacagtggaacttctttcaaatagtctcaatcct

SEQ ID NO: 459443 - DNA, 8153 bp, Homo sapiens
tgggaacggcccaccgcagggttggccaccttgagaagctgcgaagatggcggagtaaggcgtgccgctgcaaactggcctctgggccgggggcgagcagcccccgggaggccgagtgcatctgttggaccgtgcgaggagaagaaaaaaaatatcggccagaggagaggaactaaccgaacattcttcctccctaccttatagaggggagtggtcatctacactaaagcaaagtgttaggcgcgtccgtgcgaagagaccaccaaacaggctttgtgttccttatcacaggaagaaaattttccttgacctttaggtgcttttatattcatctcaaaaacaaaattctgaactcaggacttggcaagtgtctctatgttgtctcctagagtgggtagtcctgcttcttttacccagttactttccctgtttttgaaatgtggctatcacttctctacacattacctccatgatttggaatggaaaaggccacttttctttttgttctgcctctcaaattcaacacagaggagctcctaggattccagttatcctgctaacatctccaggaagaaagaagcaactcacatgggtcttttgctgtttgcttaattataaagacatcattttgcaagcagaaggctgagtttcatttgaaacaggtgcttaggtggtggtatttgtgaatacttttcattccaagcaagaagactaaagaagtagcaagtatgaatgacttcagggtttaaaaaaaatgtcttccagtttcagccactaccatgataagcacagttgagactgcagcagtaaattccaaatatgtgtttctaatttgacgtgaaagatactaaaaatttatatttgtatatttaaatctcagcctcccaagtagctaggattacaggcgcgcaccaccacgctcagcctgatttctaggctgaaaaggctgggactcaggtactttccccagttgggactgaactttctcatcagagaatgggcctcagaagcaatgttcccaaacttgtggttgggtcatcgtggaaaagaaacctcaaataagaaaaataattacaataagaaatggattttcttttttcccacaacagttatacattataaagaacagactgtcgtagaaaactgtctttgcttccaaatcagcagaggaccattgtatgtattgtcaggtctttatataagagtgaaacctttatttatgcttcttgtgagtagagaataaattttaaaactaattagatgaaattaagaacagagtattggaacatctctgtgttttccggaatgtttactcaggtccatgaatgctgtgatgctgggaacttagggaagattcaccaaaatttgagagtgataaaaatggcctaaaatgggaaatggtgagcactcttattattagtgagattggtcaatcagcccatttgaaatgggtaaaaaatactttcagtaaaataattacatattatatataaaatatttctttttttgagggcagctactgagtgataaaagcatagtagaaatcactttggttaaaagtaactcaaatttttctcttaagtaatctaccaacttcctgatgtttttctttaatattttggaactgttcaagacagaatggagcctacatatatggtgttccactagtatgttgaaaatgtcatatcatggagaatggagacaccttccaggtgtctgttaaacccatcttctctgtgtacttctggcatcttttttggtaggatcatttggcagggggtagagtacctgtacttttggcaccattgaaaccagctctggcccacttgtttgaatagctatcagactcagcgtctctatatgctttatatacagttgagagaaccagtgtttaatgctcttgaaattgtatcttccatgcttcagaccagatgcatttaacaaaatggatatattccagctgtagttgcccagtgtttacttaacacatctacatttttttcttgtctattttggtccccttgataggaaaagctataattttaggcaggactatacgtcgatttgtagccatgcttccttcctttcccttgctcatccatgttagctggcagtttttcttttgaaaagttaaaaccgggatatgtgcaatagaaatatatatatatatatgtatattttaatacttgtggacaaatgttacaagttgtttaagaacaacaaaatcaccaatgtcttccattttgagatgtgtatagttttgtaagcattagtgcttggtagcatattgtagtgccatgttaggggttagtgcatgagtctagtgattttaaacttcaggatgaattattgataataacaaatagtgtaaaaagagtggaaaatctaaaccttttctttttccataatgtctaaatctgttatattcttcctggggaaaagagattaaggcccaaaagactcatttatgaatagaaatgtggggtcaaaatctgagatactatatttgaggacatttcagctttccataaggtatctggaaaccagctgtctttgtgtcttatgaaacctcaagtcaaaatgagaccgcatttaattattctgctttgctctttttttggggtgggggggagatagagtttcactctgtcacccaggctggagtgcagtggcacaatctttgctcactgtaacctctgcctcttgggttcaagtgattctcgtgccccagcctcccgagtagctgggactacaggcacgtgccaccacgcccagctaatttttatatttttagtagagacggggtttgctgtgttggccaggctggtctcaaactcctgacctcaagtaatccacctggcctgctcttttcatgtcttaacatggcatgtcttttagtttcattattttcctactccttgtatgtcaagaaattacattttgcatgtcttatggagatgctgttaattgcttcagtgagtgcttttctaatctgcagaccatttacatttcctgtttgcagcatgctgtgtgcaaacactcagtaatttggagtattcaattatttgttagggctcttcctatttccaaatgtgctgaattgtctattgatgggattttcagatcttttcatgagaactggaaatgtagctgggtggcacctacctaggttgctacgtagtgagtagactttctcttgggtatagtaagcctcagacagctttcacttttatctactttacttgtggaaataaaacagtcattttgttctgaaagaataagatagctttctgtagagaaggaattcctacctctaaaagctgccttgagaactcagaactggcagttttctgaggtgatttttaaatttcagtattagggagagtccagcatttgctgacacagattctacataactaatgtatgatagcaaatgcaaaactattataatgtggtgtatcttgcgcatacacaggttagaacaagtagactctggcagcagatctccagagacccaagtttaggttctcatagtgtatttgaagtagttatactcctggcttaagtagtttagtgcctgggagaatccattactgaaaagcatttaacttaaaaaaaaaaaaaatgaaaaggtagtgaatacagaatagcacaatatataggaaaggatatttcctgttgaaaaaaaaagccataaaattaatagtaattttcaagaggtagaattttagtagcaataagtttgtgcatgtatagtaatttgcattagcaaggttgtacaatagaataagtgatactactggagtttgtggggctctgcaaccaagagttgcacaagggccaggtgcggtggcttacacctataatcccagcactttgggaggccaaggtgggcggatcacaaggtcaagagatcaggaccatcctggccaacatggtgaaatgccatctctactaaaaatacaaaacttagctgggcatggtggcacatgcctgtaatcccagctactcaggaggctgaggcagtagaatcacttaaacctgagaggcggaggttgcagtgagctgagatcacaccactgtactccagcctggtgacagtaagactccacctcaaacaaacaaaaaatgcacaaaaggaaaaaatgttctggataaagagcatatgaaaggtactttcttttagaacagtatgaatgtatatgaatttatctttatgtgagaaataatcttttttgtaagttaaaggttaaagaccctgcttgtttcctaaatcagagggttagagctgttgaaattaaacctttatagtgcttaacctggaaacaaatgtactacagccccactgaagccgctctatgggttttttgcttacgatgttttagcaacaggcatttattttgtagaatggtatactttctgctttgtctcctcatctttctccactggtttcctgggtacattttttttaaagggagagaagtttgtgagtttaatgttttaaaaaaactcccaagaacatggataagccggatttctctcatgcttatgattagggagttaggatttaaagatgcaaagcagaaggactgaaaggaatagccagtgaatatgtttcagtgggtgaggtgtgaaaccttgtctaatatagatgtgtcctatggcctgtgactgcttattctttatcaatgagaactcagcaaactagtttctttcttgatctgaggaaccacacagctcacatcagaatataatagtggaactagggtgacttcactccctttcacctgatgtctatcttggccttttagcaccttgactatccctgaaaagactgggtctttgttttcccagggaaaaaacgaagtgatgtagatctaagaaatagtgcctctttaatatttaattcttacatgacaactaacacacagggaaaaggctatgttaagttgattatagctcctcttaaaatgtcctatgctgtcagttggtcttagagacatgggaataaccaagcaatattcagacatctgcactatctggggacagcgctacatagtacaatgatgtcagcagttcagttacttggaacaattaaagattacccttaacagccatgttaatacatctaaatgctaaaatatactacgagtttttcatagtcttgaaagtatacagttaattacttttcaaagttactgtggtctcatgtttactcttcttgtatctgtgatatgcaaaaagatgaagactcttggcctccaggagtttacattctcatggtgctgttggttcaagcagattgctttagtttattaatgaacattgcttggctattaattatatcctatttggaaggatcccttggtgaacagttttaaaaagcagagggctgtgctaaatttcagggtattgatagcttgagtttacattgtattagccctgctcgttatcatttttttccccagggagctatgcaggtaatgctcattagcatgaatcagaaaagaaaccattctgcctaagagcatcttaaccatccccctaaaccacctatgctctcctgttatagttgtcagtaaatcacgaagaaaattaacagctccttaagactctacatccctcaattctctttcttttcccagagtttgtacatcattctctactcagatggaccaggatttgcatataagccttttaaaactgactagtggtcctaattttaacatttttgtgtatgactcctatcccttttctgaagcagcattgtgatagatgtggagcttctacctgcatttctaagcaattattaacccaacttttgagttgaaacttgcatggatccttgttatgtcccgtaattcctctgaatcaaggaatttattttgcatgcttattaaactcaaactgggtctgattgaaagtgcaagcaatagtgacaggaccttaactctggttttagagtacgaacattctaatgcatgactcaaaatgtccagtgttgtggttactagttattttatatatgcatttgttaataatgaagcaatagagactaagaccaatagcttgaatatattcagattattttcatgttttaataaaggatttttcttacttccattgaaaatgggaagtagaagataaacaggggcaaccacaagacattcaaactgtcaggactagggcgtagcagtgcccaccctctaaccacttgcctggttccattagtccccaagcatgtttgaaaacaaaagacacaaactaagcatgctgaataaaactagctgctatggctgtaataatcagaaaggtgcagagtttcagaaagagtaggaaagtagggaatgccagtatggagtatgtaaaataactagatatggatatggggtttgtttatgatatgctttatgtagacaaagtttgaggtcttttaaaactgggatttgagttgaaaagagtcaggatgcacatatttccactatttcaggattttcagatgactaggcacatgttgtggatgatactggtaccaactaccaatgaccaactataaagtacccctgcaataagggagacttcctttttgtagaatagtcctgaaaatactgacagatctgtggttagtttgttattttattgcataaaaaacagtttaaacaaattttatagccaaagttttatccttgatgggtttggccagactgcaatttcttgactaaagcttttaatgccaggttaaacaggagaaactttttccactagaagaaaatccttgctatctattttttccaatagaagaaaatccttgctatttattttatttgatgaataaacaaatttattgcagtagcttaaaaaaattttttttttaaacagtctcactctgtcgcccaggctggagtgaagcaatgtgatctcagctcactgcaacctccacctcccgagtagctgggattacagacatgcaccaccaccctcagctaatttttgtatttttagtagagacggggtttcgccatgttggccaggctggtctttaactcctggccttacgtgatccgcccccccttagccttccaaagtgctgggattacaggtgtgagccactgcacctggcctgtagtagcttaaaattttccttgagaaaattcctgactttaaaaataacccttatataagtacaagtgattgtgacaaatgacgtaaaaatggcattcatgatgtctgaaacaagcctaaatagaattcaagattagactaaatgattttcacaaagcacattcaaggttttacattctatgattgaaaaaaattttttgaaaactttttatttcattctttcctgtaggattttgctacaaataactttgggaatgaataaagtggaatggtaactttccagtggttcagaattgaattagacttcttgtgactgtgatgtttggtttccattgaaatatatgaagtgagatgtcatatcctgaatatagtttgtcttccccaattacttgatagcatgtctgtcagccagtaaagattaagaacagagtttctctaaattcctccgattattccactaaggcacattaaaatacttaattttgggaaaccagacatcacagatttctccatgaagtcctaaatcttctttaaagtcagaataggtatcttagttactgacagtattcaggtttttttctcccttggtgatatgtcattccatcagtgaaaaaatattttctcccagggataagaaaggtattctggtaatacattatcatcaatccttaaacagtaacagtcttggcacttatcacaaaaccgacccatttcttataaccagaaagattatcttagactgtccttcacattatactttacctactgccttgtaagaataagagttgctcactgtgtttacttgctgtcctccatattctccattgcaccattggtgtataacgttaagagtttcattgaatattattttaagtattacaaaaggcagcttgcttcttaatctatgcatctttggggtttttgaagaaatttaattctttgatgtaaaaaggaactgttaaaaaagttggaagctctgcacctgtgtatatatatattttagcaataaagcagcatgggctgagaatgca

SEQ ID NO: 459444 - DNA, 9090 bp, Homo sapiens
  misc_feature (1472)..(1472): n is a, c, g, or t
tgggaacggcccaccgcagggttggccaccttgagaagctgcgaagatggcggagtaaggcgtgccgctgcaaactggcctctgggccgggggcgagcagcccccgggaggccgagtgcatctgttggaccgtgcgaggagaagaaaaaaaatatcggccagaggagaggaactaaccgaacattcttcctccctaccttatagaggggagtggtcatctacactaaagcaaagtgttaggcgcgtccgtgcgaagagaccaccaaacaggctttgtgttccttatcacaggaagaaaattttccttgacctttaggtgcttttatattcatctcaaaaacaaaattctgaactcaggacttggcaagtgtctctatgttgtctcctagagtgggtagtcctgcttcttttacccagttactttccctgtttttgaaatgtggctatcacttctctacacattacctccatgatttggaatggaaaaggccacttttctttttgttctgcctctcaaattcaacacagaggagctcctaggattccagttatcctgctaacatctccaggaagaaagaagcaactcacatgggtcttttgctgtttgcttaattataaagacatcattttgcaagcagaaggctgagtttcatttgaaacaggtgcttaggtggtggtatttgtgaatacttttcattccaagcaagaagactaaagaagtagcaagtatgaatgacttcagggtttaaaaaaaatgtcttccagtttcagccactaccatgataagcacagttgagactgcagcagtaaattccaaatatgtgtttctaatttgacgtgaaagatactaaaaatttatatttgtatatttaaatcctggctcatcctgtgacatagatttactgaataggaacaaaggcccaattttaaacaaaaacctaggccgggtgtggtggctcacacctgtaatcccaacactttgggaggccaaggcaggcaaatcacctgaggttgggagtttgagaccagcctgaccaacatggagaaaccccatctctactaaaaatagaaaattagccaggtgtggtggtagatacgtgtaatctcagctactcgtgaggctgaggcaggagaattgcttgaatccgggaggcggaggttgcagtgaactgagattgcaccactgcactccagcctgggcgacagagtgagactccgtctcagaaaaataaaaaacaactttggacatagaggagttgggggcagaggggggaggatgagagaattttccatgtaactccttttccttaagaaaaagaagcaaaaatccctcatgcagtgccatctgactttatggtgtttcacattatatagttactttttttaataaacgcataagattaactcttcctgcaacccaaggtggatacttggatgtttgatttttatttatttatttatttattttttgnggcagtctctctctgttgcccaggctggagtgatgcgtgatttctgctcactgcagtctctcccacccgggttcaagcgattctcctgcctcagcctcccaagtagctaggattacaggcgcgcaccaccacgctcagcctgatttctaggctgaaaaggctgggactcaggtactttccccagttgggactgaactttctcatcagagaatgggcctcagaagcaatgttcccaaacttgtggttgggtcatcgtggaaaagaaacctcaaataagaaaaataattacaataagaaatggattttcttttttcccacaacagttatacattataaagaacagactgtcgtagaaaactgtctttgcttccaaatcagcagaggaccattgtatgtattgtcaggtctttatataagagtgaaacctttatttatgcttcttgtgagtagagaataaattttaaaactaattagatgaaattaagaacagagtattggaacatctctgtgttttccggaatgtttactcaggtccatgaatgctgtgatgctgggaacttagggaagattcaccaaaatttgagagtgataaaaatggcctaaaatgggaaatggtgagcactcttattattagtgagattggtcaatcagcccatttgaaatgggtaaaaaatactttcagtaaaataattacatattatatataaaatatttctttttttgagggcagctactgagtgataaaagcatagtagaaatcactttggttaaaagtaactcaaatttttctcttaagtaatctaccaacttcctgatgtttttctttaatattttggaactgttcaagacagaatggagcctacatatatggtgttccactagtatgttgaaaatgtcatatcatggagaatggagacaccttccaggtgtctgttaaacccatcttctctgtgtacttctggcatcttttttggtaggatcatttggcagggggtagagtacctgtacttttggcaccattgaaaccagctctggcccacttgtttgaatagctatcagactcagcgtctctatatgctttatatacagttgagagaaccagtgtttaatgctcttgaaattgtatcttccatgcttcagaccagatgcatttaacaaaatggatatattccagctgtagttgcccagtgtttacttaacacatctacatttttttcttgtctattttggtccccttgataggaaaagctataattttaggcaggactatacgtcgatttgtagccatgcttccttcctttcccttgctcatccatgttagctggcagtttttcttttgaaaagttaaaaccgggatatgtgcaatagaaatatatatatatatatgtatattttaatacttgtggacaaatgttacaagttgtttaagaacaacaaaatcaccaatgtcttccattttgagatgtgtatagttttgtaagcattagtgcttggtagcatattgtagtgccatgttaggggttagtgcatgagtctagtgattttaaacttcaggatgaattattgataataacaaatagtgtaaaaagagtggaaaatctaaaccttttctttttccataatgtctaaatctgttatattcttcctggggaaaagagattaaggcccaaaagactcatttatgaatagaaatgtggggtcaaaatctgagatactatatttgaggacatttcagctttccataaggtatctggaaaccagctgtctttgtgtcttatgaaacctcaagtcaaaatgagaccgcatttaattattctgctttgctctttttttggggtgggggggagatagagtttcactctgtcacccaggctggagtgcagtggcacaatctttgctcactgtaacctctgcctcttgggttcaagtgattctcgtgccccagcctcccgagtagctgggactacaggcacgtgccaccacgcccagctaatttttatatttttagtagagacggggtttgctgtgttggccaggctggtctcaaactcctgacctcaagtaatccacctggcctgctcttttcatgtcttaacatggcatgtcttttagtttcattattttcctactccttgtatgtcaagaaattacattttgcatgtcttatggagatgctgttaattgcttcagtgagtgcttttctaatctgcagaccatttacatttcctgtttgcagcatgctgtgtgcaaacactcagtaatttggagtattcaattatttgttagggctcttcctatttccaaatgtgctgaattgtctattgatgggattttcagatcttttcatgagaactggaaatgtagctgggtggcacctacctaggttgctacgtagtgagtagactttctcttgggtatagtaagcctcagacagctttcacttttatctactttacttgtggaaataaaacagtcattttgttctgaaagaataagatagctttctgtagagaaggaattcctacctctaaaagctgccttgagaactcagaactggcagttttctgaggtgatttttaaatttcagtattagggagagtccagcatttgctgacacagattctacataactaatgtatgatagcaaatgcaaaactattataatgtggtgtatcttgcgcatacacaggttagaacaagtagactctggcagcagatctccagagacccaagtttaggttctcatagtgtatttgaagtagttatactcctggcttaagtagtttagtgcctgggagaatccattactgaaaagcatttaacttaaaaaaaaaaaaaatgaaaaggtagtgaatacagaatagcacaatatataggaaaggatatttcctgttgaaaaaaaaagccataaaattaatagtaattttcaagaggtagaattttagtagcaataagtttgtgcatgtatagtaatttgcattagcaaggttgtacaatagaataagtgatactactggagtttgtggggctctgcaaccaagagttgcacaagggccaggtgcggtggcttacacctataatcccagcactttgggaggccaaggtgggcggatcacaaggtcaagagatcaggaccatcctggccaacatggtgaaatgccatctctactaaaaatacaaaacttagctgggcatggtggcacatgcctgtaatcccagctactcaggaggctgaggcagtagaatcacttaaacctgagaggcggaggttgcagtgagctgagatcacaccactgtactccagcctggtgacagtaagactccacctcaaacaaacaaaaaatgcacaaaaggaaaaaatgttctggataaagagcatatgaaaggtactttcttttagaacagtatgaatgtatatgaatttatctttatgtgagaaataatcttttttgtaagttaaaggttaaagaccctgcttgtttcctaaatcagagggttagagctgttgaaattaaacctttatagtgcttaacctggaaacaaatgtactacagccccactgaagccgctctatgggttttttgcttacgatgttttagcaacaggcatttattttgtagaatggtatactttctgctttgtctcctcatctttctccactggtttcctgggtacattttttttaaagggagagaagtttgtgagtttaatgttttaaaaaaactcccaagaacatggataagccggatttctctcatgcttatgattagggagttaggatttaaagatgcaaagcagaaggactgaaaggaatagccagtgaatatgtttcagtgggtgaggtgtgaaaccttgtctaatatagatgtgtcctatggcctgtgactgcttattctttatcaatgagaactcagcaaactagtttctttcttgatctgaggaaccacacagctcacatcagaatataatagtggaactagggtgacttcactccctttcacctgatgtctatcttggccttttagcaccttgactatccctgaaaagactgggtctttgttttcccagggaaaaaacgaagtgatgtagatctaagaaatagtgcctctttaatatttaattcttacatgacaactaacacacagggaaaaggctatgttaagttgattatagctcctcttaaaatgtcctatgctgtcagttggtcttagagacatgggaataaccaagcaatattcagacatctgcactatctggggacagcgctacatagtacaatgatgtcagcagttcagttacttggaacaattaaagattacccttaacagccatgttaatacatctaaatgctaaaatatactacgagtttttcatagtcttgaaagtatacagttaattacttttcaaagttactgtggtctcatgtttactcttcttgtatctgtgatatgcaaaaagatgaagactcttggcctccaggagtttacattctcatggtgctgttggttcaagcagattgctttagtttattaatgaacattgcttggctattaattatatcctatttggaaggatcccttggtgaacagttttaaaaagcagagggctgtgctaaatttcagggtattgatagcttgagtttacattgtattagccctgctcgttatcatttttttccccagggagctatgcaggtaatgctcattagcatgaatcagaaaagaaaccattctgcctaagagcatcttaaccatccccctaaaccacctatgctctcctgttatagttgtcagtaaatcacgaagaaaattaacagctccttaagactctacatccctcaattctctttcttttcccagagtttgtacatcattctctactcagatggaccaggatttgcatataagccttttaaaactgactagtggtcctaattttaacatttttgtgtatgactcctatcccttttctgaagcagcattgtgatagatgtggagcttctacctgcatttctaagcaattattaacccaacttttgagttgaaacttgcatggatccttgttatgtcccgtaattcctctgaatcaaggaatttattttgcatgcttattaaactcaaactgggtctgattgaaagtgcaagcaatagtgacaggaccttaactctggttttagagtacgaacattctaatgcatgactcaaaatgtccagtgttgtggttactagttattttatatatgcatttgttaataatgaagcaatagagactaagaccaatagcttgaatatattcagattattttcatgttttaataaaggatttttcttacttccattgaaaatgggaagtagaagataaacaggggcaaccacaagacattcaaactgtcaggactagggcgtagcagtgcccaccctctaaccacttgcctggttccattagtccccaagcatgtttgaaaacaaaagacacaaactaagcatgctgaataaaactagctgctatggctgtaataatcagaaaggtgcagagtttcagaaagagtaggaaagtagggaatgccagtatggagtatgtaaaataactagatatggatatggggtttgtttatgatatgctttatgtagacaaagtttgaggtcttttaaaactgggatttgagttgaaaagagtcaggatgcacatatttccactatttcaggattttcagatgactaggcacatgttgtggatgatactggtaccaactaccaatgaccaactataaagtacccctgcaataagggagacttcctttttgtagaatagtcctgaaaatactgacagatctgtggttagtttgttattttattgcataaaaaacagtttaaacaaattttatagccaaagttttatccttgatgggtttggccagactgcaatttcttgactaaagcttttaatgccaggttaaacaggagaaactttttccactagaagaaaatccttgctatctattttttccaatagaagaaaatccttgctatttattttatttgatgaataaacaaatttattgcagtagcttaaaaaaattttttttttaaacagtctcactctgtcgcccaggctggagtgaagcaatgtgatctcagctcactgcaacctccacctcccgagtagctgggattacagacatgcaccaccaccctcagctaatttttgtatttttagtagagacggggtttcgccatgttggccaggctggtctttaactcctggccttacgtgatccgcccccccttagccttccaaagtgctgggattacaggtgtgagccactgcacctggcctgtagtagcttaaaattttccttgagaaaattcctgactttaaaaataacccttatataagtacaagtgattgtgacaaatgacgtaaaaatggcattcatgatgtctgaaacaagcctaaatagaattcaagattagactaaatgattttcacaaagcacattcaaggttttacattctatgattgaaaaaaattttttgaaaactttttatttcattctttcctgtaggattttgctacaaataactttgggaatgaataaagtggaatggtaactttccagtggttcagaattgaattagacttcttgtgactgtgatgtttggtttccattgaaatatatgaagtgagatgtcatatcctgaatatagtttgtcttccccaattacttgatagcatgtctgtcagccagtaaagattaagaacagagtttctctaaattcctccgattattccactaaggcacattaaaatacttaattttgggaaaccagacatcacagatttctccatgaagtcctaaatcttctttaaagtcagaataggtatcttagttactgacagtattcaggtttttttctcccttggtgatatgtcattccatcagtgaaaaaatattttctcccagggataagaaaggtattctggtaatacattatcatcaatccttaaacagtaacagtcttggcacttatcacaaaaccgacccatttcttataaccagaaagattatcttagactgtccttcacattatactttacctactgccttgtaagaataagagttgctcactgtgtttacttgctgtcctccatattctccattgcaccattggtgtataacgttaagagtttcattgaatattattttaagtattacaaaaggcagcttgcttcttaatctatgcatctttggggtttttgaagaaatttaattctttgatgtaaaaaggaactgttaaaaaagttggaagctctgcacctgtgtatatatatattttagcaataaagcagcatgggctgagaatgcaaaaaaaaaaaaaaaaaaaaaaaaaaaaaaaaaaaaaaaaaaaaaaaaaaaaaaaaaaaaaaaaaaataaaaaaacaaaaaaaaaaaaccccaaaaaaaaaaaaaaaaaaaaaaaaaaaaatttttgcccccttggccccagggctttttaaatttggacattttttttcttgggccccaaatttggccctctttgcccaattcccctttttgggggggtttttatttgggccggtttttacgtgggctggg

SEQ ID NO: 459445 - DNA, 8785 bp, Homo sapiens
  misc_feature (1472)..(1472): n is a, c, g, or t
tgggaacggcccaccgcagggttggccaccttgagaagctgcgaagatggcggagtaaggcgtgccgctgcaaactggcctctgggccgggggcgagcagcccccgggaggccgagtgcatctgttggaccgtgcgaggagaagaaaaaaaatatcggccagaggagaggaactaaccgaacattcttcctccctaccttatagaggggagtggtcatctacactaaagcaaagtgttaggcgcgtccgtgcgaagagaccaccaaacaggctttgtgttccttatcacaggaagaaaattttccttgacctttaggtgcttttatattcatctcaaaaacaaaattctgaactcaggacttggcaagtgtctctatgttgtctcctagagtgggtagtcctgcttcttttacccagttactttccctgtttttgaaatgtggctatcacttctctacacattacctccatgatttggaatggaaaaggccacttttctttttgttctgcctctcaaattcaacacagaggagctcctaggattccagttatcctgctaacatctccaggaagaaagaagcaactcacatgggtcttttgctgtttgcttaattataaagacatcattttgcaagcagaaggctgagtttcatttgaaacaggtgcttaggtggtggtatttgtgaatacttttcattccaagcaagaagactaaagaagtagcaagtatgaatgacttcagggtttaaaaaaaatgtcttccagtttcagccactaccatgataagcacagttgagactgcagcagtaaattccaaatatgtgtttctaatttgacgtgaaagatactaaaaatttatatttgtatatttaaatcctggctcatcctgtgacatagatttactgaataggaacaaaggcccaattttaaacaaaaacctaggccgggtgtggtggctcacacctgtaatcccaacactttgggaggccaaggcaggcaaatcacctgaggttgggagtttgagaccagcctgaccaacatggagaaaccccatctctactaaaaatagaaaattagccaggtgtggtggtagatacgtgtaatctcagctactcgtgaggctgaggcaggagaattgcttgaatccgggaggcggaggttgcagtgaactgagattgcaccactgcactccagcctgggcgacagagtgagactccgtctcagaaaaataaaaaacaactttggacatagaggagttgggggcagaggggggaggatgagagaattttccatgtaactccttttccttaagaaaaagaagcaaaaatccctcatgcagtgccatctgactttatggtgtttcacattatatagttactttttttaataaacgcataagattaactcttcctgcaacccaaggtggatacttggatgtttgatttttatttatttatttatttattttttgnggcagtctctctctgttgcccaggctggagtgatgcgtgatttctgctcactgcagtctctcccacccgggttcaagcgattctcctgcctcagcctcccaagtagctaggattacaggcgcgcaccaccacgctcagcctgatttctaggctgaaaaggctgggactcaggtactttccccagttgggactgaactttctcatcagagaatgggcctcagaagcaatgttcccaaacttgtggttgggtcatcgtggaaaagaaacctcaaataagaaaaataattacaataagaaatggattttcttttttcccacaacagttatacattataaagaacagactgtcgtagaaaactgtctttgcttccaaatcagcagaggaccattgtatgtattgtcaggtctttatataagagtgaaacctttatttatgcttcttgtgagtagagaataaattttaaaactaattagatgaaattaagaacagagtattggaacatctctgtgttttccggaatgtttactcaggtccatgaatgctgtgatgctgggaacttagggaagattcaccaaaatttgagagtgataaaaatggcctaaaatgggaaatggtgagcactcttattattagtgagattggtcaatcagcccatttgaaatgggtaaaaaatactttcagtaaaataattacatattatatataaaatatttctttttttgagggcagctactgagtgataaaagcatagtagaaatcactttggttaaaagtaactcaaatttttctcttaagtaatctaccaacttcctgatgtttttctttaatattttggaactgttcaagacagaatggagcctacatatatggtgttccactagtatgttgaaaatgtcatatcatggagaatggagacaccttccaggtgtctgttaaacccatcttctctgtgtacttctggcatcttttttggtaggatcatttggcagggggtagagtacctgtacttttggcaccattgaaaccagctctggcccacttgtttgaatagctatcagactcagcgtctctatatgctttatatacagttgagagaaccagtgtttaatgctcttgaaattgtatcttccatgcttcagaccagatgcatttaacaaaatggatatattccagctgtagttgcccagtgtttacttaacacatctacatttttttcttgtctattttggtccccttgataggaaaagctataattttaggcaggactatacgtcgatttgtagccatgcttccttcctttcccttgctcatccatgttagctggcagtttttcttttgaaaagttaaaaccgggatatgtgcaatagaaatatatatatatatatgtatattttaatacttgtggacaaatgttacaagttgtttaagaacaacaaaatcaccaatgtcttccattttgagatgtgtatagttttgtaagcattagtgcttggtagcatattgtagtgccatgttaggggttagtgcatgagtctagtgattttaaacttcaggatgaattattgataataacaaatagtgtaaaaagagtggaaaatctaaaccttttctttttccataatgtctaaatctgttatattcttcctggggaaaagagattaaggcccaaaagactcatttatgaatagaaatgtggggtcaaaatctgagatactatatttgaggacatttcagctttccataaggtatctggaaaccagctgtctttgtgtcttatgaaacctcaagtcaaaatgagaccgcatttaattattctgctttgctctttttttggggtgggggggagatagagtttcactctgtcacccaggctggagtgcagtggcacaatctttgctcactgtaacctctgcctcttgggttcaagtgattctcgtgccccagcctcccgagtagctgggactacaggcacgtgccaccacgcccagctaatttttatatttttagtagagacggggtttgctgtgttggccaggctggtctcaaactcctgacctcaagtaatccacctggcctgctcttttcatgtcttaacatggcatgtcttttagtttcattattttcctactccttgtatgtcaagaaattacattttgcatgtcttatggagatgctgttaattgcttcagtgagtgcttttctaatctgcagaccatttacatttcctgtttgcagcatgctgtgtgcaaacactcagtaatttggagtattcaattatttgttagggctcttcctatttccaaatgtgctgaattgtctattgatgggattttcagatcttttcatgagaactggaaatgtagctgggtggcacctacctaggttgctacgtagtgagtagactttctcttgggtatagtaagcctcagacagctttcacttttatctactttacttgtggaaataaaacagtcattttgttctgaaagaataagatagctttctgtagagaaggaattcctacctctaaaagctgccttgagaactcagaactggcagttttctgaggtgatttttaaatttcagtattagggagagtccagcatttgctgacacagattctacataactaatgtatgatagcaaatgcaaaactattataatgtggtgtatcttgcgcatacacaggttagaacaagtagactctggcagcagatctccagagacccaagtttaggttctcatagtgtatttgaagtagttatactcctggcttaagtagtttagtgcctgggagaatccattactgaaaagcatttaacttaaaaaaaaaaaaaatgaaaaggtagtgaatacagaatagcacaatatataggaaaggatatttcctgttgaaaaaaaaagccataaaattaatagtaattttcaagaggtagaattttagtagcaataagtttgtgcatgtatagtaatttgcattagcaaggttgtacaatagaataagtgatactactggagtttgtggggctctgcaaccaagagttgcacaagggccaggtgcggtggcttacacctataatcccagcactttgggaggccaaggtgggcggatcacaaggtcaagagatcaggaccatcctggccaacatggtgaaatgccatctctactaaaaatacaaaacttagctgggcatggtggcacatgcctgtaatcccagctactcaggaggctgaggcagtagaatcacttaaacctgagaggcggaggttgcagtgagctgagatcacaccactgtactccagcctggtgacagtaagactccacctcaaacaaacaaaaaatgcacaaaaggaaaaaatgttctggataaagagcatatgaaaggtactttcttttagaacagtatgaatgtatatgaatttatctttatgtgagaaataatcttttttgtaagttaaaggttaaagaccctgcttgtttcctaaatcagagggttagagctgttgaaattaaacctttatagtgcttaacctggaaacaaatgtactacagccccactgaagccgctctatgggttttttgcttacgatgttttagcaacaggcatttattttgtagaatggtatactttctgctttgtctcctcatctttctccactggtttcctgggtacattttttttaaagggagagaagtttgtgagtttaatgttttaaaaaaactcccaagaacatggataagccggatttctctcatgcttatgattagggagttaggatttaaagatgcaaagcagaaggactgaaaggaatagccagtgaatatgtttcagtgggtgaggtgtgaaaccttgtctaatatagatgtgtcctatggcctgtgactgcttattctttatcaatgagaactcagcaaactagtttctttcttgatctgaggaaccacacagctcacatcagaatataatagtggaactagggtgacttcactccctttcacctgatgtctatcttggccttttagcaccttgactatccctgaaaagactgggtctttgttttcccagggaaaaaacgaagtgatgtagatctaagaaatagtgcctctttaatatttaattcttacatgacaactaacacacagggaaaaggctatgttaagttgattatagctcctcttaaaatgtcctatgctgtcagttggtcttagagacatgggaataaccaagcaatattcagacatctgcactatctggggacagcgctacatagtacaatgatgtcagcagttcagttacttggaacaattaaagattacccttaacagccatgttaatacatctaaatgctaaaatatactacgagtttttcatagtcttgaaagtatacagttaattacttttcaaagttactgtggtctcatgtttactcttcttgtatctgtgatatgcaaaaagatgaagactcttggcctccaggagtttacattctcatggtgctgttggttcaagcagattgctttagtttattaatgaacattgcttggctattaattatatcctatttggaaggatcccttggtgaacagttttaaaaagcagagggctgtgctaaatttcagggtattgatagcttgagtttacattgtattagccctgctcgttatcatttttttccccagggagctatgcaggtaatgctcattagcatgaatcagaaaagaaaccattctgcctaagagcatcttaaccatccccctaaaccacctatgctctcctgttatagttgtcagtaaatcacgaagaaaattaacagctccttaagactctacatccctcaattctctttcttttcccagagtttgtacatcattctctactcagatggaccaggatttgcatataagccttttaaaactgactagtggtcctaattttaacatttttgtgtatgactcctatcccttttctgaagcagcattgtgatagatgtggagcttctacctgcatttctaagcaattattaacccaacttttgagttgaaacttgcatggatccttgttatgtcccgtaattcctctgaatcaaggaatttattttgcatgcttattaaactcaaactgggtctgattgaaagtgcaagcaatagtgacaggaccttaactctggttttagagtacgaacattctaatgcatgactcaaaatgtccagtgttgtggttactagttattttatatatgcatttgttaataatgaagcaatagagactaagaccaatagcttgaatatattcagattattttcatgttttaataaaggatttttcttacttccattgaaaatgggaagtagaagataaacaggggcaaccacaagacattcaaactgtcaggactagggcgtagcagtgcccaccctctaaccacttgcctggttccattagtccccaagcatgtttgaaaacaaaagacacaaactaagcatgctgaataaaactagctgctatggctgtaataatcagaaaggtgcagagtttcagaaagagtaggaaagtagggaatgccagtatggagtatgtaaaataactagatatggatatggggtttgtttatgatatgctttatgtagacaaagtttgaggtcttttaaaactgggatttgagttgaaaagagtcaggatgcacatatttccactatttcaggattttcagatgactaggcacatgttgtggatgatactggtaccaactaccaatgaccaactataaagtacccctgcaataagggagacttcctttttgtagaatagtcctgaaaatactgacagatctgtggttagtttgttattttattgcataaaaaacagtttaaacaaattttatagccaaagttttatccttgatgggtttggccagactgcaatttcttgactaaagcttttaatgccaggttaaacaggagaaactttttccactagaagaaaatccttgctatctattttttccaatagaagaaaatccttgctatttattttatttgatgaataaacaaatttattgcagtagcttaaaaaaattttttttttaaacagtctcactctgtcgcccaggctggagtgaagcaatgtgatctcagctcactgcaacctccacctcccgagtagctgggattacagacatgcaccaccaccctcagctaatttttgtatttttagtagagacggggtttcgccatgttggccaggctggtctttaactcctggccttacgtgatccgcccccccttagccttccaaagtgctgggattacaggtgtgagccactgcacctggcctgtagtagcttaaaattttccttgagaaaattcctgactttaaaaataacccttatataagtacaagtgattgtgacaaatgacgtaaaaatggcattcatgatgtctgaaacaagcctaaatagaattcaagattagactaaatgattttcacaaagcacattcaaggttttacattctatgattgaaaaaaattttttgatgaataaagtggaatggtaactttccagtggttcagaattgaattagacttcttgtgactgtgatgtttggtttccattgaaatatatgaagtgagatgtcatatcctgaatatagtttgtcttccccaattacttgatagcatgtctgtcagccagtaaagattaagaacagagtttctctaaattcctccgattattccactaaggcacattaaaatacttaattttgggaaaccagacatcacagatttctccatgaagtcctaaatcttctttaaagtcagaataggtatcttagttactgacagtattcaggtttttttctcccttggtgatatgtcattccatcagtgaaaaaatattttctcccagggataagaaaggtattctggtaatacattatcatcaatccttaaacagtaacagtcttggcacttatcacaaaaccgacccatttcttataaccagaaagattatcttagactgtccttcacattatactttacctactgccttgtaagaataagagttgctcactgtgtttacttgctgtcctccatattctccattgcaccattggtgtataacgttaagagtttcattgaatattattttaagtattacaaaaggcagcttgcttcttaatctatgcatctttggggtttttgaagaaatttaattctttgatgtaaaaaggaactgttaaaaaagttggaagctctgcacctgtgtatatatatattttagcaataaagcagcatgggctgagaatgca

SEQ ID NO: 459446 - DNA, 8854 bp, Homo sapiens
  misc_feature (1487)..(1487): n is a, c, g, or t
atcgatgccacgactggattcgggttcagctctgcaccaagtccagtcgtggccacgacctcaagatctcggctgaccagcgtgcagggctgtttttctgagaacatcctttccccctaatgaccgaggccagcaaatcatcctcatgggatgctccagaattggtagctcccttaggaaaacaccggtgtttatcgatgccactcccctaccttatagaggggagtggtcatctacactaaagcaaagtgttaggcgcgtccgtgcgaagagaccaccaaacaggctttgtgttccttatcacaggaagaaaattttccttgacctttaggtgcttttatattcatctcaaaaacaaaattctgaactcaggacttggcaagtgtctctatgttgtctcctagagtgggtagtcctgcttcttttacccagttactttccctgtttttgaaatgtggctatcacttctctacacattacctccatgatttggaatggaaaaggccacttttctttttgttctgcctctcaaattcaacacagaggagctcctaggattccagttatcctgctaacatctccaggaagaaagaagcaactcacatgggtcttttgctgtttgcttaattataaagacatcattttgcaagcagaaggctgagtttcatttgaaacaggtgcttaggtggtggtatttgtgaatacttttcattccaagcaagaagactaaagaagtagcaagtatgaatgacttcagggtttaaaaaaaatgtcttccagtttcagccactaccatgataagcacagttgagactgcagcagtaaattccaaatatgtgtttctaatttgacgtgaaagatactaaaaatttatatttgtatatttaaatcctggctcatcctgtgacatagatttactgaataggaacaaaggcccaattttaaacaaaaacctaggccgggtgtggtggctcacacctgtaatcccaacactttgggaggccaaggcaggcaaatcacctgaggttgggagtttgagaccagcctgaccaacatggagaaaccccatctctactaaaaatagaaaattagccaggtgtggtggtagatacgtgtaatctcagctactcgtgaggctgaggcaggagaattgcttgaatccgggaggcggaggttgcagtgaactgagattgcaccactgcactccagcctgggcgacagagtgagactccgtctcagaaaaataaaaaacaactttggacatagaggagttgggggcagaggggggaggatgagagaattttccatgtaactccttttccttaagaaaaagaagcaaaaatccctcatgcagtgccatctgactttatggtgtttcacattatatagttactttttttaataaacgcataagattaactcttcctgcaacccaaggtggatacttggatgtttgatttttatttatttatttatttattttttgnggcagtctctctctgttgcccaggctggagtgatgcgtgatttctgctcactgcagtctctcccacccgggttcaagcgattctcctgcctcagcctcccaagtagctaggattacaggcgcgcaccaccacgctcagcctgatttctaggctgaaaaggctgggactcaggtactttccccagttgggactgaactttctcatcagagaatgggcctcagaagcaatgttcccaaacttgtggttgggtcatcgtggaaaagaaacctcaaataagaaaaataattacaataagaaatggattttcttttttcccacaacagttatacattataaagaacagactgtcgtagaaaactgtctttgcttccaaatcagcagaggaccattgtatgtattgtcaggtctttatataagagtgaaacctttatttatgcttcttgtgagtagagaataaattttaaaactaattagatgaaattaagaacagagtattggaacatctctgtgttttccggaatgtttactcaggtccatgaatgctgtgatgctgggaacttagggaagattcaccaaaatttgagagtgataaaaatggcctaaaatgggaaatggtgagcactcttattattagtgagattggtcaatcagcccatttgaaatgggtaaaaaatactttcagtaaaataattacatattatatataaaatatttctttttttgagggcagctactgagtgataaaagcatagtagaaatcactttggttaaaagtaactcaaatttttctcttaagtaatctaccaacttcctgatgtttttctttaatattttggaactgttcaagacagaatggagcctacatatatggtgttccactagtatgttgaaaatgtcatatcatggagaatggagacaccttccaggtgtctgttaaacccatcttctctgtgtacttctggcatcttttttggtaggatcatttggcagggggtagagtacctgtacttttggcaccattgaaaccagctctggcccacttgtttgaatagctatcagactcagcgtctctatatgctttatatacagttgagagaaccagtgtttaatgctcttgaaattgtatcttccatgcttcagaccagatgcatttaacaaaatggatatattccagctgtagttgcccagtgtttacttaacacatctacatttttttcttgtctattttggtccccttgataggaaaagctataattttaggcaggactatacgtcgatttgtagccatgcttccttcctttcccttgctcatccatgttagctggcagtttttcttttgaaaagttaaaaccgggatatgtgcaatagaaatatatatatatatatgtatattttaatacttgtggacaaatgttacaagttgtttaagaacaacaaaatcaccaatgtcttccattttgagatgtgtatagttttgtaagcattagtgcttggtagcatattgtagtgccatgttaggggttagtgcatgagtctagtgattttaaacttcaggatgaattattgataataacaaatagtgtaaaaagagtggaaaatctaaaccttttctttttccataatgtctaaatctgttatattcttcctggggaaaagagattaaggcccaaaagactcatttatgaatagaaatgtggggtcaaaatctgagatactatatttgaggacatttcagctttccataaggtatctggaaaccagctgtctttgtgtcttatgaaacctcaagtcaaaatgagaccgcatttaattattctgctttgctctttttttggggtgggggggagatagagtttcactctgtcacccaggctggagtgcagtggcacaatctttgctcactgtaacctctgcctcttgggttcaagtgattctcgtgccccagcctcccgagtagctgggactacaggcacgtgccaccacgcccagctaatttttatatttttagtagagacggggtttgctgtgttggccaggctggtctcaaactcctgacctcaagtaatccacctggcctgctcttttcatgtcttaacatggcatgtcttttagtttcattattttcctactccttgtatgtcaagaaattacattttgcatgtcttatggagatgctgttaattgcttcagtgagtgcttttctaatctgcagaccatttacatttcctgtttgcagcatgctgtgtgcaaacactcagtaatttggagtattcaattatttgttagggctcttcctatttccaaatgtgctgaattgtctattgatgggattttcagatcttttcatgagaactggaaatgtagctgggtggcacctacctaggttgctacgtagtgagtagactttctcttgggtatagtaagcctcagacagctttcacttttatctactttacttgtggaaataaaacagtcattttgttctgaaagaataagatagctttctgtagagaaggaattcctacctctaaaagctgccttgagaactcagaactggcagttttctgaggtgatttttaaatttcagtattagggagagtccagcatttgctgacacagattctacataactaatgtatgatagcaaatgcaaaactattataatgtggtgtatcttgcgcatacacaggttagaacaagtagactctggcagcagatctccagagacccaagtttaggttctcatagtgtatttgaagtagttatactcctggcttaagtagtttagtgcctgggagaatccattactgaaaagcatttaacttaaaaaaaaaaaaaatgaaaaggtagtgaatacagaatagcacaatatataggaaaggatatttcctgttgaaaaaaaaagccataaaattaatagtaattttcaagaggtagaattttagtagcaataagtttgtgcatgtatagtaatttgcattagcaaggttgtacaatagaataagtgatactactggagtttgtggggctctgcaaccaagagttgcacaagggccaggtgcggtggcttacacctataatcccagcactttgggaggccaaggtgggcggatcacaaggtcaagagatcaggaccatcctggccaacatggtgaaatgccatctctactaaaaatacaaaacttagctgggcatggtggcacatgcctgtaatcccagctactcaggaggctgaggcagtagaatcacttaaacctgagaggcggaggttgcagtgagctgagatcacaccactgtactccagcctggtgacagtaagactccacctcaaacaaacaaaaaatgcacaaaaggaaaaaatgttctggataaagagcatatgaaaggtactttcttttagaacagtatgaatgtatatgaatttatctttatgtgagaaataatcttttttgtaagttaaaggttaaagaccctgcttgtttcctaaatcagagggttagagctgttgaaattaaacctttatagtgcttaacctggaaacaaatgtactacagccccactgaagccgctctatgggttttttgcttacgatgttttagcaacaggcatttattttgtagaatggtatactttctgctttgtctcctcatctttctccactggtttcctgggtacattttttttaaagggagagaagtttgtgagtttaatgttttaaaaaaactcccaagaacatggataagccggatttctctcatgcttatgattagggagttaggatttaaagatgcaaagcagaaggactgaaaggaatagccagtgaatatgtttcagtgggtgaggtgtgaaaccttgtctaatatagatgtgtcctatggcctgtgactgcttattctttatcaatgagaactcagcaaactagtttctttcttgatctgaggaaccacacagctcacatcagaatataatagtggaactagggtgacttcactccctttcacctgatgtctatcttggccttttagcaccttgactatccctgaaaagactgggtctttgttttcccagggaaaaaacgaagtgatgtagatctaagaaatagtgcctctttaatatttaattcttacatgacaactaacacacagggaaaaggctatgttaagttgattatagctcctcttaaaatgtcctatgctgtcagttggtcttagagacatgggaataaccaagcaatattcagacatctgcactatctggggacagcgctacatagtacaatgatgtcagcagttcagttacttggaacaattaaagattacccttaacagccatgttaatacatctaaatgctaaaatatactacgagtttttcatagtcttgaaagtatacagttaattacttttcaaagttactgtggtctcatgtttactcttcttgtatctgtgatatgcaaaaagatgaagactcttggcctccaggagtttacattctcatggtgctgttggttcaagcagattgctttagtttattaatgaacattgcttggctattaattatatcctatttggaaggatcccttggtgaacagttttaaaaagcagagggctgtgctaaatttcagggtattgatagcttgagtttacattgtattagccctgctcgttatcatttttttccccagggagctatgcaggtaatgctcattagcatgaatcagaaaagaaaccattctgcctaagagcatcttaaccatccccctaaaccacctatgctctcctgttatagttgtcagtaaatcacgaagaaaattaacagctccttaagactctacatccctcaattctctttcttttcccagagtttgtacatcattctctactcagatggaccaggatttgcatataagccttttaaaactgactagtggtcctaattttaacatttttgtgtatgactcctatcccttttctgaagcagcattgtgatagatgtggagcttctacctgcatttctaagcaattattaacccaacttttgagttgaaacttgcatggatccttgttatgtcccgtaattcctctgaatcaaggaatttattttgcatgcttattaaactcaaactgggtctgattgaaagtgcaagcaatagtgacaggaccttaactctggttttagagtacgaacattctaatgcatgactcaaaatgtccagtgttgtggttactagttattttatatatgcatttgttaataatgaagcaatagagactaagaccaatagcttgaatatattcagattattttcatgttttaataaaggatttttcttacttccattgaaaatgggaagtagaagataaacaggggcaaccacaagacattcaaactgtcaggactagggcgtagcagtgcccaccctctaaccacttgcctggttccattagtccccaagcatgtttgaaaacaaaagacacaaactaagcatgctgaataaaactagctgctatggctgtaataatcagaaaggtgcagagtttcagaaagagtaggaaagtagggaatgccagtatggagtatgtaaaataactagatatggatatggggtttgtttatgatatgctttatgtagacaaagtttgaggtcttttaaaactgggatttgagttgaaaagagtcaggatgcacatatttccactatttcaggattttcagatgactaggcacatgttgtggatgatactggtaccaactaccaatgaccaactataaagtacccctgcaataagggagacttcctttttgtagaatagtcctgaaaatactgacagatctgtggttagtttgttattttattgcataaaaaacagtttaaacaaattttatagccaaagttttatccttgatgggtttggccagactgcaatttcttgactaaagcttttaatgccaggttaaacaggagaaactttttccactagaagaaaatccttgctatctattttttccaatagaagaaaatccttgctatttattttatttgatgaataaacaaatttattgcagtagcttaaaaaaattttttttttaaacagtctcactctgtcgcccaggctggagtgaagcaatgtgatctcagctcactgcaacctccacctcccgagtagctgggattacagacatgcaccaccaccctcagctaatttttgtatttttagtagagacggggtttcgccatgttggccaggctggtctttaactcctggccttacgtgatccgcccccccttagccttccaaagtgctgggattacaggtgtgagccactgcacctggcctgtagtagcttaaaattttccttgagaaaattcctgactttaaaaataacccttatataagtacaagtgattgtgacaaatgacgtaaaaatggcattcatgatgtctgaaacaagcctaaatagaattcaagattagactaaatgattttcacaaagcacattcaaggttttacattctatgattgaaaaaaattttttgaaaactttttatttcattctttcctgtaggattttgctacaaataactttgggaatgaataaagtggaatggtaactttccagtggttcagaattgaattagacttcttgtgactgtgatgtttggtttccattgaaatatatgaagtgagatgtcatatcctgaatatagtttgtcttccccaattacttgatagcatgtctgtcagccagtaaagattaagaacagagtttctctaaattcctccgattattccactaaggcacattaaaatacttaattttgggaaaccagacatcacagatttctccatgaagtcctaaatcttctttaaagtcagaataggtatcttagttactgacagtattcaggtttttttctcccttggtgatatgtcattccatcagtgaaaaaatattttctcccagggataagaaaggtattctggtaatacattatcatcaatccttaaacagtaacagtcttggcacttatcacaaaaccgacccatttcttataaccagaaagattatcttagactgtccttcacattatactttacctactgccttgtaagaataagagttgctcactgtgtttacttgctgtcctccatattctccattgcaccattggtgtataacgttaagagtttcattgaatattattttaagtattacaaaaggcagcttgcttcttaatctatgcatctttggggtttttgaagaaatttaattctttgatgtaaaaaggaactgttaaaaaagttggaagctctgcacctgtgtatatatatattttagcaataaagcagcatgggctgagaatgca

SEQ ID NO: 459447 - DNA, 6196 bp, Homo sapiens
tgggaacggcccaccgcagggttggccaccttgagaagctgcgaagatggcggagtaaggcgtgccgctgcaaactggcctctgggccgggggcgagcagcccccgggaggccgagtgcatctgttggaccgtgcgaggagaagaaaaaaaatatcggccagaggagaggaactaaccgaacattcttcctccctaccttatagaggggagtggtcatctacactaaagcaaagtgttaggcgcgtccgtgcgaagagaccaccaaacaggctttgtgttccttatcacaggaagaaaattttccttgacctttaggtgcttttatattcatctcaaaaacaaaattctgaactcaggacttggcaagtgtctctatgttgtctcctagagtgggtagtcctgcttcttttacccagttactttccctgtttttgaaatgtggctatcacttctctacacattacctccatgatttggaatggaaaaggccacttttctttttgttctgcctctcaaattcaacacagaggagctcctaggattccagttatcctgctaacatctccaggaagaaagaagcaactcacatgggtcttttgctgtttgcttaattataaagacatcattttgcaagcagaaggctgagtttcatttgaaacaggtgcttaggtggtggtatttgtgaatacttttcattccaagcaagaagactaaagaagtagcaagtatgaatgacttcagggtttaaaaaaaatgtcttccagtttcagccactaccatgataagcacagttgagactgcagcagtaaattccaaatatgtgtttctaatttgacgtgaaagatactaaaaatttatatttgtatatttaaatcactcctgacctcaagtaatccacctggcctgctcttttcatgtcttaacatggcatgtcttttagtttcattattttcctactccttgtatgtcaagaaattacattttgcatgtcttatggagatgctgttaattgcttcagtgagtgcttttctaatctgcagaccatttacatttcctgtttgcagcatgctgtgtgcaaacactcagtaatttggagtattcaattatttgttagggctcttcctatttccaaatgtgctgaattgtctattgatgggattttcagatcttttcatgagaactggaaatgtagctgggtggcacctacctaggttgctacgtagtgagtagactttctcttgggtatagtaagcctcagacagctttcacttttatctactttacttgtggaaataaaacagtcattttgttctgaaagaataagatagctttctgtagagaaggaattcctacctctaaaagctgccttgagaactcagaactggcagttttctgaggtgatttttaaatttcagtattagggagagtccagcatttgctgacacagattctacataactaatgtatgatagcaaatgcaaaactattataatgtggtgtatcttgcgcatacacaggttagaacaagtagactctggcagcagatctccagagacccaagtttaggttctcatagtgtatttgaagtagttatactcctggcttaagtagtttagtgcctgggagaatccattactgaaaagcatttaacttaaaaaaaaaaaaaatgaaaaggtagtgaatacagaatagcacaatatataggaaaggatatttcctgttgaaaaaaaaagccataaaattaatagtaattttcaagaggtagaattttagtagcaataagtttgtgcatgtatagtaatttgcattagcaaggttgtacaatagaataagtgatactactggagtttgtggggctctgcaaccaagagttgcacaagggccaggtgcggtggcttacacctataatcccagcactttgggaggccaaggtgggcggatcacaaggtcaagagatcaggaccatcctggccaacatggtgaaatgccatctctactaaaaatacaaaacttagctgggcatggtggcacatgcctgtaatcccagctactcaggaggctgaggcagtagaatcacttaaacctgagaggcggaggttgcagtgagctgagatcacaccactgtactccagcctggtgacagtaagactccacctcaaacaaacaaaaaatgcacaaaaggaaaaaatgttctggataaagagcatatgaaaggtactttcttttagaacagtatgaatgtatatgaatttatctttatgtgagaaataatcttttttgtaagttaaaggttaaagaccctgcttgtttcctaaatcagagggttagagctgttgaaattaaacctttatagtgcttaacctggaaacaaatgtactacagccccactgaagccgctctatgggttttttgcttacgatgttttagcaacaggcatttattttgtagaatggtatactttctgctttgtctcctcatctttctccactggtttcctgggtacattttttttaaagggagagaagtttgtgagtttaatgttttaaaaaaactcccaagaacatggataagccggatttctctcatgcttatgattagggagttaggatttaaagatgcaaagcagaaggactgaaaggaatagccagtgaatatgtttcagtgggtgaggtgtgaaaccttgtctaatatagatgtgtcctatggcctgtgactgcttattctttatcaatgagaactcagcaaactagtttctttcttgatctgaggaaccacacagctcacatcagaatataatagtggaactagggtgacttcactccctttcacctgatgtctatcttggccttttagcaccttgactatccctgaaaagactgggtctttgttttcccagggaaaaaacgaagtgatgtagatctaagaaatagtgcctctttaatatttaattcttacatgacaactaacacacagggaaaaggctatgttaagttgattatagctcctcttaaaatgtcctatgctgtcagttggtcttagagacatgggaataaccaagcaatattcagacatctgcactatctggggacagcgctacatagtacaatgatgtcagcagttcagttacttggaacaattaaagattacccttaacagccatgttaatacatctaaatgctaaaatatactacgagtttttcatagtcttgaaagtatacagttaattacttttcaaagttactgtggtctcatgtttactcttcttgtatctgtgatatgcaaaaagatgaagactcttggcctccaggagtttacattctcatggtgctgttggttcaagcagattgctttagtttattaatgaacattgcttggctattaattatatcctatttggaaggatcccttggtgaacagttttaaaaagcagagggctgtgctaaatttcagggtattgatagcttgagtttacattgtattagccctgctcgttatcatttttttccccagggagctatgcaggtaatgctcattagcatgaatcagaaaagaaaccattctgcctaagagcatcttaaccatccccctaaaccacctatgctctcctgttatagttgtcagtaaatcacgaagaaaattaacagctccttaagactctacatccctcaattctctttcttttcccagagtttgtacatcattctctactcagatggaccaggatttgcatataagccttttaaaactgactagtggtcctaattttaacatttttgtgtatgactcctatcccttttctgaagcagcattgtgatagatgtggagcttctacctgcatttctaagcaattattaacccaacttttgagttgaaacttgcatggatccttgttatgtcccgtaattcctctgaatcaaggaatttattttgcatgcttattaaactcaaactgggtctgattgaaagtgcaagcaatagtgacaggaccttaactctggttttagagtacgaacattctaatgcatgactcaaaatgtccagtgttgtggttactagttattttatatatgcatttgttaataatgaagcaatagagactaagaccaatagcttgaatatattcagattattttcatgttttaataaaggatttttcttacttccattgaaaatgggaagtagaagataaacaggggcaaccacaagacattcaaactgtcaggactagggcgtagcagtgcccaccctctaaccacttgcctggttccattagtccccaagcatgtttgaaaacaaaagacacaaactaagcatgctgaataaaactagctgctatggctgtaataatcagaaaggtgcagagtttcagaaagagtaggaaagtagggaatgccagtatggagtatgtaaaataactagatatggatatggggtttgtttatgatatgctttatgtagacaaagtttgaggtcttttaaaactgggatttgagttgaaaagagtcaggatgcacatatttccactatttcaggattttcagatgactaggcacatgttgtggatgatactggtaccaactaccaatgaccaactataaagtacccctgcaataagggagacttcctttttgtagaatagtcctgaaaatactgacagatctgtggttagtttgttattttattgcataaaaaacagtttaaacaaattttatagccaaagttttatccttgatgggtttggccagactgcaatttcttgactaaagcttttaatgccaggttaaacaggagaaactttttccactagaagaaaatccttgctatctattttttccaatagaagaaaatccttgctatttattttatttgatgaataaacaaatttattgcagtagcttaaaaaaattttttttttaaacagtctcactctgtcgcccaggctggagtgaagcaatgtgatctcagctcactgcaacctccacctcccgagtagctgggattacagacatgcaccaccaccctcagctaatttttgtatttttagtagagacggggtttcgccatgttggccaggctggtctttaactcctggccttacgtgatccgcccccccttagccttccaaagtgctgggattacaggtgtgagccactgcacctggcctgtagtagcttaaaattttccttgagaaaattcctgactttaaaaataacccttatataagtacaagtgattgtgacaaatgacgtaaaaatggcattcatgatgtctgaaacaagcctaaatagaattcaagattagactaaatgattttcacaaagcacattcaaggttttacattctatgattgaaaaaaattttttgaaaactttttatttcattctttcctgtaggattttgctacaaataactttgggaatgaataaagtggaatggtaactttccagtggttcagaattgaattagacttcttgtgactgtgatgtttggtttccattgaaatatatgaagtgagatgtcatatcctgaatatagtttgtcttccccaattacttgatagcatgtctgtcagccagtaaagattaagaacagagtttctctaaattcctccgattattccactaaggcacattaaaatacttaattttgggaaaccagacatcacagatttctccatgaagtcctaaatcttctttaaagtcagaataggtatcttagttactgacagtattcaggtttttttctcccttggtgatatgtcattccatcagtgaaaaaatattttctcccagggataagaaaggtattctggtaatacattatcatcaatccttaaacagtaacagtcttggcacttatcacaaaaccgacccatttcttataaccagaaagattatcttagactgtccttcacattatactttacctactgccttgtaagaataagagttgctcactgtgtttacttgctgtcctccatattctccattgcaccattggtgtataacgttaagagtttcattgaatattattttaagtattacaaaaggcagcttgcttcttaatctatgcatctttggggtttttgaagaaatttaattctttgatgtaaaaaggaactgttaaaaaagttggaagctctgcacctgtgtatatatatattttagcaataaagcagcatgggctgagaatgca

SEQ ID NO: 459448 - DNA, 5867 bp, Homo sapiens
  misc_feature (1472)..(1472): n is a, c, g, or t
tgggaacggcccaccgcagggttggccaccttgagaagctgcgaagatggcggagtaaggcgtgccgctgcaaactggcctctgggccgggggcgagcagcccccgggaggccgagtgcatctgttggaccgtgcgaggagaagaaaaaaaatatcggccagaggagaggaactaaccgaacattcttcctccctaccttatagaggggagtggtcatctacactaaagcaaagtgttaggcgcgtccgtgcgaagagaccaccaaacaggctttgtgttccttatcacaggaagaaaattttccttgacctttaggtgcttttatattcatctcaaaaacaaaattctgaactcaggacttggcaagtgtctctatgttgtctcctagagtgggtagtcctgcttcttttacccagttactttccctgtttttgaaatgtggctatcacttctctacacattacctccatgatttggaatggaaaaggccacttttctttttgttctgcctctcaaattcaacacagaggagctcctaggattccagttatcctgctaacatctccaggaagaaagaagcaactcacatgggtcttttgctgtttgcttaattataaagacatcattttgcaagcagaaggctgagtttcatttgaaacaggtgcttaggtggtggtatttgtgaatacttttcattccaagcaagaagactaaagaagtagcaagtatgaatgacttcagggtttaaaaaaaatgtcttccagtttcagccactaccatgataagcacagttgagactgcagcagtaaattccaaatatgtgtttctaatttgacgtgaaagatactaaaaatttatatttgtatatttaaatcctggctcatcctgtgacatagatttactgaataggaacaaaggcccaattttaaacaaaaacctaggccgggtgtggtggctcacacctgtaatcccaacactttgggaggccaaggcaggcaaatcacctgaggttgggagtttgagaccagcctgaccaacatggagaaaccccatctctactaaaaatagaaaattagccaggtgtggtggtagatacgtgtaatctcagctactcgtgaggctgaggcaggagaattgcttgaatccgggaggcggaggttgcagtgaactgagattgcaccactgcactccagcctgggcgacagagtgagactccgtctcagaaaaataaaaaacaactttggacatagaggagttgggggcagaggggggaggatgagagaattttccatgtaactccttttccttaagaaaaagaagcaaaaatccctcatgcagtgccatctgactttatggtgtttcacattatatagttactttttttaataaacgcataagattaactcttcctgcaacccaaggtggatacttggatgtttgatttttatttatttatttatttattttttgnggcagtctctctctgttgcccaggctggagtgatgcgtgatttctgctcactgcagtctctcccacccgggttcaagcgattctcctgcctcagcctcccaagtagctaggattacaggcgcgcaccaccacgctcagcctgatttctaggctgaaaaggctgggactcaggtactttccccagttgggactgaactttctcatcagagaatgggcctcagaagcaatgttcccaaacttgtggttgggtcatcgtggaaaagaaacctcaaataagaaaaataattacaataagaaatggattttcttttttcccacaacagttatacattataaagaacagactgtcgtagaaaactgtctttgcttccaaatcagcagaggaccattgtatgtattgtcaggtctttatataagagtgaaacctttatttatgcttcttgtgagtagagaataaattttaaaactaattagatgaaattaagaacagagtattggaacatctctgtgttttccggaatgtttactcaggtccatgaatgctgtgatgctgggaacttagggaagattcaccaaaatttgagagtgataaaaatggcctaaaatgggaaatggtgagcactcttattattagtgagattggtcaatcagcccatttgaaatgggtaaaaaatactttcagtaaaataattacatattatatataaaatatttctttttttgagggcagctactgagtgataaaagcatagtagaaatcactttggttaaaagtaactcaaatttttctcttaagtaatctaccaacttcctgatgtttttctttaatattttggaactgttcaagacagaatggagcctacatatatggtgttccactagtatgttgaaaatgtcatatcatggagaatggagacaccttccaggtgtctgttaaacccatcttctctgtgtacttctggcatcttttttggtaggatcatttggcagggggtagagtacctgtacttttggcaccattgaaaccagctctggcccacttgtttgaatagctatcagactcagcgtctctatatgctttatatacagttgagagaaccagtgtttaatgctcttgaaattgtatcttccatgcttcagaccagatgcatttaacaaaatggatatattccagctgtagttgcccagtgtttacttaacacatctacatttttttcttgtctattttggtccccttgataggaaaagctataattttaggcaggactatacgtcgatttgtagccatgcttccttcctttcccttgctcatccatgttagctggcagtttttcttttgaaaagttaaaaccgggatatgtgcaatagaaatatatatatatatatgtatattttaatacttgtggacaaatgttacaagttgtttaagaacaacaaaatcaccaatgtcttccattttgagatgtgtatagttttgtaagcattagtgcttggtagcatattgtagtgccatgttaggggttagtgcatgagtctagtgattttaaacttcaggatgaattattgataataacaaatagtgtaaaaagagtggaaaatctaaaccttttctttttccataatgtctaaatctgttatattcttcctggggaaaagagattaaggcccaaaagactcatttatgaatagaaatgtggggtcaaaatctgagatactatatttgaggacatttcagctttccataaggtatctggaaaccagctgtctttgtgtcttatgaaacctcaagtcaaaatgagaccgcatttaattattctgctttgctctttttttggggtgggggggagatagagtttcactctgtcacccaggctggagtgcagtggcacaatctttgctcactgtaacctctgcctcttgggttcaagtgattctcgtgccccagcctcccgagtagctgggactacaggcacgtgccaccacgcccagctaatttttatatttttagtagagacggggtttgctgtgttggccaggctggtctcaaactcctgacctcaagtaatccacctggcctgctcttttcatgtcttaacatggcatgtcttttagtttcattattttcctactccttgtatgtcaagaaattacattttgcatgtcttatggagatgctgttaattgcttcagtgagtgcttttctaatctgcagaccatttacatttcctgtttgcagcatgctgtgtgcaaacactcagtaatttggagtattcaattatttgttagggctcttcctatttccaaatgtgctgaattgtctattgatgggattttcagatcttttcatgagaactggaaatgtagctgggtggcacctacctaggttgctacgtagtgagtagactttctcttgggtatagtaagcctcagacagctttcacttttatctactttacttgtggaaataaaacagtcattttgttctgaaagaataagatagctttctgtagagaaggaattcctacctctaaaagctgccttgagaactcagaactggcagttttctgaggtgatttttaaatttcagtattagggagagtccagcatttgctgacacagattctacataactaatgtatgatagcaaatgcaaaactattataatgtggtgtatcttgcgcatacacaggttagaacaagtagactctggcagcagatctccagagacccaagtttaggttctcatagtgtatttgaagtagttatactcctggcttaagtagtttagtgcctgggagaatccattactgaaaagcatttaacttaaaaaaaaaaaaaatgaaaaggtagtgaatacagaatagcacaatatataggaaaggatatttcctgttgaaaaaaaaagccataaaattaatagtaattttcaagaggtagaattttagtagcaataagtttgtgcatgtatagtaatttgcattagcaaggttgtacaatagaataagtgatactactggagtttgtggggctctgcaaccaagagttgcacaagggccaggtgcggtggcttacacctataatcccagcactttgggaggccaaggtgggcggatcacaaggtcaagagatcaggaccatcctggccaacatggtgaaatgccatctctactaaaaatacaaaacttaggagtagctgggattacagacatgcaccaccaccctcagctaatttttgtatttttagtagagacggggtttcgccatgttggccaggctggtctttaactcctggccttacgtgatccgcccccccttagccttccaaagtgctgggattacaggtgtgagccactgcacctggcctgtagtagcttaaaattttccttgagaaaattcctgactttaaaaataacccttatataagtacaagtgattgtgacaaatgacgtaaaaatggcattcatgatgtctgaaacaagcctaaatagaattcaagattagactaaatgattttcacaaagcacattcaaggttttacattctatgattgaaaaaaattttttgaaaactttttatttcattctttcctgtaggattttgctacaaataactttgggaatgaataaagtggaatggtaactttccagtggttcagaattgaattagacttcttgtgactgtgatgtttggtttccattgaaatatatgaagtgagatgtcatatcctgaatatagtttgtcttccccaattacttgatagcatgtctgtcagccagtaaagattaagaacagagtttctctaaattcctccgattattccactaaggcacattaaaatacttaattttgggaaaccagacatcacagatttctccatgaagtcctaaatcttctttaaagtcagaataggtatcttagttactgacagtattcaggtttttttctcccttggtgatatgtcattccatcagtgaaaaaatattttctcccagggataagaaaggtattctggtaatacattatcatcaatccttaaacagtaacagtcttggcacttatcacaaaaccgacccatttcttataaccagaaagattatcttagactgtccttcacattatactttacctactgccttgtaagaataagagttgctcactgtgtttacttgctgtcctccatattctccattgcaccattggtgtataacgttaagagtttcattgaatattattttaagtattacaaaaggcagcttgcttcttaatctatgcatctttggggtttttgaagaaatttaattctttgatgtaaaaaggaactgttaaaaaagttggaagctctgcacctgtgtatatatatattttagcaataaagcagcatgggctgagaatgca

SEQ ID NO: 459449 - DNA, 5726 bp, Homo sapiens
  misc_feature (1472)..(1472): n is a, c, g, or t
tgggaacggcccaccgcagggttggccaccttgagaagctgcgaagatggcggagtaaggcgtgccgctgcaaactggcctctgggccgggggcgagcagcccccgggaggccgagtgcatctgttggaccgtgcgaggagaagaaaaaaaatatcggccagaggagaggaactaaccgaacattcttcctccctaccttatagaggggagtggtcatctacactaaagcaaagtgttaggcgcgtccgtgcgaagagaccaccaaacaggctttgtgttccttatcacaggaagaaaattttccttgacctttaggtgcttttatattcatctcaaaaacaaaattctgaactcaggacttggcaagtgtctctatgttgtctcctagagtgggtagtcctgcttcttttacccagttactttccctgtttttgaaatgtggctatcacttctctacacattacctccatgatttggaatggaaaaggccacttttctttttgttctgcctctcaaattcaacacagaggagctcctaggattccagttatcctgctaacatctccaggaagaaagaagcaactcacatgggtcttttgctgtttgcttaattataaagacatcattttgcaagcagaaggctgagtttcatttgaaacaggtgcttaggtggtggtatttgtgaatacttttcattccaagcaagaagactaaagaagtagcaagtatgaatgacttcagggtttaaaaaaaatgtcttccagtttcagccactaccatgataagcacagttgagactgcagcagtaaattccaaatatgtgtttctaatttgacgtgaaagatactaaaaatttatatttgtatatttaaatcctggctcatcctgtgacatagatttactgaataggaacaaaggcccaattttaaacaaaaacctaggccgggtgtggtggctcacacctgtaatcccaacactttgggaggccaaggcaggcaaatcacctgaggttgggagtttgagaccagcctgaccaacatggagaaaccccatctctactaaaaatagaaaattagccaggtgtggtggtagatacgtgtaatctcagctactcgtgaggctgaggcaggagaattgcttgaatccgggaggcggaggttgcagtgaactgagattgcaccactgcactccagcctgggcgacagagtgagactccgtctcagaaaaataaaaaacaactttggacatagaggagttgggggcagaggggggaggatgagagaattttccatgtaactccttttccttaagaaaaagaagcaaaaatccctcatgcagtgccatctgactttatggtgtttcacattatatagttactttttttaataaacgcataagattaactcttcctgcaacccaaggtggatacttggatgtttgatttttatttatttatttatttattttttgnggcagtctctctctgttgcccaggctggagtgatgcgtgatttctgctcactgcagtctctcccacccgggttcaagcgattctcctgcctcagcctcccaagtagctaggattacaggcgcgcaccaccacgctcagcctgatttctaggctgaaaaggctgggactcaggtactttccccagttgggactgaactttctcatcagagaatgggcctcagaagcaatgttcccaaacttgtggttgggtcatcgtggaaaagaaacctcaaataagaaaaataattacaataagaaatggattttcttttttcccacaacagttatacattataaagaacagactgtcgtagaaaactgtctttgcttccaaatcagcagaggaccattgtatgtattgtcaggtctttatataagagtgaaacctttatttatgcttcttgtgagtagagaataaattttaaaactaattagatgaaattaagaacagagtattggaacatctctgtgttttccggaatgtttactcaggtccatgaatgctgtgatgctgggaacttagggaagattcaccaaaatttgagagtgataaaaatggcctaaaatgggaaatggtgagcactcttattattagtgagattggtcaatcagcccatttgaaatgggtaaaaaatactttcagtaaaataattacatattatatataaaatatttctttttttgagggcagctactgagtgataaaagcatagtagaaatcactttggttaaaagtaactcaaatttttctcttaagtaatctaccaacttcctgatgtttttctttaatattttggaactgttcaagacagaatggagcctacatatatggtgttccactagtatgttgaaaatgtcatatcatggagaatggagacaccttccaggtgtctgttaaacccatcttctctgtgtacttctggcatcttttttggtaggatcatttggcagggggtagagtacctgtacttttggcaccattgaaaccagctctggcccacttgtttgaatagctatcagactcagcgtctctatatgctttatatacagttgagagaaccagtgtttaatgctcttgaaattgtatcttccatgcttcagaccagatgcatttaacaaaatggatatattccagctgtagttgcccagtgtttacttaacacatctacatttttttcttgtctattttggtccccttgataggaaaagctataattttaggcaggactatacgtcgatttgtagccatgcttccttcctttcccttgctcatccatgttagctggcagtttttcttttgaaaagttaaaaccgggatatgtgcaatagaaatatatatatatatatgtatattttaatacttgtggacaaatgttacaagttgtttaagaacaacaaaatcaccaatgtcttccattttgagatgtgtatagttttgtaagcattagtgcttggtagcatattgtagtgccatgttaggggttagtgcatgagtctagtgattttaaacttcaggatgaattattgataataacaaatagtgtaaaaagagtggaaaatctaaaccttttctttttccataatgtctaaatctgttatattcttcctggggaaaagagattaaggcccaaaagactcatttatgaatagaaatgtggggtcaaaatctgagatactatatttgaggacatttcagctttccataaggtatctggaaaccagctgtctttgtgtcttatgaaacctcaagtcaaaatgagaccgcatttaattattctgctttgctctttttttggggtgggggggagatagagtttcactctgtcacccaggctggagtgcagtggcacaatctttgctcactgtaacctctgcctcttgggttcaagtgattctcgtgccccagcctcccgagtagctgggactacaggcacgtgccaccacgcccagctaatttttatatttttagtagagacggggtttgctgtgttggccaggctggtctcaaactcctgacctcaagtaatccacctggcctgctcttttcatgtcttaacatggcatgtcttttagtttcattattttcctactccttgtatgtcaagaaattacattttgcatgtcttatggagatgctgttaattgcttcagtgagtgcttttctaatctgcagaccatttacatttcctgtttgcagcatgctgtgtgcaaacactcagtaatttggagtattcaattatttgttagggctcttcctatttccaaatgtgctgaattgtctattgatgggattttcagatcttttcatgagaactggaaatgtagctgggtggcacctacctaggttgctacgtagtgagtagactttctcttgggtatagtaagcctcagacagctttcacttttatctactttacttgtggaaataaaacagtcattttgttctgaaagaataagatagctttctgtagagaaggaattcctacctctaaaagctgccttgagaactcagaactggcagttttctgaggtgatttttaaatttcagtattagggagagtccagcatttgctgacacagattctacataactaatgtatgatagcaaatgcaaaactattataatgtggtgtatcttgcgcatacacaggttagaacaagtagactctggcagcagatctccagagacccaagtttaggttctcatagtgtatttgaagtagttatactcctggcttaagtagtttagtgcctgggagaatccattactgaaaagcatttaacttaaaaaaaaaaaaaatgaaaaggtagtgaatacagaatagcacaatatataggaaaggatatttcctgttgaaaaaaaaagccataaaattaatagtaattttcaagaggtagaattttagtagcaataagtttgtgcatgtatagtaatttgcattagcaaggttgtacaatagaataagtgatactactggagtttgtggggctctgcaaccaagagttgcacaagggccaggtgcggtggcttacacctataatcccagcactttgggaggccaaggtgggcggatcacaaggtcaagagatcaggctggtctttaactcctggccttacgtgatccgcccccccttagccttccaaagtgctgggattacaggtgtgagccactgcacctggcctgtagtagcttaaaattttccttgagaaaattcctgactttaaaaataacccttatataagtacaagtgattgtgacaaatgacgtaaaaatggcattcatgatgtctgaaacaagcctaaatagaattcaagattagactaaatgattttcacaaagcacattcaaggttttacattctatgattgaaaaaaattttttgaaaactttttatttcattctttcctgtaggattttgctacaaataactttgggaatgaataaagtggaatggtaactttccagtggttcagaattgaattagacttcttgtgactgtgatgtttggtttccattgaaatatatgaagtgagatgtcatatcctgaatatagtttgtcttccccaattacttgatagcatgtctgtcagccagtaaagattaagaacagagtttctctaaattcctccgattattccactaaggcacattaaaatacttaattttgggaaaccagacatcacagatttctccatgaagtcctaaatcttctttaaagtcagaataggtatcttagttactgacagtattcaggtttttttctcccttggtgatatgtcattccatcagtgaaaaaatattttctcccagggataagaaaggtattctggtaatacattatcatcaatccttaaacagtaacagtcttggcacttatcacaaaaccgacccatttcttataaccagaaagattatcttagactgtccttcacattatactttacctactgccttgtaagaataagagttgctcactgtgtttacttgctgtcctccatattctccattgcaccattggtgtataacgttaagagtttcattgaatattattttaagtattacaaaaggcagcttgcttcttaatctatgcatctttggggtttttgaagaaatttaattctttgatgtaaaaaggaactgttaaaaaagttggaagctctgcacctgtgtatatatatattttagcaataaagcagcatgggctgagaatgca

SEQ ID NO: 459450 - DNA, 5556 bp, Homo sapiens
  misc_feature (1472)..(1472): n is a, c, g, or t
tgggaacggcccaccgcagggttggccaccttgagaagctgcgaagatggcggagtaaggcgtgccgctgcaaactggcctctgggccgggggcgagcagcccccgggaggccgagtgcatctgttggaccgtgcgaggagaagaaaaaaaatatcggccagaggagaggaactaaccgaacattcttcctccctaccttatagaggggagtggtcatctacactaaagcaaagtgttaggcgcgtccgtgcgaagagaccaccaaacaggctttgtgttccttatcacaggaagaaaattttccttgacctttaggtgcttttatattcatctcaaaaacaaaattctgaactcaggacttggcaagtgtctctatgttgtctcctagagtgggtagtcctgcttcttttacccagttactttccctgtttttgaaatgtggctatcacttctctacacattacctccatgatttggaatggaaaaggccacttttctttttgttctgcctctcaaattcaacacagaggagctcctaggattccagttatcctgctaacatctccaggaagaaagaagcaactcacatgggtcttttgctgtttgcttaattataaagacatcattttgcaagcagaaggctgagtttcatttgaaacaggtgcttaggtggtggtatttgtgaatacttttcattccaagcaagaagactaaagaagtagcaagtatgaatgacttcagggtttaaaaaaaatgtcttccagtttcagccactaccatgataagcacagttgagactgcagcagtaaattccaaatatgtgtttctaatttgacgtgaaagatactaaaaatttatatttgtatatttaaatcctggctcatcctgtgacatagatttactgaataggaacaaaggcccaattttaaacaaaaacctaggccgggtgtggtggctcacacctgtaatcccaacactttgggaggccaaggcaggcaaatcacctgaggttgggagtttgagaccagcctgaccaacatggagaaaccccatctctactaaaaatagaaaattagccaggtgtggtggtagatacgtgtaatctcagctactcgtgaggctgaggcaggagaattgcttgaatccgggaggcggaggttgcagtgaactgagattgcaccactgcactccagcctgggcgacagagtgagactccgtctcagaaaaataaaaaacaactttggacatagaggagttgggggcagaggggggaggatgagagaattttccatgtaactccttttccttaagaaaaagaagcaaaaatccctcatgcagtgccatctgactttatggtgtttcacattatatagttactttttttaataaacgcataagattaactcttcctgcaacccaaggtggatacttggatgtttgatttttatttatttatttatttattttttgnggcagtctctctctgttgcccaggctggagtgatgcgtgatttctgctcactgcagtctctcccacccgggttcaagcgattctcctgcctcagcctcccaagtagctaggattacaggcgcgcaccaccacgctcagcctgatttctaggctgaaaaggctgggactcaggtactttccccagttgggactgaactttctcatcagagaatgggcctcagaagcaatgttcccaaacttgtggttgggtcatcgtggaaaagaaacctcaaataagaaaaataattacaataagaaatggattttcttttttcccacaacagttatacattataaagaacagactgtcgtagaaaactgtctttgcttccaaatcagcagaggaccattgtatgtattgtcaggtctttatataagagtgaaacctttatttatgcttcttgtgagtagagaataaattttaaaactaattagatgaaattaagaacagagtattggaacatctctgtgttttccggaatgtttactcaggtccatgaatgctgtgatgctgggaacttagggaagattcaccaaaatttgagagtgataaaaatggcctaaaatgggaaatggtgagcactcttattattagtgagattggtcaatcagcccatttgaaatgggtaaaaaatactttcagtaaaataattacatattatatataaaatatttctttttttgagggcagctactgagtgataaaagcatagtagaaatcactttggttaaaagtaactcaaatttttctcttaagtaatctaccaacttcctgatgtttttctttaatattttggaactgttcaagacagaatggagcctacatatatggtgttccactagtatgttgaaaatgtcatatcatggagaatggagacaccttccaggtgtctgttaaacccatcttctctgtgtacttctggcatcttttttggtaggatcatttggcagggggtagagtacctgtacttttggcaccattgaaaccagctctggcccacttgtttgaatagctatcagactcagcgtctctatatgctttatatacagttgagagaaccagtgtttaatgctcttgaaattgtatcttccatgcttcagaccagatgcatttaacaaaatggatatattccagctgtagttgcccagtgtttacttaacacatctacatttttttcttgtctattttggtccccttgataggaaaagctataattttaggcaggactatacgtcgatttgtagccatgcttccttcctttcccttgctcatccatgttagctggcagtttttcttttgaaaagttaaaaccgggatatgtgcaatagaaatatatatatatatatgtatattttaatacttgtggacaaatgttacaagttgtttaagaacaacaaaatcaccaatgtcttccattttgagatgtgtatagttttgtaagcattagtgcttggtagcatattgtagtgccatgttaggggttagtgcatgagtctagtgattttaaacttcaggatgaattattgataataacaaatagtgtaaaaagagtggaaaatctaaaccttttctttttccataatgtctaaatctgttatattcttcctggggaaaagagattaaggcccaaaagactcatttatgaatagaaatgtggggtcaaaatctgagatactatatttgaggacatttcagctttccataaggtatctggaaaccagctgtctttgtgtcttatgaaacctcaagtcaaaatgagaccgcatttaattattctgctttgctctttttttggggtgggggggagatagagtttcactctgtcacccaggctggagtgcagtggcacaatctttgctcactgtaacctctgcctcttgggttcaagtgattctcgtgccccagcctcccgagtagctgggactacaggcacgtgccaccacgcccagctaatttttatatttttagtagagacggggtttgctgtgttggccaggctggtctcaaactcctgacctcaagtaatccacctggcctgctcttttcatgtcttaacatggcatgtcttttagtttcattattttcctactccttgtatgtcaagaaattacattttgcatgtcttatggagatgctgttaattgcttcagtgagtgcttttctaatctgcagaccatttacatttcctgtttgcagcatgctgtgtgcaaacactcagtaatttggagtattcaattatttgttagggctcttcctatttccaaatgtgctgaattgtctattgatgggattttcagatcttttcatgagaactggaaatgtagctgggtggcacctacctaggttgctacgtagtgagtagactttctcttgggtatagtaagcctcagacagctttcacttttatctactttacttgtggaaataaaacagtcattttgttctgaaagaataagatagctttctgtagagaaggaattcctacctctaaaagctgccttgagaactcagaactggcagttttctgaggtgatttttaaatttcagtattagggagagtccagcatttgctgacacagattctacataactaatgtatgatagcaaatgcaaaactattataatgtggtgtatcttgcgcatacacaggttagaacaagtagactctggcagcagatctccagagacccaagtttaggttctcatagtgtatttgaagtagttatactcctggcttaagtagtttagtgcctgggagaatccattactgaaaagcatttaacttaaaaaaaaaaaaaaaaaaaaaaaaaaaaactgaaaaggtagtgaatacagaatagcacaatatataggaaaggatatttcctgttgaaaaaaaaagccataaaattaatagtaattttcaagaggtagaattttagtagcaataagtttgtgcatgtatagtaatttgcattagcaaggttgtacaatagaataagtgatactactggtgagccactgcacctggcctgtagtagcttaaaattttccttgagaaaattcctgactttaaaaataacccttatataagtacaagtgattgtgacaaatgacgtaaaaatggcattcatgatgtctgaaacaagcctaaatagaattcaagattagactaaatgattttcacaaagcacattcaaggttttacattctatgattgaaaaaaattttttgaaaactttttatttcattctttcctgtaggattttgctacaaataactttgggaatgaataaagtggaatggtaactttccagtggttcagaattgaattagacttcttgtgactgtgatgtttggtttccattgaaatatatgaagtgagatgtcatatcctgaatatagtttgtcttccccaattacttgatagcatgtctgtcagccagtaaagattaagaacagagtttctctaaattcctccgattattccactaaggcacattaaaatacttaattttgggaaaccagacatcacagatttctccatgaagtcctaaatcttctttaaagtcagaataggtatcttagttactgacagtattcaggtttttttctcccttggtgatatgtcattccatcagtgaaaaaatattttctcccagggataagaaaggtattctggtaatacattatcatcaatccttaaacagtaacagtcttggcacttatcacaaaaccgacccatttcttataaccagaaagattatcttagactgtccttcacattatactttacctactgccttgtaagaataagagttgctcactgtgtttacttgctgtcctccatattctccattgcaccattggtgtataacgttaagagtttcattgaatattattttaagtattacaaaaggcagcttgcttcttaatctatgcatctttggggtttttgaagaaatttaattctttgatgtaaaaaggaactgttaaaaaagttggaagctctgcacctgtgtatatatatattttagcaataaagcagcatgggctgagaatgca

SEQ ID NO: 459451 - DNA, 7747 bp, Homo sapiens
tggtgtagcttgactcctagaaggtctggcccctctgagatttgcttttgggcgatccaaaggacatgtagagaagtcaagctggtacatggtattgaaacacttcagggccctcaggttgtcccctggacctgcgggtaggaaaccgggagagtgggttcagcactactgctcactcccctaaagatcaaagaggatgccgctcctttgcataatgaaaatgaagtctttgtactttgatttggaggggccgattttagggcaaagtgtctcatctaaacagcctccctcaacctatgggagtgatcactcagtacccctgggaacatttatttatgttccccaaacccagagaaacagagtccaggacgagaattgaggtgatgagcaccttctcccaccacccccaactttggctggggtggggtgggatgaaaattagccaggtgtggtggtagatacgtgtaatctcagcctcccaagtagctaggattacaggcgcgcaccaccacgctcagcctgatttctaggctgaaaaggctgggactcaggtactttccccagttgggactgaactttctcatcagagaatgggcctcagaagcaatgttcccaaacttgtggttgggtcatcgtggaaaagaaacctcaaataagaaaaataattacaataagaaatggattttcttttttcccacaacagttatacattataaagaacagactgtcgtagaaaactgtctttgcttccaaatcagcagaggaccattgtatgtattgtcaggtctttatataagagtgaaacctttatttatgcttcttgtgagtagagaataaattttaaaactaattagatgaaattaagaacagagtattggaacatctctgtgttttccggaatgtttactcaggtccatgaatgctgtgatgctgggaacttagggaagattcaccaaaatttgagagtgataaaaatggcctaaaatgggaaatggtgagcactcttattattagtgagattggtcaatcagcccatttgaaatgggtaaaaaatactttcagtaaaataattacatattatatataaaatatttctttttttgagggcagctactgagtgataaaagcatagtagaaatcactttggttaaaagtaactcaaatttttctcttaagtaatctaccaacttcctgatgtttttctttaatattttggaactgttcaagacagaatggagcctacatatatggtgttccactagtatgttgaaaatgtcatatcatggagaatggagacaccttccaggtgtctgttaaacccatcttctctgtgtacttctggcatcttttttggtaggatcatttggcagggggtagagtacctgtacttttggcaccattgaaaccagctctggcccacttgtttgaatagctatcagactcagcgtctctatatgctttatatacagttgagagaaccagtgtttaatgctcttgaaattgtatcttccatgcttcagaccagatgcatttaacaaaatggatatattccagctgtagttgcccagtgtttacttaacacatctacatttttttcttgtctattttggtccccttgataggaaaagctataattttaggcaggactatacgtcgatttgtagccatgcttccttcctttcccttgctcatccatgttagctggcagtttttcttttgaaaagttaaaaccgggatatgtgcaatagaaatatatatatatatatgtatattttaatacttgtggacaaatgttacaagttgtttaagaacaacaaaatcaccaatgtcttccattttgagatgtgtatagttttgtaagcattagtgcttggtagcatattgtagtgccatgttaggggttagtgcatgagtctagtgattttaaacttcaggatgaattattgataataacaaatagtgtaaaaagagtggaaaatctaaaccttttctttttccataatgtctaaatctgttatattcttcctggggaaaagagattaaggcccaaaagactcatttatgaatagaaatgtggggtcaaaatctgagatactatatttgaggacatttcagctttccataaggtatctggaaaccagctgtctttgtgtcttatgaaacctcaagtcaaaatgagaccgcatttaattattctgctttgctctttttttggggtgggggggagatagagtttcactctgtcacccaggctggagtgcagtggcacaatctttgctcactgtaacctctgcctcttgggttcaagtgattctcgtgccccagcctcccgagtagctgggactacaggcacgtgccaccacgcccagctaatttttatatttttagtagagacggggtttgctgtgttggccaggctggtctcaaactcctgacctcaagtaatccacctggcctgctcttttcatgtcttaacatggcatgtcttttagtttcattattttcctactccttgtatgtcaagaaattacattttgcatgtcttatggagatgctgttaattgcttcagtgagtgcttttctaatctgcagaccatttacatttcctgtttgcagcatgctgtgtgcaaacactcagtaatttggagtattcaattatttgttagggctcttcctatttccaaatgtgctgaattgtctattgatgggattttcagatcttttcatgagaactggaaatgtagctgggtggcacctacctaggttgctacgtagtgagtagactttctcttgggtatagtaagcctcagacagctttcacttttatctactttacttgtggaaataaaacagtcattttgttctgaaagaataagatagctttctgtagagaaggaattcctacctctaaaagctgccttgagaactcagaactggcagttttctgaggtgatttttaaatttcagtattagggagagtccagcatttgctgacacagattctacataactaatgtatgatagcaaatgcaaaactattataatgtggtgtatcttgcgcatacacaggttagaacaagtagactctggcagcagatctccagagacccaagtttaggttctcatagtgtatttgaagtagttatactcctggcttaagtagtttagtgcctgggagaatccattactgaaaagcatttaacttaaaaaaaaaaaaaatgaaaaggtagtgaatacagaatagcacaatatataggaaaggatatttcctgttgaaaaaaaaagccataaaattaatagtaattttcaagaggtagaattttagtagcaataagtttgtgcatgtatagtaatttgcattagcaaggttgtacaatagaataagtgatactactggagtttgtggggctctgcaaccaagagttgcacaagggccaggtgcggtggcttacacctataatcccagcactttgggaggccaaggtgggcggatcacaaggtcaagagatcaggaccatcctggccaacatggtgaaatgccatctctactaaaaatacaaaacttagctgggcatggtggcacatgcctgtaatcccagctactcaggaggctgaggcagtagaatcacttaaacctgagaggcggaggttgcagtgagctgagatcacaccactgtactccagcctggtgacagtaagactccacctcaaacaaacaaaaaatgcacaaaaggaaaaaatgttctggataaagagcatatgaaaggtactttcttttagaacagtatgaatgtatatgaatttatctttatgtgagaaataatcttttttgtaagttaaaggttaaagaccctgcttgtttcctaaatcagagggttagagctgttgaaattaaacctttatagtgcttaacctggaaacaaatgtactacagccccactgaagccgctctatgggttttttgcttacgatgttttagcaacaggcatttattttgtagaatggtatactttctgctttgtctcctcatctttctccactggtttcctgggtacattttttttaaagggagagaagtttgtgagtttaatgttttaaaaaaactcccaagaacatggataagccggatttctctcatgcttatgattagggagttaggatttaaagatgcaaagcagaaggactgaaaggaatagccagtgaatatgtttcagtgggtgaggtgtgaaaccttgtctaatatagatgtgtcctatggcctgtgactgcttattctttatcaatgagaactcagcaaactagtttctttcttgatctgaggaaccacacagctcacatcagaatataatagtggaactagggtgacttcactccctttcacctgatgtctatcttggccttttagcaccttgactatccctgaaaagactgggtctttgttttcccagggaaaaaacgaagtgatgtagatctaagaaatagtgcctctttaatatttaattcttacatgacaactaacacacagggaaaaggctatgttaagttgattatagctcctcttaaaatgtcctatgctgtcagttggtcttagagacatgggaataaccaagcaatattcagacatctgcactatctggggacagcgctacatagtacaatgatgtcagcagttcagttacttggaacaattaaagattacccttaacagccatgttaatacatctaaatgctaaaatatactacgagtttttcatagtcttgaaagtatacagttaattacttttcaaagttactgtggtctcatgtttactcttcttgtatctgtgatatgcaaaaagatgaagactcttggcctccaggagtttacattctcatggtgctgttggttcaagcagattgctttagtttattaatgaacattgcttggctattaattatatcctatttggaaggatcccttggtgaacagttttaaaaagcagagggctgtgctaaatttcagggtattgatagcttgagtttacattgtattagccctgctcgttatcatttttttccccagggagctatgcaggtaatgctcattagcatgaatcagaaaagaaaccattctgcctaagagcatcttaaccatccccctaaaccacctatgctctcctgttatagttgtcagtaaatcacgaagaaaattaacagctccttaagactctacatccctcaattctctttcttttcccagagtttgtacatcattctctactcagatggaccaggatttgcatataagccttttaaaactgactagtggtcctaattttaacatttttgtgtatgactcctatcccttttctgaagcagcattgtgatagatgtggagcttctacctgcatttctaagcaattattaacccaacttttgagttgaaacttgcatggatccttgttatgtcccgtaattcctctgaatcaaggaatttattttgcatgcttattaaactcaaactgggtctgattgaaagtgcaagcaatagtgacaggaccttaactctggttttagagtacgaacattctaatgcatgactcaaaatgtccagtgttgtggttactagttattttatatatgcatttgttaataatgaagcaatagagactaagaccaatagcttgaatatattcagattattttcatgttttaataaaggatttttcttacttccattgaaaatgggaagtagaagataaacaggggcaaccacaagacattcaaactgtcaggactagggcgtagcagtgcccaccctctaaccacttgcctggttccattagtccccaagcatgtttgaaaacaaaagacacaaactaagcatgctgaataaaactagctgctatggctgtaataatcagaaaggtgcagagtttcagaaagagtaggaaagtagggaatgccagtatggagtatgtaaaataactagatatggatatggggtttgtttatgatatgctttatgtagacaaagtttgaggtcttttaaaactgggatttgagttgaaaagagtcaggatgcacatatttccactatttcaggattttcagatgactaggcacatgttgtggatgatactggtaccaactaccaatgaccaactataaagtacccctgcaataagggagacttcctttttgtagaatagtcctgaaaatactgacagatctgtggttagtttgttattttattgcataaaaaacagtttaaacaaattttatagccaaagttttatccttgatgggtttggccagactgcaatttcttgactaaagcttttaatgccaggttaaacaggagaaactttttccactagaagaaaatccttgctatctattttttccaatagaagaaaatccttgctatttattttatttgatgaataaacaaatttattgcagtagcttaaaaaaattttttttttaaacagtctcactctgtcgcccaggctggagtgaagcaatgtgatctcagctcactgcaacctccacctcccgagtagctgggattacagacatgcaccaccaccctcagctaatttttgtatttttagtagagacggggtttcgccatgttggccaggctggtctttaactcctggccttacgtgatccgcccccccttagccttccaaagtgctgggattacaggtgtgagccactgcacctggcctgtagtagcttaaaattttccttgagaaaattcctgactttaaaaataacccttatataagtacaagtgattgtgacaaatgacgtaaaaatggcattcatgatgtctgaaacaagcctaaatagaattcaagattagactaaatgattttcacaaagcacattcaaggttttacattctatgattgaaaaaaattttttgaaaactttttatttcattctttcctgtaggattttgctacaaataactttgggaatgaataaagtggaatggtaactttccagtggttcagaattgaattagacttcttgtgactgtgatgtttggtttccattgaaatatatgaagtgagatgtcatatcctgaatatagtttgtcttccccaattacttgatagcatgtctgtcagccagtaaagattaagaacagagtttctctaaattcctccgattattccactaaggcacattaaaatacttaattttgggaaaccagacatcacagatttctccatgaagtcctaaatcttctttaaagtcagaataggtatcttagttactgacagtattcaggtttttttctcccttggtgatatgtcattccatcagtgaaaaaatattttctcccagggataagaaaggtattctggtaatacattatcatcaatccttaaacagtaacagtcttggcacttatcacaaaaccgacccatttcttataaccagaaagattatcttagactgtccttcacattatactttacctactgccttgtaagaataagagttgctcactgtgtttacttgctgtcctccatattctccattgcaccattggtgtataacgttaagagtttcattgaatattattttaagtattacaaaaggcagcttgcttcttaatctatgcatctttggggtttttgaagaaatttaattctttgatgtaaaaaggaactgttaaaaaagttggaagctctgcacctgtgtatatatatattttagcaataaagcagcatgggctgagaatgca

SEQ ID NO: 459452 - DNA, 8215 bp, Homo sapiens
  misc_feature (1472)..(1472): n is a, c, g, or t
  misc_feature (8144)..(8144): n is a, c, g, or t
  misc_feature (8215)..(8215): n is a, c, g, or t
tgggaacggcccaccgcagggttggccaccttgagaagctgcgaagatggcggagtaaggcgtgccgctgcaaactggcctctgggccgggggcgagcagcccccgggaggccgagtgcatctgttggaccgtgcgaggagaagaaaaaaaatatcggccagaggagaggaactaaccgaacattcttcctccctaccttatagaggggagtggtcatctacactaaagcaaagtgttaggcgcgtccgtgcgaagagaccaccaaacaggctttgtgttccttatcacaggaagaaaattttccttgacctttaggtgcttttatattcatctcaaaaacaaaattctgaactcaggacttggcaagtgtctctatgttgtctcctagagtgggtagtcctgcttcttttacccagttactttccctgtttttgaaatgtggctatcacttctctacacattacctccatgatttggaatggaaaaggccacttttctttttgttctgcctctcaaattcaacacagaggagctcctaggattccagttatcctgctaacatctccaggaagaaagaagcaactcacatgggtcttttgctgtttgcttaattataaagacatcattttgcaagcagaaggctgagtttcatttgaaacaggtgcttaggtggtggtatttgtgaatacttttcattccaagcaagaagactaaagaagtagcaagtatgaatgacttcagggtttaaaaaaaatgtcttccagtttcagccactaccatgataagcacagttgagactgcagcagtaaattccaaatatgtgtttctaatttgacgtgaaagatactaaaaatttatatttgtatatttaaatcctggctcatcctgtgacatagatttactgaataggaacaaaggcccaattttaaacaaaaacctaggccgggtgtggtggctcacacctgtaatcccaacactttgggaggccaaggcaggcaaatcacctgaggttgggagtttgagaccagcctgaccaacatggagaaaccccatctctactaaaaatagaaaattagccaggtgtggtggtagatacgtgtaatctcagctactcgtgaggctgaggcaggagaattgcttgaatccgggaggcggaggttgcagtgaactgagattgcaccactgcactccagcctgggcgacagagtgagactccgtctcagaaaaataaaaaacaactttggacatagaggagttgggggcagaggggggaggatgagagaattttccatgtaactccttttccttaagaaaaagaagcaaaaatccctcatgcagtgccatctgactttatggtgtttcacattatatagttactttttttaataaacgcataagattaactcttcctgcaacccaaggtggatacttggatgtttgatttttatttatttatttatttattttttgnggcagtctctctctgttgcccaggctggagtgatgcgtgatttctgctcactgcagtctctcccacccgggttcaagcgattctcctgcctcagcctcccaagtagctaggattacaggcgcgcaccaccacgctcagcctgatttctaggctgaaaaggctgggactcaggtactttccccagttgggactgaactttctcatcagagaatgggcctcagaagcaatgttcccaaacttgtggttgggtcatcgtggaaaagaaacctcaaataagaaaaataattacaataagaaatggattttcttttttcccacaacagttatacattataaagaacagactgtcgtagaaaactgtctttgcttccaaatcagcagaggaccattgtatgtattgtcaggtctttatataagagtgaaacctttatttatgcttcttgtgagtagagaataaattttaaaactaattagatgaaattaagaacagagtattggaacatctctgtgttttccggaatgtttactcaggtccatgaatgctgtgatgctgggaacttagggaagattcaccaaaatttgagagtgataaaaatggcctaaaatgggaaatggtgagcactcttattattagtgagattggtcaatcagcccatttgaaatgggtaaaaaatactttcagtaaaataattacatattatatataaaatatttctttttttgagggcagctactgagtgataaaagcatagtagaaatcactttggttaaaagtaactcaaatttttctcttaagtaatctaccaacttcctgatgtttttctttaatattttggaactgttcaagacagaatggagcctacatatatggtgttccactagtatgttgaaaatgtcatatcatggagaatggagacaccttccaggtgtctgttaaacccatcttctctgtgtacttctggcatcttttttggtaggatcatttggcagggggtagagtacctgtacttttggcaccattgaaaccagctctggcccacttgtttgaatagctatcagactcagcgtctctatatgctttatatacagttgagagaaccagtgtttaatgctcttgaaattgtatcttccatgcttcagaccagatgcatttaacaaaatggatatattccagctgtagttgcccagtgtttacttaacacatctacatttttttcttgtctattttggtccccttgataggaaaagctataattttaggcaggactatacgtcgatttgtagccatgcttccttcctttcccttgctcatccatgttagctggcagtttttcttttgaaaagttaaaaccgggatatgtgcaatagaaatatatatatatatatgtatattttaatacttgtggacaaatgttacaagttgtttaagaacaacaaaatcaccaatgtcttccattttgagatgtgtatagttttgtaagcattagtgcttggtagcatattgtagtgccatgttaggggttagtgcatgagtctagtgattttaaacttcaggatgaattattgataataacaaatagtgtaaaaagagtggaaaatctaaaccttttctttttccataatgtctaaatctgttatattcttcctggggaaaagagattaaggcccaaaagactcatttatgaatagaaatgtggggtcaaaatctgagatactatatttgaggacatttcagctttccataaggtatctggaaaccagctgtctttgtgtcttatgaaacctcaagtcaaaatgagaccgcatttaattattctgctttgctctttttttggggtgggggggagatagagtttcactctgtcacccaggctggagtgcagtggcacaatctttgctcactgtaacctctgcctcttgggttcaagtgattctcgtgccccagcctcccgagtagctgggactacaggcacgtgccaccacgcccagctaatttttatatttttagtagagacggggtttgctgtgttggccaggctggtctcaaactcctgacctcaagtaatccacctggcctgctcttttcatgtcttaacatggcatgtcttttagtttcattattttcctactccttgtatgtcaagaaattacattttgcatgtcttatggagatgctgttaattgcttcagtgagtgcttttctaatctgcagaccatttacatttcctgtttgcagcatgctgtgtgcaaacactcagtaatttggagtattcaattatttgttagggctcttcctatttccaaatgtgctgaattgtctattgatgggattttcagatcttttcatgagaactggaaatgtagctgggtggcacctacctaggttgctacgtagtgagtagactttctcttgggtatagtaagcctcagacagctttcacttttatctactttacttgtggaaataaaacagtcattttgttctgaaagaataagatagctttctgtagagaaggaattcctacctctaaaagctgccttgagaactcagaactggcagttttctgaggtgatttttaaatttcagtattagggagagtccagcatttgctgacacagattctacataactaatgtatgatagcaaatgcaaaactattataatgtggtgtatcttgcgcatacacaggttagaacaagtagactctggcagcagatctccagagacccaagtttaggttctcatagtgtatttgaagtagttatactcctggcttaagtagtttagtgcctgggagaatccattactgaaaagcatttaacttaaaaaaaaaaaaaatgaaaaggtagtgaatacagaatagcacaatatataggaaaggatatttcctgttgaaaaaaaaagccataaaattaatagtaattttcaagaggtagaattttagtagcaataagtttgtgcatgtatagtaatttgcattagcaaggttgtacaatagaataagtgatactactggagtttgtggggctctgcaaccaagagttgcacaagggccaggtgcggtggcttacacctataatcccagcactttgggaggccaaggtgggcggatcacaaggtcaagagatcaggaccatcctggccaacatggtgaaatgccatctctactaaaaatacaaaacttagctgggcatggtggcacatgcctgtaatcccagctactcaggaggctgaggcagtagaatcacttaaacctgagaggcggaggttgcagtgagctgagatcacaccactgtactccagcctggtgacagtaagactccacctcaaacaaacaaaaaatgcacaaaaggaaaaaatgttctggataaagagcatatgaaaggtactttcttttagaacagtatgaatgtatatgaatttatctttatgtgagaaataatcttttttgtaagttaaaggttaaagaccctgcttgtttcctaaatcagagggttagagctgttgaaattaaacctttatagtgcttaacctggaaacaaatgtactacagccccactgaagccgctctatgggttttttgcttacgatgttttagcaacaggcatttattttgtagaatggtatactttctgctttgtctcctcatctttctccactggtttcctgggtacattttttttaaagggagagaagtttgtgagtttaatgttttaaaaaaactcccaagaacatggataagccggatttctctcatgcttatgattagggagttaggatttaaagatgcaaagcagaaggactgaaaggaatagccagtgaatatgtttcagtgggtgaggtgtgaaaccttgtctaatatagatgtgtcctatggcctgtgactgcttattctttatcaatgagaactcagcaaactagtttctttcttgatctgaggaaccacacagctcacatcagaatataatagtggaactagggtgacttcactccctttcacctgatgtctatcttggccttttagcaccttgactatccctgaaaagactgggtctttgttttcccagggaaaaaacgaagtgatgtagatctaagaaatagtgcctctttaatatttaattcttacatgacaactaacacacagggaaaaggctatgttaagttgattatagctcctcttaaaatgtcctatgctgtcagttggtcttagagacatgggaataaccaagcaatattcagacatctgcactatctggggacagcgctacatagtacaatgatgtcagcagttcagttacttggaacaattaaagattacccttaacagccatgttaatacatctaaatgctaaaatatactacgagtttttcatagtcttgaaagtatacagttaattacttttcaaagttactgtggtctcatgtttactcttcttgtatctgtgatatgcaaaaagatgaagactcttggcctccaggagtttacattctcatggtgctgttggttcaagcagattgctttagtttattaatgaacattgcttggctattaattatatcctatttggaaggatcccttggtgaacagttttaaaaagcagagggctgtgctaaatttcagggtattgatagcttgagtttacattgtattagccctgctcgttatcatttttttccccagggagctatgcaggtaatgctcattagcatgaatcagaaaagaaaccattctgcctaagagcatcttaaccatccccctaaaccacctatgctctcctgttatagttgtcagtaaatcacgaagaaaattaacagctccttaagactctacatccctcaattctctttcttttcccagagtttgtacatcattctctactcagatggaccaggatttgcatataagccttttaaaactgactagtggtcctaattttaacatttttgtgtatgactcctatcccttttctgaagcagcattgtgatagatgtggagcttctacctgcatttctaagcaattattaacccaacttttgagttgaaacttgcatggatccttgttatgtcccgtaattcctctgaatcaaggaatttattttgcatgcttattaaactcaaactgggtctgattgaaagtgcaagcaatagtgacaggaccttaactctggttttagagtacgaacattctaatgcatgactcaaaatgtccagtgttgtggttactagttattttatatatgcatttgttaataatgaagcaatagagactaagaccaatagcttgaatatattcagattattttcatgttttaataaaggatttttcttacttccattgaaaatgggaagtagaagataaacaggggcaaccacaagacattcaaactgtcaggactagggcgtagcagtgcccaccctctaaccacttgcctggttccattagtccccaagcatgtttgaaaacaaaagacacaaactaagcatgctgaataaaactagctgctatggctgtaataatcagaaaggtgcagagtttcagaaagagtaggaaagtagggaatgccagtatggagtatgtaaaataactagatatggatatggggtttgtttatgatatgctttatgtagacaaagtttgaggtcttttaaaactgggatttgagttgaaaagagtcaggatgcacatatttccactatttcaggattttcagatgactaggcacatgttgtggatgatactggtaccaactaccaatgaccaactataaagtacccctgcaataagggagacttcctttttgtagaatagtcctgaaaatactgacagatctgtggttagtttgttattttattgcataaaaaacagtttaaacaaattttatagccaaagttttatccttgatgggtttggccagactgcaatttcttgactaaagcttttaatgccaggttaaacaggagaaactttttccactagaagaaaatccttgctatctattttttccaatagaagaaaatccttgctatttattttatttgatgaataaacaaatttattgcagtagcttaaaaaaattttttttttaaacagtctcactctgtcgcccaggctggagtgaagcaatgtgatctcagctcactgcaacctccacctcccgagtagctgggattacagacatgcaccaccaccctcagctaatttttgtatttttagtagagacggggtttcgccatgttggccaggctggtctttaactcctggccttacgtgatccgcccccccttagccttccaaagtgctgggattacaggtgtgagccactgcacctggcctgtagtagcttaaaattttccttgagaaaattcctgactttaaaaataacccttatataagtacaagtgattgtgacaaatgacgtaaaaatggcattcatgatgtctgaaacaagcctaaatagaattcaagattagactaaatgattttcacaaagcacattcaaggttttacattctatgattgaaaaaaattttttgaaaactttttatttcattctttcctgtaggattttgctacaaataactttgggaatgaataaagtggaatggtaactttccagtggttcagaattgaattagacttcttgtgactgtgatgtttggtccctgaatnttgaggggaggaatcccggaaaatgggtccccatatgtaatggtgtgccgaagtaaaaggccaacccgaan

SEQ ID NO: 459453 - DNA, 8255 bp, Homo sapiens
  misc_feature (1472)..(1472): n is a, c, g, or t
tgggaacggcccaccgcagggttggccaccttgagaagctgcgaagatggcggagtaaggcgtgccgctgcaaactggcctctgggccgggggcgagcagcccccgggaggccgagtgcatctgttggaccgtgcgaggagaagaaaaaaaatatcggccagaggagaggaactaaccgaacattcttcctccctaccttatagaggggagtggtcatctacactaaagcaaagtgttaggcgcgtccgtgcgaagagaccaccaaacaggctttgtgttccttatcacaggaagaaaattttccttgacctttaggtgcttttatattcatctcaaaaacaaaattctgaactcaggacttggcaagtgtctctatgttgtctcctagagtgggtagtcctgcttcttttacccagttactttccctgtttttgaaatgtggctatcacttctctacacattacctccatgatttggaatggaaaaggccacttttctttttgttctgcctctcaaattcaacacagaggagctcctaggattccagttatcctgctaacatctccaggaagaaagaagcaactcacatgggtcttttgctgtttgcttaattataaagacatcattttgcaagcagaaggctgagtttcatttgaaacaggtgcttaggtggtggtatttgtgaatacttttcattccaagcaagaagactaaagaagtagcaagtatgaatgacttcagggtttaaaaaaaatgtcttccagtttcagccactaccatgataagcacagttgagactgcagcagtaaattccaaatatgtgtttctaatttgacgtgaaagatactaaaaatttatatttgtatatttaaatcctggctcatcctgtgacatagatttactgaataggaacaaaggcccaattttaaacaaaaacctaggccgggtgtggtggctcacacctgtaatcccaacactttgggaggccaaggcaggcaaatcacctgaggttgggagtttgagaccagcctgaccaacatggagaaaccccatctctactaaaaatagaaaattagccaggtgtggtggtagatacgtgtaatctcagctactcgtgaggctgaggcaggagaattgcttgaatccgggaggcggaggttgcagtgaactgagattgcaccactgcactccagcctgggcgacagagtgagactccgtctcagaaaaataaaaaacaactttggacatagaggagttgggggcagaggggggaggatgagagaattttccatgtaactccttttccttaagaaaaagaagcaaaaatccctcatgcagtgccatctgactttatggtgtttcacattatatagttactttttttaataaacgcataagattaactcttcctgcaacccaaggtggatacttggatgtttgatttttatttatttatttatttattttttgnggcagtctctctctgttgcccaggctggagtgatgcgtgatttctgctcactgcagtctctcccacccgggttcaagcgattctcctgcctcagcctcccaagtagctaggattacaggcgcgcaccaccacgctcagcctgatttctaggctgaaaaggctgggactcaggtactttccccagttgggactgaactttctcatcagagaatgggcctcagaagcaatgttcccaaacttgtggttgggtcatcgtggaaaagaaacctcaaataagaaaaataattacaataagaaatggattttcttttttcccacaacagttatacattataaagaacagactgtcgtagaaaactgtctttgcttccaaatcagcagaggaccattgtatgtattgtcaggtctttatataagagtgaaacctttatttatgcttcttgtgagtagagaataaattttaaaactaattagatgaaattaagaacagagtattggaacatctctgtgttttccggaatgtttactcaggtccatgaatgctgtgatgctgggaacttagggaagattcaccaaaatttgagagtgataaaaatggcctaaaatgggaaatggtgagcactcttattattagtgagattggtcaatcagcccatttgaaatgggtaaaaaatactttcagtaaaataattacatattatatataaaatatttctttttttgagggcagctactgagtgataaaagcatagtagaaatcactttggttaaaagtaactcaaatttttctcttaagtaatctaccaacttcctgatgtttttctttaatattttggaactgttcaagacagaatggagcctacatatatggtgttccactagtatgttgaaaatgtcatatcatggagaatggagacaccttccaggtgtctgttaaacccatcttctctgtgtacttctggcatcttttttggtaggatcatttggcagggggtagagtacctgtacttttggcaccattgaaaccagctctggcccacttgtttgaatagctatcagactcagcgtctctatatgctttatatacagttgagagaaccagtgtttaatgctcttgaaattgtatcttccatgcttcagaccagatgcatttaacaaaatggatatattccagctgtagttgcccagtgtttacttaacacatctacatttttttcttgtctattttggtccccttgataggaaaagctataattttaggcaggactatacgtcgatttgtagccatgcttccttcctttcccttgctcatccatgttagctggcagtttttcttttgaaaagttaaaaccgggatatgtgcaatagaaatatatatatatatatgtatattttaatacttgtggacaaatgttacaagttgtttaagaacaacaaaatcaccaatgtcttccattttgagatgtgtatagttttgtaagcattagtgcttggtagcatattgtagtgccatgttaggggttagtgcatgagtctagtgattttaaacttcaggatgaattattgataataacaaatagtgtaaaaagagtggaaaatctaaaccttttctttttccataatgtctaaatctgttatattcttcctggggaaaagagattaaggcccaaaagactcatttatgaatagaaatgtggggtcaaaatctgagatactatatttgaggacatttcagctttccataaggtatctggaaaccagctgtctttgtgtcttatgaaacctcaagtcaaaatgagaccgcatttaattattctgctttgctctttttttggggtgggggggagatagagtttcactctgtcacccaggctggagtgcagtggcacaatctttgctcactgtaacctctgcctcttgggttcaagtgattctcgtgccccagcctcccgagtagctgggactacaggcacgtgccaccacgcccagctaatttttatatttttagtagagacggggtttgctgtgttggccaggctggtctcaaactcctgacctcaagtaatccacctggcctgctcttttcatgtcttaacatggcatgtcttttagtttcattattttcctactccttgtatgtcaagaaattacattttgcatgtcttatggagatgctgttaattgcttcagtgagtgcttttctaatctgcagaccatttacatttcctgtttgcagcatgctgtgtgcaaacactcagtaatttggagtattcaattatttgttagggctcttcctatttccaaatgtgctgaattgtctattgatgggattttcagatcttttcatgagaactggaaatgtagctgggtggcacctacctaggttgctacgtagtgagtagactttctcttgggtatagtaagcctcagacagctttcacttttatctactttacttgtggaaataaaacagtcattttgttctgaaagaataagatagctttctgtagagaaggaattcctacctctaaaagctgccttgagaactcagaactggcagttttctgaggtgatttttaaatttcagtattagggagagtccagcatttgctgacacagattctacataactaatgtatgatagcaaatgcaaaactattataatgtggtgtatcttgcgcatacacaggttagaacaagtagactctggcagcagatctccagagacccaagtttaggttctcatagtgtatttgaagtagttatactcctggcttaagtagtttagtgcctgggagaatccattactgaaaagcatttaacttaaaaaaaaaaaaaatgaaaaggtagtgaatacagaatagcacaatatataggaaaggatatttcctgttgaaaaaaaaagccataaaattaatagtaattttcaagaggtagaattttagtagcaataagtttgtgcatgtatagtaatttgcattagcaaggttgtacaatagaataagtgatactactggagtttgtggggctctgcaaccaagagttgcacaagggccaggtgcggtggcttacacctataatcccagcactttgggaggccaaggtgggcggatcacaaggtcaagagatcaggaccatcctggccaacatggtgaaatgccatctctactaaaaatacaaaacttagctgggcatggtggcacatgcctgtaatcccagctactcaggaggctgaggcagtagaatcacttaaacctgagaggcggaggttgcagtgagctgagatcacaccactgtactccagcctggtgacagtaagactccacctcaaacaaacaaaaaatgcacaaaaggaaaaaatgttctggataaagagcatatgaaaggtactttcttttagaacagtatgaatgtatatgaatttatctttatgtgagaaataatcttttttgtaagttaaaggttaaagaccctgcttgtttcctaaatcagagggttagagctgttgaaattaaacctttatagtgcttaacctggaaacaaatgtactacagccccactgaagccgctctatgggttttttgcttacgatgttttagcaacaggcatttattttgtagaatggtatactttctgctttgtctcctcatctttctccactggtttcctgggtacattttttttaaagggagagaagtttgtgagtttaatgttttaaaaaaactcccaagaacatggataagccggatttctctcatgcttatgattagggagttaggatttaaagatgcaaagcagaaggactgaaaggaatagccagtgaatatgtttcagtgggtgaggtgtgaaaccttgtctaatatagatgtgtcctatggcctgtgactgcttattctttatcaatgagaactcagcaaactagtttctttcttgatctgaggaaccacacagctcacatcagaatataatagtggaactagggtgacttcactccctttcacctgatgtctatcttggccttttagcaccttgactatccctgaaaagactgggtctttgttttcccagggaaaaaacgaagtgatgtagatctaagaaatagtgcctctttaatatttaattcttacatgacaactaacacacagggaaaaggctatgttaagttgattatagctcctcttaaaatgtcctatgctgtcagttggtcttagagacatgggaataaccaagcaatattcagacatctgcactatctggggacagcgctacatagtacaatgatgtcagcagttcagttacttggaacaattaaagattacccttaacagccatgttaatacatctaaatgctaaaatatactacgagtttttcatagtcttgaaagtatacagttaattacttttcaaagttactgtggtctcatgtttactcttcttgtatctgtgatatgcaaaaagatgaagactcttggcctccaggagtttacattctcatggtgctgttggttcaagcagattgctttagtttattaatgaacattgcttggctattaattatatcctatttggaaggatcccttggtgaacagttttaaaaagcagagggctgtgctaaatttcagggtattgatagcttgagtttacattgtattagccctgctcgttatcatttttttccccagggagctatgcaggtaatgctcattagcatgaatcagaaaagaaaccattctgcctaagagcatcttaaccatccccctaaaccacctatgctctcctgttatagttgtcagtaaatcacgaagaaaattaacagctccttaagactctacatccctcaattctctttcttttcccagagtttgtacatcattctctactcagatggaccaggatttgcatataagccttttaaaactgactagtggtcctaattttaacatttttgtgtatgactcctatcccttttctgaagcagcattgtgatagatgtggagcttctacctgcatttctaagcaattattaacccaacttttgagttgaaacttgcatggatccttgttatgtcccgtaattcctctgaatcaaggaatttattttgcatgcttattaaactcaaactgggtctgattgaaagtgcaagcaatagtgacaggaccttaactctggttttagagtacgaacattctaatgcatgactcaaaatgtccagtgttgtggttactagttattttatatatgcatttgttaataatgaagcaatagagactaagaccaatagcttgaatatattcagattattttcatgttttaataaaggatttttcttacttccattgaaaatgggaagtagaagataaacaggggcaaccacaagacattcaaactgtcaggactagggcgtagcagtgcccaccctctaaccacttgcctggttccattagtccccaagcatgtttgaaaacaaaagacacaaactaagcatgctgaataaaactagctgctatggctgtaataatcagaaaggtgcagagtttcagaaagagtaggaaagtagggaatgccagtatggagtatgtaaaataactagatatggatatggggtttgtttatgatatgctttatgtagacaaagtttgaggtcttttaaaactgggatttgagttgaaaagagtcaggatgcacatatttccactatttcaggattttcagatgactaggcacatgttgtggatgatactggtaccaactaccaatgaccaactataaagtacccctgcaataagggagacttcctttttgtagaatagtcctgaaaatactgacagatctgtggttagtttgttattttattgcataaaaaacagtttaaacaaattttatagccaaagttttatccttgatgggtttggccagactgcaatttcttgactaaagcttttaatgccaggttaaacaggagaaactttttccactagaagaaaatccttgctatctattttttccaatagaagaaaatccttgctatttattttatttgatgaataaacaaatttattgcagtagcttaaaaaaattttttttttaaacagtctcactctgtcgcccaggctggagtgaagcaatgtgatctcagctcactgcaacctccacctcccgagtagctgggattacagacatgcaccaccaccctcagctaatttttgtatttttagtagagacggggtttcgccatgttggccaggctggtctttaactcctggccttacgtgatccgcccccccttagccttccaaagtgctgggattacaggtgcgtgagccaccacgcccggccaggaattcttaataactgtttcatcactcttatgtctgagacagttgagcaattacaaggtatttgcaaagaagacacctctatggcaagatgatgatatccattcccagcacaaaggagaatgcaggagtgcagcagttgagcagcttttcctttcttcctgaactataccttacagtgtggttttagtattttgtttttcattacaaattcaatagggaaggtcaaatcaagtaaaaaggattattgagcatcatgccatttcatcatccccaagttcattggtagaagttatcaagagttgtctgtattttaaaaaagcatacaaccatcatgaaattttacctctgcaatcttttctgatagaggaacattttgaatatccatctctgatgcatttactatggcttttgtttttaagagatagctagataggaaaaaaaaaa

SEQ ID NO: 459454 - DNA, 5524 bp, Homo sapiens
tgggaacggcccaccgcagggttggccaccttgagaagctgcgaagatggcggagtaaggcgtgccgctgcaaactggcctctgggccgggggcgagcagcccccgggaggccgagtgcatctgttggaccgtgcgaggagaagaaaaaaaatatcggccagaggagaggaactaaccgaacattcttcctccctaccttatagaggggagtggtcatctacactaaagcaaagtgttaggcgcgtccgtgcgaagagaccaccaaacaggctttgtgttccttatcacaggaagaaaattttccttgacctttaggtgcttttatattcatctcaaaaacaaaattctgaactcaggacttggcaagtgtctctatgttgtctcctagagtgggtagtcctgcttcttttacccagttactttccctgtttttgaaatgtggctatcacttctctacacattacctccatgatttggaatggaaaaggccacttttctttttgttctgcctctcaaattcaacacagaggagctcctaggattccagttatcctgctaacatctccaggaagaaagaagcaactcacatgggtcttttgctgtttgcttaattataaagacatcattttgcaagcagaaggctgagtttcatttgaaacaggtgcttaggtggtggtatttgtgaatacttttcattccaagcaagaagactaaagaagtagcaagtatgaatgacttcagggtttaaaaaaaatgtcttccagtttcagccactaccatgataagcacagttgagactgcagcagtaaattccaaatatgtgtttctaatttgacgtgaaagatactaaaaatttatatttgtatatttaaatcctggctcatcctgtgacatagatttactgaataggaacaaaggcccaattttaaacaaaaacctaggccgggtgtggtggctcacacctgtaatcccaacactttgggaggccaaggcaggcaaatcacctgaggttgggagtttgagaccagcctgaccaacatggagaaaccccatctctactaaaaatagaaaattagccaggtgtggtggtagatacgtgtaatctcagctactcgtgaggctgaggcaggcaaatcacctgaggttgggagtttgagaccagcctgaccaacatggagaaaccccatctctactaaaaatagaaaattagctgggtgcggtggcttacacctataatcccagcactttgggaggccaaggtgggcggatcacaaggtcaagagatcaggaccatcctggccaacatggtgaaatgccatctctactaaaaatacaaaacttagctgggcatggtggcacatgcctgtaatcccagctactcaggaggctgaggcagtagaatcacttaaacctgagaggcggaggttgcagtgagctgagatcacaccactgtactccagcctggtgacagtaagactccacctcaaacaaacaaaaaatgcacaaaaggaaaaaatgttctggataaagagcatatgaaaggtactttcttttagaacagtatgaatgtatatgaatttatctttatgtgagaaataatcttttttgtaagttaaaggttaaagaccctgcttgtttcctaaatcagagggttagagctgttgaaattaaacctttatagtgcttaacctggaaacaaatgtactacagccccactgaagccgctctatgggttttttgcttacgatgttttagcaacaggcatttattttgtagaatggtatactttctgctttgtctcctcatctttctccactggtttcctgggtacattttttttaaagggagagaagtttgtgagtttaatgttttaaaaaaactcccaagaacatggataagccggatttctctcatgcttatgattagggagttaggatttaaagatgcaaagcagaaggactgaaaggaatagccagtgaatatgtttcagtgggtgaggtgtgaaaccttgtctaatatagatgtgtcctatggcctgtgactgcttattctttatcaatgagaactcagcaaactagtttctttcttgatctgaggaaccacacagctcacatcagaatataatagtggaactagggtgacttcactccctttcacctgatgtctatcttggccttttagcaccttgactatccctgaaaagactgggtctttgttttcccagggaaaaaacgaagtgatgtagatctaagaaatagtgcctctttaatatttaattcttacatgacaactaacacacagggaaaaggctatgttaagttgattatagctcctcttaaaatgtcctatgctgtcagttggtcttagagacatgggaataaccaagcaatattcagacatctgcactatctggggacagcgctacatagtacaatgatgtcagcagttcagttacttggaacaattaaagattacccttaacagccatgttaatacatctaaatgctaaaatatactacgagtttttcatagtcttgaaagtatacagttaattacttttcaaagttactgtggtctcatgtttactcttcttgtatctgtgatatgcaaaaagatgaagactcttggcctccaggagtttacattctcatggtgctgttggttcaagcagattgctttagtttattaatgaacattgcttggctattaattatatcctatttggaaggatcccttggtgaacagttttaaaaagcagagggctgtgctaaatttcagggtattgatagcttgagtttacattgtattagccctgctcgttatcatttttttccccagggagctatgcaggtaatgctcattagcatgaatcagaaaagaaaccattctgcctaagagcatcttaaccatccccctaaaccacctatgctctcctgttatagttgtcagtaaatcacgaagaaaattaacagctccttaagactctacatccctcaattctctttcttttcccagagtttgtacatcattctctactcagatggaccaggatttgcatataagccttttaaaactgactagtggtcctaattttaacatttttgtgtatgactcctatcccttttctgaagcagcattgtgatagatgtggagcttctacctgcatttctaagcaattattaacccaacttttgagttgaaacttgcatggatccttgttatgtcccgtaattcctctgaatcaaggaatttattttgcatgcttattaaactcaaactgggtctgattgaaagtgcaagcaatagtgacaggaccttaactctggttttagagtacgaacattctaatgcatgactcaaaatgtccagtgttgtggttactagttattttatatatgcatttgttaataatgaagcaatagagactaagaccaatagcttgaatatattcagattattttcatgttttaataaaggatttttcttacttccattgaaaatgggaagtagaagataaacaggggcaaccacaagacattcaaactgtcaggactagggcgtagcagtgcccaccctctaaccacttgcctggttccattagtccccaagcatgtttgaaaacaaaagacacaaactaagcatgctgaataaaactagctgctatggctgtaataatcagaaaggtgcagagtttcagaaagagtaggaaagtagggaatgccagtatggagtatgtaaaataactagatatggatatggggtttgtttatgatatgctttatgtagacaaagtttgaggtcttttaaaactgggatttgagttgaaaagagtcaggatgcacatatttccactatttcaggattttcagatgactaggcacatgttgtggatgatactggtaccaactaccaatgaccaactataaagtacccctgcaataagggagacttcctttttgtagaatagtcctgaaaatactgacagatctgtggttagtttgttattttattgcataaaaaacagtttaaacaaattttatagccaaagttttatccttgatgggtttggccagactgcaatttcttgactaaagcttttaatgccaggttaaacaggagaaactttttccactagaagaaaatccttgctatctattttttccaatagaagaaaatccttgctatttattttatttgatgaataaacaaatttattgcagtagcttaaaaaaattttttttttaaacagtctcactctgtcgcccaggctggagtgaagcaatgtgatctcagctcactgcaacctccacctcccgagtagctgggattacagacatgcaccaccaccctcagctaatttttgtatttttagtagagacggggtttcgccatgttggccaggctggtctttaactcctggccttacgtgatccgcccccccttagccttccaaagtgctgggattacaggtgtgagccactgcacctggcctgtagtagcttaaaattttccttgagaaaattcctgactttaaaaataacccttatataagtacaagtgattgtgacaaatgacgtaaaaatggcattcatgatgtctgaaacaagcctaaatagaattcaagattagactaaatgattttcacaaagcacattcaaggttttacattctatgattgaaaaaaattttttgaaaactttttatttcattctttcctgtaggattttgctacaaataactttgggaatgaataaagtggaatggtaactttccagtggttcagaattgaattagacttcttgtgactgtgatgtttggtttccattgaaatatatgaagtgagatgtcatatcctgaatatagtttgtcttccccaattacttgatagcatgtctgtcagccagtaaagattaagaacagagtttctctaaattcctccgattattccactaaggcacattaaaatacttaattttgggaaaccagacatcacagatttctccatgaagtcctaaatcttctttaaagtcagaataggtatcttagttactgacagtattcaggtttttttctcccttggtgatatgtcattccatcagtgaaaaaatattttctcccagggataagaaaggtattctggtaatacattatcatcaatccttaaacagtaacagtcttggcacttatcacaaaaccgacccatttcttataaccagaaagattatcttagactgtccttcacattatactttacctactgccttgtaagaataagagttgctcactgtgtttacttgctgtcctccatattctccattgcaccattggtgtataacgttaagagtttcattgaatattattttaagtattacaaaaggcagcttgcttcttaatctatgcatctttggggtttttgaagaaatttaattctttgatgtaaaaaggaactgttaaaaaagttggaagctctgcacctgtgtatatatatattttagcaataaagcagcatgggctgagaatgca

SEQ ID NO: 459455 - DNA, 7844 bp, Homo sapiens
  misc_feature (1472)..(1472): n is a, c, g, or t
tgggaacggcccaccgcagggttggccaccttgagaagctgcgaagatggcggagtaaggcgtgccgctgcaaactggcctctgggccgggggcgagcagcccccgggaggccgagtgcatctgttggaccgtgcgaggagaagaaaaaaaatatcggccagaggagaggaactaaccgaacattcttcctccctaccttatagaggggagtggtcatctacactaaagcaaagtgttaggcgcgtccgtgcgaagagaccaccaaacaggctttgtgttccttatcacaggaagaaaattttccttgacctttaggtgcttttatattcatctcaaaaacaaaattctgaactcaggacttggcaagtgtctctatgttgtctcctagagtgggtagtcctgcttcttttacccagttactttccctgtttttgaaatgtggctatcacttctctacacattacctccatgatttggaatggaaaaggccacttttctttttgttctgcctctcaaattcaacacagaggagctcctaggattccagttatcctgctaacatctccaggaagaaagaagcaactcacatgggtcttttgctgtttgcttaattataaagacatcattttgcaagcagaaggctgagtttcatttgaaacaggtgcttaggtggtggtatttgtgaatacttttcattccaagcaagaagactaaagaagtagcaagtatgaatgacttcagggtttaaaaaaaatgtcttccagtttcagccactaccatgataagcacagttgagactgcagcagtaaattccaaatatgtgtttctaatttgacgtgaaagatactaaaaatttatatttgtatatttaaatcctggctcatcctgtgacatagatttactgaataggaacaaaggcccaattttaaacaaaaacctaggccgggtgtggtggctcacacctgtaatcccaacactttgggaggccaaggcaggcaaatcacctgaggttgggagtttgagaccagcctgaccaacatggagaaaccccatctctactaaaaatagaaaattagccaggtgtggtggtagatacgtgtaatctcagctactcgtgaggctgaggcaggagaattgcttgaatccgggaggcggaggttgcagtgaactgagattgcaccactgcactccagcctgggcgacagagtgagactccgtctcagaaaaataaaaaacaactttggacatagaggagttgggggcagaggggggaggatgagagaattttccatgtaactccttttccttaagaaaaagaagcaaaaatccctcatgcagtgccatctgactttatggtgtttcacattatatagttactttttttaataaacgcataagattaactcttcctgcaacccaaggtggatacttggatgtttgatttttatttatttatttatttattttttgnggcagtctctctctgttgcccaggctggagtgatgcgtgatttctgctcactgcagtctctcccacccgggttcaagcgattctcctgcctcagcctcccaagtagctaggattacaggcgcgcaccaccacgctcagcctgatttctaggctgaaaaggctgggactcaggtactttccccagttgggactgaactttctcatcagagaatgggcctcagaagcaatgttcccaaacttgtggttgggtcatcgtggaaaagaaacctcaaataagaaaaataattacaataagaaatggattttcttttttcccacaacagttatacattataaagaacagactgtcgtagaaaactgtctttgcttccaaatcagcagaggaccattgtatgtattgtcaggtctttatataagagtgaaacctttatttatgcttcttgtgagtagagaataaattttaaaactaattagatgaaattaagaacagagtattggaacatctctgtgttttccggaatgtttactcaggtccatgaatgctgtgatgctgggaacttagggaagattcaccaaaatttgagagtgataaaaatggcctaaaatgggaaatggtgagcactcttattattagtgagattggtcaatcagcccatttgaaatgggtaaaaaatactttcagtaaaataattacatattatatataaaatatttctttttttgagggcagctactgagtgataaaagcatagtagaaatcactttggttaaaagtaactcaaatttttctcttaagtaatctaccaacttcctgatgtttttctttaatattttggaactgttcaagacagaatggagcctacatatatggtgttccactagtatgttgaaaatgtcatatcatggagaatggagacaccttccaggtgtctgttaaacccatcttctctgtgtacttctggcatcttttttggtaggatcatttggcagggggtagagtacctgtacttttggcaccattgaaaccagctctggcccacttgtttgaatagctatcagactcagcgtctctatatgctttatatacagttgagagaaccagtgtttaatgctcttgaaattgtatcttccatgcttcagaccagatgcatttaacaaaatggatatattccagctgtagttgcccagtgtttacttaacacatctacatttttttcttgtctattttggtccccttgataggaaaagctataattttaggcaggactatacgtcgatttgtagccatgcttccttcctttcccttgctcatccatgttagctggcagtttttcttttgaaaagttaaaaccgggatatgtgcaatagaaatatatatatatatatgtatattttaatacttgtggacaaatgttacaagttgtttaagaacaacaaaatcaccaatgtcttccattttgagatgtgtatagttttgtaagcattagtgcttggtagcatattgtagtgccatgttaggggttagtgcatgagtctagtgattttaaacttcaggatgaattattgataataacaaatagtgtaaaaagagtggaaaatctaaaccttttctttttccataatgtctaaatctgttatattcttcctggggaaaagagattaaggcccaaaagactcatttatgaatagaaatgtggggtcaaaatctgagatactatatttgaggacatttcagctttccataaggtatctggaaaccagctgtctttgtgtcttatgaaacctcaagtcaaaatgagaccgcatttaattattctgctttgctctttttttggggtgggggggagatagagtttcactctgtcacccaggctggagtgcagtggcacaatctttgctcactgtaacctctgcctcttgggttcaagtgattctcgtgccccagcctcccgagtagctgggactacaggcacgtgccaccacgcccagctaatttttatatttttagtagagacggggtttgctgtgttggccaggctggtctcaaactcctgacctcaagtaatccacctggcctgctcttttcatgtcttaacatggcatgtcttttagtttcattattttcctactccttgtatgtcaagaaattacattttgcatgtcttatggagatgctgttaattgcttcagtgagtgcttttctaatctgcagaccatttacatttcctgtttgcagcatgctgtgtgcaaacactcagtaatttggagtattcaattatttgttagggctcttcctatttccaaatgtgctgaattgtctattgatgggattttcagatcttttcatgagaactggaaatgtagctgggtggcacctacctaggttgctacgtagtgagtagactttctcttgggtatagtaagcctcagacagctttcacttttatctactttacttgtggaaataaaacagtcattttgttctgaaagaataagatagctttctgtagagaaggaattcctacctctaaaagctgccttgagaactcagaactggcagttttctgaggtgatttttaaatttcagtattagggagagtccagcatttgctgacacagattctacataactaatgtatgatagcaaatgcaaaactattataatgtggtgtatcttgcgcatacacaggttagaacaagtagactctggcagcagatctccagagacccaagtttaggttctcatagtgtatttgaagtagttatactcctggcttaagtagtttagtgcctgggagaatccattactgaaaagcatttaacttaaaaaaaaaaaaaatgaaaaggtagtgaatacagaatagcacaatatataggaaaggatatttcctgttgaaaaaaaaagccataaaattaatagtaattttcaagaggtagaattttagtagcaataagtttgtgcatgtatagtaatttgcattagcaaggttgtacaatagaataagtgatactactggagtttgtggggctctgcaaccaagagttgcacaagggccaggtgcggtggcttacacctataatcccagcactttgggaggccaaggtgggcggatcacaaggtcaagagatcaggaccatcctggccaacatggtgaaatgccatctctactaaaaatacaaaacttagctgggcatggtggcacatgcctgtaatcccagctactcaggaggctgaggcagtagaatcacttaaacctgagaggcggaggttgcagtgagctgagatcacaccactgtactccagcctggtgacagtaagactccacctcaaacaaacaaaaaatgcacaaaaggaaaaaatgttctggataaagagcatatgaaaggtactttcttttagaacagtatgaatgtatatgaatttatctttatgtgagaaataatcttttttgtaagttaaaggttaaagaccctgcttgtttcctaaatcagagggttagagctgttgaaattaaacctttatagtgcttaacctggaaacaaatgtactacagccccactgaagccgctctatgggttttttgcttacgatgttttagcaacaggcatttattttgtagaatggtatactttctgctttgtctcctcatctttctccactggtttcctgggtacattttttttaaagggagagaagtttgtgagtttaatgttttaaaaaaactcccaagaacatggataagccggatttctctcatgcttatgattagggagttaggatttaaagatgcaaagcagaaggactgaaaggaatagccagtgaatatgtttcagtgggtgaggtgtgaaaccttgtctaatatagatgtgtcctatggcctgtgactgcttattctttatcaatgagaactcagcaaactagtttctttcttgatctgaggaaccacacagctcacatcagaatataatagtggaactagggtgacttcactccctttcacctgatgtctatcttggccttttagcaccttgactatccctgaaaagactgggtctttgttttcccagggaaaaaacgaagtgatgtagatctaagaaatagtgcctctttaatatttaattcttacatgacaactaacacacagggaaaaggctatgttaagttgattatagctcctcttaaaatgtcctatgctgtcagttggtcttagagacatgggaataaccaagcaatattcagacatctgcactatctggggacagcgctacatagtacaatgatgtcagcagttcagttacttggaacaattaaagattacccttaacagccatgttaatacatctaaatgctaaaatatactacgagtttttcatagtcttgaaagtatacagttaattacttttcaaagttactgtggtctcatgtttactcttcttgtatctgtgatatgcaaaaagatgaagactcttggcctccaggagtttacattctcatggtgctgttggttcaagcagattgctttagtttattaatgaacattgcttggctattaattatatcctatttggaaggatcccttggtgaacagttttaaaaagcagagggctgtgctaaatttcagggtattgatagcttgagtttacattgtattagccctgctcgttatcatttttttccccagggagctatgcaggtaatgctcattagcatgaatcagaaaagaaaccattctgcctaagagcatcttaaccatccccctaaaccacctatgctctcctgttatagttgtcagtaaatcacgaagaaaattaacagctccttaagactctacatccctcaattctctttcttttcccagagtttgtacatcattctctactcagatggaccaggatttgcatataagccttttaaaactgactagtggtcctaattttaacatttttgtgtatgactcctatcccttttctgaagcagcattgtgatagatgtggagcttctacctgcatttctaagcaattattaacccaacttttgagttgaaacttgcatggatccttgttatgtcccgtaattcctctgaatcaaggaatttattttgcatgcttattaaactcaaactgggtctgattgaaagtgcaagcaatagtgacaggaccttaactctggttttagagtacgaacattctaatgcatgactcaaaatgtccagtgttgtggttactagttattttatatatgcatttgttaataatgaagcaatagagactaagaccaatagcttgaatatattcagattattttcatgttttaataaaggatttttcttacttccattgaaaatgggaagtagaagataaacaggggcaaccacaagacattcaaactgtcaggactagggcgtagcagtgcccaccctctaaccacttgcctggttccattagtccccaagcatgtttgaaaacaaaagacacaaactaagcatgctgaataaaactagctgctatggctgtaataatcagaaaggtgcagagtttcagaaagagtaggaaagtagggaatgccagtatggagtatgtaaaataactagatatggatatggggtttgtttatgatatgctttatgtagacaaagtttgaggtcttttaaaactgggatttgagttgaaaagagtcaggatgcacatatttccactatttcaggattttcagatgactaggcacatgttgtggatgatactggtaccaactaccaatgaccaactataaagtacccctgcaataagggagacttcctttttgtagaatagtcctgaaaatactgacagatctgtggttagtttgttattttattgcataaaaaacagtttaaacaaattttatagccaaagttttatccttgatgggtttggccagactgcaatttcttgactaaagcttttaatgccaggttaaacaggagaaactttttccactagaagaaaatccttgctatctattttttccaatagaagaaaatccttgctatttattttatttgatgaataaacaaatttattgcagtagcttaaaaaaattttttttttaaacagtctcactctgtcgcccaggctggagtgaagcaatgtgatctcagctcactgcaacctccacctcccgagtagctgggattacagacatgcaccaccaccctctactaaaaatacaaaaaattagctgggcattgtggtgggcgcctgtaatcccagctacctgggaggctgagacaggagaatcgcttgaacctgggagatggaggttgctgtgagccgagattgcaccattgcactccagcctgggcaacaagagtaaaactccgtctcaaaaaaaaa
